United States Patent Application Publication US 2026/0092266 A1 - sequence listing, part 7

SEQ ID NO: 1127 - DNA, 24530 bp, synthetic construct
  source 1..24530: mol_type = other DNA
  misc_feature 1..24530: note = Synthetic
gcttgtaccgttcttcttcgtcatgatatacaaggctaaaaacaagctgaagacaaaaagagctcataaataaaacctgaaacgtatgaaacgaacaaaatatacttattgcattttattgatgttgtcggttgtgctcttgctgggcagttgccagttgggcaaacattacattcgcccgaaactggacttgcctgatacgctcgacagtatgagtgtcgacaccgcttcccttggagattatccttgggaacaactctataccgatacaactttgcagggactgattcggaaaacgttgatgtataataaggatatgctgatagcagcagcacgtgtcaaggaacttgcagccatgaaacgcattgactatgcaaatatgtttccgtcgatcggcctgaaagtttacgcagaacgtgagagagaaaattatggaggaaaaaatcttaagcaggatgatgagttcgatttgaaagctggagcgacttgggaactcgacctgtgggggaatctccggtgggcacgcgataagagtcttgccgaattcatgggctccatcgaaaaccagcgtgcgttgcgcatgagcttagttgcacaagttgcacaggcatactttgagcttgttgcactggataacgagttgtctattgtacaacagacggtagatgcccgtcgggaaagcttacatctggcacgagtacgctacgaaggaggattgacttcggaaacggctttccgtcaggcacaggtggagttggcacgaacagctacgctggtgcccgatttggaacgtaagattgcattgaaggaaaacgatattgcttttctgacaggggagtatccgcatcacatcaagcgctctgtactgccggaagatgtcatgttctctgccagtttgcctgtagggctgccttcggctttgctggaacggcgcccagatgttcgtcaggcggaacaggcgctgattgctgccaatgctgcggtgggtgtagcctataccaatctgtttccccgtttggcattgactgttagctatggggcagaaagtgatctgttgagcgaattgcttaaatcacctcatcagctttttgcagccaatctgttgcagcccatttttgccatgggaaaaaaccgggccatgctgaaagctaagaaggctgcttacgagcaagccacttacgcttatgaaaagacagtcttgaatgctttcaaggatgcgtataatgccatcgctgaatttaataaggtaaaggaaatctatgaaacccgcctgcgactggaacaggcttccaagagtacgctcgatctggcacagttgcaatacctcaatggggtaatcggttatatggatttgctggacgcacagcgtggttacctggatgcccagattggattgagtaatgcggtacgcgacaaacagatcagcatggtcaatctttataaagcgctgggtggaggctggaaagaatagttttattcggcatattaaaaaagttcgagattattttcttgaaacatgttcgaaatatgccgataaatctttatctttgcatcccgaattgtaatgtgctctaatgtgtgatttggtgaaacagataaagaaaaaagggtatgctccggattcgagattacagagtttgcctcatgcggggatggaaaacagaggtcttttcgggattccgttttcctcaactattttcttttttctgaataccatgttggggagcactgctcattcttattgttttttttatggtaatttaatcgaatgtattataaaaagaaatacctggaactgctcttttcagtaggttcaggtatttttgtatatatggagtaggcaattaaacgacacgaaataatatggaaccgctaaagcatgaatgtggagtagcgatgattcgcttgttgaaaccacttgaatattatcaggaaaagtatggcacgtggatgtacgggcttaacaagctgtatctgctgatggaaaaacagcataaccgcggacaggaagctgcgggactggcttgtgtgaagcttcaggcaaatccgggtgaagaatatatgtttagagagagaggactgggagctggtgccattaccgagatattcggaacggtgcacagttattttaaagatcttactcccgaacagctccatgatgctgattatgcgaagaaatgcctgccttttgccggtgaactgtatatgggacacctgcgttattctactacgggcaagagtggtatttcgtatgtgcatcctttcttgcgccgtaataactggcgtgccaagaatctggccttgtgcggaaactttaacttgacgaatgtagatgagatttttgctgatatcactgctgccggacagcatccgcgtaaatatgccgatacatatattatgctggaacaggttggtcatcgtttggaccgtgaggtggaacgtctttacaacgaatgtaagtcggaaggactggaaggcatggatattacacatgccatcgaagaccgtatcgatctgacgaacgttctgaaaacttccagtccgaaatgggatggtggctacgtgatttgtggactgacgggtagcggtgagtgctttgctgtgcgtgatccgtggggtattcgtccgggattctggtacatggacgatgaaatcatggtactggcatccgaacgtccggttatacagactgcgctgaatgtgcctgccgacagtatcaatgaactgctcccgggacaagccattctggtgaacaagaaaggcgagatgcgtctggcacaaatcaatgaaccgaaagaaaagaaagcttgctcgttcgaacgcatctacttcagtcgtggtagtgatatggatatttaccgcgaacgtaaacaattgggtaagacattggtgaatccgattctgaaagccatagacaacgatgtggtacataccgtattctcatttatccccaatacagcggaagttgctttttatggtatgctggaaggattcgacaactacctgaacgaactgaaagtgcagcgtatcgaggcattgggacacaagcccagtcatacggaattggagcagatcttgtcgcaacgtattcgtagtgagaaggtcgccattaaggatattaaactgcgtaccttcattgccgagggaaatacccgtaacgatctggctgctcatgtgtacgatatcacttacggcagcttgacgccttatgaagataacctggttatcatagacgatagtatcgttcgtggtactactttgaagcaaagtatcatcagtatactcgaccgtctgcatccaaagaagattgtcattgtgtcttcttctcctcaggtacgttatcctgattactatggtatcgacatggcgagcatggaacagtttatcgctttcaaggcggctattgcgctgctcgaagaaagaggcatgcaacatgtcattgaagaagcataccgcaagtcgaaagcacaggtcggactgcctaaggaagagatggtaaactatgtgaaggaaatctatgcaccgtttaccgatgaagaaatttcgcataagatggtagagcttcttactccggtagggactcaggcaaaggtagaaatcgtttatcagaccctggaaggattgcacgaagcgtgtccggctcatttgggcgactggtacttcagcggtgattatcctacgccgggtggtgtgaaattggtaaatcaggccttcatcaattacgtagaagaaatctatcagttctgatgttggaacgaaacgttttgactccggattatatatagaccaaagaaaaacaatattaaagaaaacgatacagatagaaaatgagaaatgttacattaatcctcgacgacgggagccgctttcatggcaagtcgttcggttatgagaagccggtagccggtgaagttgtgttcaacaccgcaatgaccggttatccagaaagcttgaccgatccttcgtatgcaggtcagttgatgactctgacatatccgctggtgggcaactatggcgtgcctccttttacaatcgaagccaacgggctacctactttcatggaaagtgagaagattcatgccgaagcgattattgtgagcgactacagcgagaaatattctcactggaatgctgtggagagcttgggcgattggctgaagcgtgaacacataccgggcattacaggcatcgatacacgtgagctgaccaaagtgctgcgtgagcacggtgtaatgatgggaaagatcgttttcgatgacgaacctgacaacattcccgaagcaacttatgcaggtgtgaactatgtagataaggtttcatgcaaggaagttatccgctacaacgaaggagatgacaagaagaaagtggttcttgtagactgtggcgtgaagtcgaatatcatccgctgtctgttgaagcgtgacgtggaagttatccgcgtgccttggaactacgatttcaatacaatgacattcgacggcttgtttatttccaatggtccaggtgaccctgacacttgcgatgctgccgtgcagaatatccgtaaggctatggagaatgaaaaattgcctatcttcggaatctgtatgggtaaccagttgctttcgaaggcaggaggcgcaaagatttacaaactgaaatacggtcaccgcagtcacaaccagccggttcgtctggtgggaacagacaaatgtttcattacttcgcagaatcacggttatgccgtagacaataatacattaggagccgactgggagccgttgttcatcaacatgaatgatggttcgaacgaaggaatccgtcacaagaagaatccttggttctcggcacagttccatccggaagctgccagcggtcctaccgatacagaattcctgttcgacgagtttgtaaagttgctgtaatccattaaaacaaagaagacaatgaaagaaaatataaagaaagtattattgttaggttccggagctttgaaaatcggtgaagccggcgagttcgactactcaggttcgcaggcactcaaggcgttgaaggaagaaggtatcgaaaccattctgatcaatccgaacattgctaccgtgcagacttcggaaggtgtagcagacaaaatctacttcttgcctgtcactccgtatttcgttgaaaaggtaatcgacaaagaacgtccggatggtgtattgctctcatttggtggccagactgccttgaactgtggtgtagctctctacaaggcaggagtattcgaaaaatacaatgcacgcgtgctgggaactccggtacaggctatcatggataccgaagaccgtgaactgttcgttgagaaactggatgaaatcaatgtgaaaaccatcaagagcgaagcagtagaaaacatcgaagatgctcgccgtgctgccaaggaattgggttatccggtcatcatccgtgcggcatacgcattgggaggtctgggatcaggtttctgcgacaacgaagaagaactgaacgttctggctgaaaaagcattctctttctctccgcaggttttggtagaaaagagcttgaaaggctggaaggaagtagaatacgaggttgtgcgcgaccgcttcgacaactgtatcacggtatgtaacatggaaaacttcgacccgctgggtatccataccggtgagtctattgtaatcgctccatctcagacactgacaaacagcgagtatcacaaactgcgtgaactagctatccgtatcatccgtcacatcggtatcgtaggagaatgtaacgtacagtatgcattcgaccctgaatcggaagactatcgtgtcattgaagtaaacgctcgtctgagccgttcttcagccttggcttctaaagctaccggttatccgctggctttcgttgcagctaaattaggtctgggttacggtttgttcgatttgaagaactcagttaccaaaacaacatctgcgttcttcgaaccagcactggactatgtagtatgtaagattcctcgctgggacttgggtaaattccacggagttgaccgtgaactgggttcaagcatgaagtctgtaggtgaagtgatggcgatcggccgtaccttcgaagaagctatccagaaaggtcttcgtatgatcggtcagggaatgcacggatttgtagaaaacaaagaattgcagattgccgatattgataaggctttgcgtgagccgaccgacaagcgaatcttcgttatctcgaaggcaatgcgtgccggatataccgttgatcagattcatgaactgacaaagatagacaaatggttcctcgacaagttgatgaacatcatgcagacttcgaaggaacttcacgaatggggcaacaaccacaaactgttgtcacagcttccgaacgaattgctgtacaaggcaaaacgtcaaggattctccgatttccaggtagcacgtgccatcggttacgaaggagaaatggaagatgccatcatcgatgtacgtaaccaccgtaagagtgtaggtatcgtgccggttgttaagcagattgatacgctggcagccgaatatcctgcacagacaaactatctgtatctgacttacagtggtgtggcaaacgatgtacattatctgggcgaccacaagagtattgtagtattgggttcgggtgcttaccgtattggatcgtcagtagaatttgactggtgcggcgttcaggcactgaataccatccgcaaggaaggataccgttcggttatgatcaactataacccagaaacagtttctaccgactacgatatgtgcgaccgtctgtacttcgacgaattgactttcgaacgtgtgatggatatcctcgacttggaaaatccgcacggagtcatcgtatcaaccggtggacagattccaaacaacttggcactccgtctggatgcacagcatatcaatatattgggaacttctgcaaagagcatcgacaacgcagaagaccgcgacaagttctcggctatgctcgaccgcatcggcgtagaccagcctgaatggagcgcactgacttcgatggaagatatcaatgccttcatcaagaaagttggattcccggtactggttcgtccgtcgtacgtactttcgggagcagccatgaacgtatgttctaaccaagaagagctggaacgtttcctgcaactggcagctaatgtatcgaagaaacatccggttgtagtaagccagttcatcgaacatgccaaggaagtagaaatggatgccgtagcacagaacggtgaaatcgtggtatacgctatcagcgagcacatcgagtttgccggagtacactcaggagatgctaccattcagttcccgccgcagaaactgtatgtagaaactgttcgccgcatcaagcgtatatctcgccagattgctaaagaactgaacatttccggtccgttcaacatccagttccttgcccgtgaaaacgacatcaaggtaatcgaatgtaacctgcgtgccagccgttcgttcccgttcgtcagcaaggtactgaagataaacttcatcgaacttgcaacgaaggtgatgcttggcctgccggtagaaaaacccgaaaagaacctgttcgaactcgattacgtaggaatcaaggcaagtcagttctcattcaaccgtctgcagaaagccgaccctgtactgggagtcgacatggcttctaccggagaggtaggatgtatcggcgaagacacttcatgtgctgtgctgaaatcaatgctttctgttggctatcgcattccggaaaagaatatcctgttgtctaccggtacaccgaagcagaaggtagaaatgctgaaagctgctcaggaactgaaggcaaaaggttacaacctctttgcaacaggcggaacatcgaaattcctgaccgagaacggtatcgagaatacccgcgtatactggccgagcgaagaaggacatccgcaggcactggaaatgctccacaagaaagaaatcgacatggtagtaaacattccgcgtgacctttctgccggagaactggacaatggttacaagattcgtcgtgcagccatcgacctgaacattccgttgattaccaatgctcgtctggcaagtgctttcatccatgcattctgtaccatgagcatcgacgatatagctatcaagagctgggacgaatataaataatcccttctcgcgatagaataaatattacttaagcgccacttcggaaaaggcaaatttccggagtggcgctttttcgtttagaaggctgttttccggcatcgggattcagtcttttactgtttcttcatttatatctttgcggtgttacggaattgaaactatttccgaattcccccttttgcgctttctttgtttctttttgtgaacagccttattatttatacattacctgcaactgggcttttactgtttctttacttatttttgtgacgtgcgtgtaagtatttcttcggaagtgcgactaacgagggtaaagaaacatgtagaacaatatgatgtatgaataaaacactgcaacaagaaaaagactttctcctgctgattgagtcgcacaagcgagtcatttacaaagtctgttacatgtatgcaaccgacaaggaacaattggacgacttgtatcaggagatagtaatgaacctctggcgcgcttatccttcgtttcgcggcgaaagttcctctgccacatggatataccgtatcagcctgaatacgtgcatttcgtatcgtcggaagtcgaaccatcagattcaggcagtcacccttccggtagatttcgaagcattcgatgaggaggacggcaagacgtcgcaactgcgcgagctataccgtctgatacacgcactcagtccgctggaacgggcactcatcctgctttggctggaggaaagaagttacgacgaaatagcccggataatgggtatttcgaagaacaatgtcggtgtccgtctgaaccgcatccgtgagaaactgaaaaacatgtcgaaccaataaatctcagcttatggaacttgaagaactgaaaaatcaatggaacttgctcagtgagcagttgaagaagaacgaaatagtcaatcatgaggtcataaaacgaatgatagagaagcgtactctgagtgcccgcgaccgtctgataggagcaaacgtaatagccgtttcccttcttgcaggcatgctaattctgtttccgcttgctgcaacacgagttatcatccggcaggaacttctctggatattttacattgtatttccactactgattttgtattcgttctggaacatacacgttttgtataagttcaatttggccactcggaccctccttgagcttcatcgctggattctttcttataaacgcaggctccggatagaaatctggtgtactcctttccttgtaatagggctttttagttctgtctttctgattcatcaccattaccgcagtacacttatggtagtgttcgatatcctgatgcttgcggtaagtgtcgtggccggttatatatgttaccgctacgtagacaagcgttcggtagacgagatagagcagggaatgaaagacttgcaagacttggaatagtttggcgggtaggacagcagaagcgtgggacgtttgactgaaatataccagcatgagtccgatgcttctactggtcttttatggaaaacgaggtgaagttttactgtaagtttgtacaaacttttttggaatttgtacaaaaaacaaaatgatttgtacaaatctggtttgatgggtgcagaagaattggggaggagataaggaagtcttagtcattattctttcaggttagtaaggaaaacatctatagctataaaaaagaaagcgaccttcgtaaaaagaccgctttaaatgttttcacaacggaataatccttattgtgacttgcttcaatttagttaatgcaaatatacagaatatcttttacataagaaaggctttttttaatatctttttctaactttgaggaaatgaacaaagaaaatcggttatgaaaaagatattgggtttagatttaggaacaaacagcgtaggctgggcagtgataaattcggtcgtaaatgacgaaggcaaggaacaacttgtaaatatttcttcttgcggcagcagaatcattccaatggatgctgcaacattgggagattttgataaaggtaattctaaatctccagtagcggagcgaacccgtttgcggggagtacgtcgtttgctggagcgtagtttattacgtcgggagcgtttgcatcgggttttatctgttatgggatttttaccggaacattatgcttcacaacttgaccgatatggtaaatttctgccagaacgggaacctaaattagcctggtatcaagatgaaactggtaaatatagatttctgtttcaggattctttcaatgaaatgctggaggactttcgtcagcatcatcccgaactggtagcagaagggaaaaagataccttacgactggacgatctattatcttcggaaaaaagctctttctcagaaaataaccaaagaagaacttgcatggatattgctcaatttcaatcagaagcgaggatattatcagttaagaggagaagaagagaaagaagataataaaaagtcagtagaatattatgcactgaaagttgttgcggtagaagattccggagatcggaaggggaaagatatctggtataatgtcaagttggaaaatggctgggtataccggagagctagcagtattcctttagactgggtaggtaaggtaaaagaatttatcgtaacaacagatttggatgaaaagggaaatcctaaaaaagataaagacggcaatgtaaaacgttcttttcgggcacccaaggaagacgactggggattgttgaaaacaagaacgcaggcacagattgacgaaagtggtcagacagtgggtacatatatttacgagtcattacttcgcatgcctgatcaaaaaataagaggaaaattggttcgaacgatagaacgtaaatattataaagacgaacttcgtaagattttggtcaaacaatcggagtttcatgcagctttgcaagatcacaatttgctgcttgcttgcattgaagaactatatcccaataacgaagcacatcgtcggttactgtctacttccgattttatctatttcttggtggaagatatattgttttatcagcgtccgcttaaaagtcagaagggactaattgacgattgtccgtacgaatctcatgtctatcgggataaaaagaatggcagtttgcagcatgttccattgaagtgcgtgtctaaatcgcatccgttgtttcaggaattccgcttatggcagttccttgcttccttacgcatttatcagcgtgaaagacaggtagacggttctcttaaactggatgtagatataacgaatgaatttttgcagagtgaagatgactatgtaaaattattcgattggctgaacgaccggaaagatatagatcaaaaaacattcttagcatacaaacctttcggattaaagaaaaacgagctgcccaaatatcgctggaattatgtagaagacaaaagttacccgtgtaacgaaacaagagcggatataatattcagactaaataaggctggagttccggaagagttcttaacccgagaaaaggaagaggccttgtggcatatattgtattctatatccgataaaagggaattgacgaaagctttgggaacttttgctgaaaagaatggtttgaatgaaacttttgtagaaatattttccaaaatgccaccttttgaaagcgactacgccgcctattctttgaaagctattcgaaaactgcttgcgctgatgcgtatgggaaaatactgggacgagcaggccatcgatgagcaaacccgtagtcggattgaaaagatgctgaccggagaatacgatgaaactatccggactcgtgttcgtgaaaaggctatgcacctgaccgatatatcttctttccgaggacttcctttatggttggcatgttatgttgtttacgaccgtcattccgaagcaaaggaactcgtcaaatgggaaacccctgatgatatcgatcacttcttgcgtaagtttaaacagcattcgttgcgtaatcctattgtagaacaggttatcatggaaacgctgcgtacggtacgcgatatttggaagcaggaagggaaaatagatgaaattcatgtggagttaggtcgtgaaatgaaaaatccgtccaaagaacgtgcccgtataacagcgcaggtattggaaaacgaaaatacaaatttgcgtataaaggcgttgcttacagaatttatgaatcctgaatttgagatagagaacgtacgtccttattcacctgcccagcaagaaatcttacgaatctatgaagaaggtgtgttatcaggtgttgcggaaaaggatttgccagacgatattgcttcaattttgaaaaagttcagggagaatgatgtaaagaaacgtcctactacttcagaagtcttacgatataaattgtggctggagcaacgctatcgttcgccttatacaggcagaataattccgcttggtaaactgttcactcctgcttatgaaatagagcatgtaattcctcaatcgcgttactttgacgattctcttaccaataaggtaatttgtgaatcggctgtaaacaaactgaaagataattgtttaggatatgaatttataaagaaacattccggcgaaaaggttgaattgggaaatggtgaaacagctactattttttcagttgaagaatatgagcgttttgtgaaggactcttacttaggtaatagtaagaagatgaaaaagctgctgcttgaagatatacctgataactttattgaacgccagttgaacgatagccgatatattagcaaagtcgtaaaatctttgctttcgaatattgtctgtgaagaaggcgaacaggaaggtatgtcgaaaaatgtgatagtttgtactggtggagtaacagatcggttgaagaaagactggggagtacaggatgtatggaaccggattattcttccacgtttcctgcgcttgaataaaataacagatagtacagacttcacttctgtaagcacaaatgggcatttgttgcctgccgtacctttgcatttgcagaaaggatttaacaagaaaagaatagatcatcgccaccatgcgatggatgccattgtgatagcgtgtgccggtaggaatattgtcaattacctgaacaatgcttctgcacgcaaaggttccgaaatttctcgttatgacttgcagcatttattgtgtgataaggtaaagacagacgcaaacggtaattacaaatggattcttcgtaaaccttgggaaacgtttacgcaggatgtatatgcagcattgacgaatattgttgtcagctttaagcaaaacctccgggtaataaatcgtacaacgaaccattatcagcattataatgaagatggagaaaagaaaatgattccacaaactaaaggtgatcgttgggcgattcgtaaaccgatgcacaaagatacggtatatggtgaggtaaatttgcgtaaggagaaaacacttcctttgaaagacgtgctcaataatccatcgattgttgtggataaatcattgaaaaacaaactatatgagttgctaaaatctcagtatgacttgaaggcaataacgaagtatttcgaaacgcatcaggatgtctgggctgatgtcaatttaaagaaaatcaaggtttactattttacaaaagaaacgaatgaacgcttttttgctacgcgtaaatcattggattcaagttttaatcagaagaagattgaagaagaagtaactgatacaggtatacaaaagattttgctgcgtcatttgcaacaaaatggtaacaatccggacattgctttttctcccgatggagtggaacgtatgaatcagaatatgactattctgaataatgggaaatggcatcagcccatttataaagtacggacttatgaaaaagcagataagtttgcagttggtgaaagtggtaataaagttaaaaagtttgtggaagctgctaagggaaccaatttattttttgcagtgtatgaatctatacaagaggatgaggctacgggcaagcaagtccgtaaacggacttttgctaccataccgctgaatgaagttatcaagcgtaaaaagcaagggttacctgtcgctcctgaggactcaaaggggaatttgccaatctttgttttatctcctaatgatttggtttatttaccgacagaggaagaatgtaataccggtaaaataattcaacctttggctagagagagaatttataaaatggttagttgtactgaaggagaatgtcattgtattcctgaatacgttgctagccctatattgcagacaattgagctaggaagtaataataaggcacaacgggcttggagtggggaaatgataaaagaaatttgtgtacccgtaaaggtagatagattaggtaatgtttctttggtaaaaatatgatactatgataaagaaaacactatactttggtaatcctgcttatttgtcattgcaaaataatcagttggtcattaagctaccggaggtggagcgtaacgcttcacttccagaaagctttaagtctcaatcgattataactagaccgatagaagatataggattggtgatattagaccataagcaaataacaattacttctggagtgcttgaagcgcttttggaaaataattgtagtgtcataacttgtgataataaaagtatgcctgtaggattattattgccactgtatgggaatactgttcagaatgaaaggtttagggaacagctgatggcgactcttccattgaagaaacaattgtggcaacaaactataaaagttaaaatacagaatcaggcacatgtcttgcaatgttgtttaggagaggacaataaatgtatgagggtgtgggcggaagaagtaaaaagcggtgatcctgataatttggaagcgagggctgctgcttactattggaaaacactttatgctcatattccgggatttacgcgagatcgtgacggaatgcctcctaataatttattaaattacggatatgctattttgcgagctattatcgctcgtgccttagtttccagtggtttgttgcctactttaggaatacatcatcataaccgttataatgcttattgtttggcggatgatgtaatggagccttatcgcccctatgtagataagctcgtatttcagcttgttaagactcatggtgagaatgtagagctaactaaggaaataaaatcagttcttttgacgattcctacactcgatgttgttatcggtagaaagcgaagtccattaatggtagctgctacccagacaactgcttctttatataaatgctttagtggtgaattacgtaaaattgcttatcctgaaatgtgatggatagatatagtgaatatcgtattatgtggatacttgtattttttgatttgcctacagaaactcaaaaagacaagaaagcttatgccttgtttcgtaaaaatttgcagaaagatggtttcactatgtttcagttttcgatttatattcgtcattgtgccagttatgagaatgcagaagttcatataaaaagggttaagtcatttttaccagaatttggtcaggtggggataatgtgtataacagataagcagttcgaacaaattgagctgttttatggtaagaagcctcattgtaaaaatgtagcagggcaacaattagagctattttagaaataagaaatcccgctttttatggcggggtttcttgtaggaaacatttcttttttaatttctattatttgatgtaatgtgttgctatataggttgttacacggattgcgctgtttcctatataacaaagttactaaattgaaaacaaatcacaacaagaaggtatacatgatatgataagaaacgctgtttcctatataacaaagttactaaattgaaaacaaatcacaacccagctcttggctgtattttgcttgttcctgctgtttcctatataacaaagttactaaattgaaaacaaatcacaactccatgctggttgcttacctattgattttggctgtttcctatataacaaagttactaaattgaaaacaaatcacaactgtttccctctgcatagttctattatgctgctgtttcctatataacaaagttactaaattgaaaacaaatcacaacaaaggaaatctttctttttctccattgaagctgtttcctatataacaaagttactaaattgaaaacaaatcacaaccttgttcaaactcccattttttaactgctggctgtttcctatataacaaagttactaaattgaaaacaaatcacaacgttgcgcgttctcttttcgcaggcggtctagctgtttcctatataacaaagttactaaattgaaaacaaatcacaaccgttctgtttgcatcccggacattttccagctgtttcctatataacaaagttactaaattgaaaacaaatcacaacgatttgaatcatataatacgaagagcgaatgctgtttcctatataacaaagttactaaattgaaaacaaatcacaacccttatccttaaaataattgattgcaatctgctgtttcctatataacaaagttactaaattgaaaacaaatcacaactttccgtgttgattcctctacctgctagtgctgtttcctatataacaaagttactaaattgaaaacaaatcacaacgggtagacactaccggacagaagaaaggttgctgtttcctatataacaaagttactaaattgaaaacaaatcacaacgggtagacactaccggacagaagaaaggttgctgtttcctatataacaaagttactaaattgaaaacaaatcacaacggctttgaagtaatccacgcaaagcaccgcgctgtttcctatataacaaagttactaaattgaaaacaaatcacaactgccattgctctaatttttcccaaatctttgctgtttcctatataacaaagttactaaattgaaaacaaatcacaacatgatcagtttcgtttgcagtgtgctgaaagctgtttcctatataacaaagttactaaaagaatagatatttcaaaattttcccacccaacattttgtaaatgaaatatccttactttttgcactttttaggcttttagatgaaaattattgttcagcttttcgctataaatgaaaatttttgtatatttgtcttactcttagaagaaagaaagtattagaagcgttttaggcattatccgaggttcagaaaatccccaatttcgcaacgataacaaaggataatacaaaaacgctccatgggctattgtatatgctgttttgagcaatatgtatgtatataggcgtggggctttatgtattgctcagttatcaagtatggggatacttctggacaagtaatactaaagttccccacgctttaacttttataaaaacagcttcaaggggaagcaagctgacatatcgtatatgtatgaaagcacttaaactaaacaactgtgaaagcggtgtttcaacctttgtttcatttgccgcgggtcaccgctctattcattggattctttttcttagcatttgttttgctttgtatgttgtagcatataagatacaaattatgtgccatacttttttccgtactcatctgatagtagattatggattatgacgaggcttgccatactaatggcgagatgtggagtgtaatctatcgtactttgaaagaaatacgtgaagttagagagttattatgtaccgatgagttggaaaaagtttctcaaaaaatggaactcatcgaaaaagaaattgatattttgtctgttttaatcttttacttgtgacaatatgtcacgatgtattgcgtttttatgagtggtatgtcatgtgtaaagctctaaaacagattaataagaaagatgatggataaaaagattgaggaggttgtcaacgaacagctgaatacagaattatggtcttgtaatttgtatatcgcatttcaagtctattttgaaaaacaagaattgccggttctggcattatggctaaaaaatcaaagacagaagaaagcagacaggatacaaaagttgacaacgtatttgttaggtgaggatgcatttgtgtctattcgtggctttgagtataaggccaataaatggcaaagccccgtagtggcattgaatagcttgtttgagcacgaacagtattttcataagcaagtgaatgattttatgaattttgcacgttatatgggtgatgatgctttgcaggctttggtgctcgatttgtataccgatgaggtacatgtaagtgattttcttgttgaattgcttcgtatgcttgtcaaagaatggagaagacagttaccgttggagtgacagattttatttagactgacagaggtgaaagaatggaaactgttgactttgagaaagagctggtcattttacgtgaaaagctcttgagttatgctcttttgatgtttcctaaaaaggaagatgctgaagacctgattcaggaaacattattgaaggcactagaacacagagataaatataatgagaatgttaactttaaaggatggctatataccataatgcataatacgttcgtaaacatttgtaaatcgaaaagaaattgtatgtgccagaatatttctgatagtgaaatccgggctgagatagataaaagtgtagaggagtttatcgacgatagttttggtatagaggagatttataaagtaataaacaggcttccagatgattatcgtgtggtaatattgatgagactggccggattcaggtatcaggaaattgccgataaaatggggattccgattacgttggtgaagagtcggattttttatgggaaaaggaaactgaaaagtatgctgtccagtttcagataagcgagagtcgtcaaaggattcttgcgtttacggtaaaaatactaagtggattgtttttataggttgggttggccatgagttgactcatggaaaagaagcagcttcgttggtataatgaggctgcttctgtaatatatggagtattatagtttcctgagttcttgatatagtcgttgtacggggagtcccatgacgttaaagtaggatccttttaatcccgttactccgataaagcctatccactcttgtacgccgtacgatcctgccttgtccatcggatgatagtgctctacataaaaacggatgtcttcttcactcagttggtcgaaagtaacttccgttaccgaagcgaaggatttctgaaattcggttgtggtaaggcatactccggtaatgacctgatgtgaacgtcctgacagcttttgcagcatgccgatggcttcggtttcgtctttgggttttcccagtacctcaccatcaatgtaaactatcgtgtcggctgtgataatcagttcgtccggttgtatggagggacggtaggcatctgctttttcccgggctatgtagacaggaatttcttcgcctgtcaaggtggaagggtaggtttcgtctatgccgggcagaagttttacttcatagtctattcctaaaccggacaacagttcccggcggcggggagagttggaggcgagtttgattttgtattttttcagattatcgagcatagtgttcctttctttcttaccagccgaaggcggcttcgtgtgacatccatttgccttgtgcacgcaatacttgttctactacgtcacgtccgcatccataaccgccgttgcggtgtgaaatataggtgcagatggcttttatctcgggtgcggcatcagccggacaacagggaagacctgccagacgcaatacttcatagtcgggaatatcatcgcccatgtagagtacctcttcaggtttcagattgtatttcgacagcagttcggcaaactctttcgtcttgacagcagcacccatatagatgtctgttatgcctaatccttcgtagcgtttgcgtacggattctgtccttcctcccgtaatgatggctacgtgcagtccgcattttactgccagctgtagggcgtatccgtcttttatgttaaccgtacgcatcggttctccgttgggatgcaaggtgatggtttcggcacttagtacgccgtctacgtcgaataccagtgcgcgtattttggtaagatcgtaatttatcataagttttcttttaggttacttgtatattcgtgaatgtctttgcttatttgttcgtatatcgttgccagacgaggttcgctttgcagcatttccagatggcggttgataacgttttcatcgtaacgttgtgccggaccggtctgggctgaaacaggagaaagttcatgaactttgcgggctgtttcgtcgataagcggaagcatagcttcgaaaggcagtccgtgagccgataataagtgatcggctatggcatacatgtgattggtaaagttgcaggcaaagacggctgctatgtgcaggtatcggcgttgttccgatgaggcttcgtatactttactgcctaggctcagggcgattccgttcaaagctttcaggtcgtcttgtgtattggcttctgtaaagaatgaaacttcgtggaagtcaaccggacgttgtttgctgaaggtctgcatcgggtagagcacaccgtagcgttgggcctgtccttgccagatgttcatggggacgctgcctgcggtatgtacgaacagggcttgtggagcgcgccgggtaagtggtgcaagcaggctgtccagggcagaatcttttaccgatacgatgtatagttgtccttcagagcttactttatcgatgtcggttgtatagggacatcctagtctggttgccagcgtggaagcggaggcttcggtacggctgaatacctgaagaatgttgtaaccggccttttgtaaggtgatagcaagatgagttgctacatttccagctcctatgataatgatattttttatattcattggaaagtgtttttagatgtcggtaaattaccgtgacgacaaccagtagagtaatactccaaccagtagcaaggctgcgggaagcagatagcccgacatctggcctagcagggaaacaacaaggttgatgttttggatgagccagattccggccagaataatgcctaccgatttgtccgatttaaaccagagaaaaatgacggcagcataaagcagcatggtatctttctgcataacccatggtaatccgtgagccgagaagcctatcaggcggtcggcaagataaaggacgcccatcagagccagaaagacggctgtagcacgataggtatctttatggtttgatgctttcgttgtcacgttttattctcctccgtatttattgatgtgtactttttcccataacagatgggactcgtcgaacggcttgcgttccattcctttgtgtccgatggcgatgatggacaatacctgaagttgcaggggaatgtcgagtatgccgtgtacgtattcgtcggaagacatgcctgcggcattatatcgttcgcgtacttgtatccagcagcttccgagtcctaagtcttcggcttgcagttgaatcatcagggaagcaatggccgcatcttctatccatacgtcgctggcgagcgggtctgccagtacaacgatggcgagtggagcgtctttcaggaaggaggaacctgtttctttgcaacgtgacagcttgtcgagtgtttctttgtcatctacggctatgaactgccagcagttacttcgtttggaggagggcgacatgagggctgctttcagcagggttaccacttcttcctgtgtcagttcttcgtctgtaaacttgcgcatgctgcgccgttgctttatcaattcgctgaaactcttcataaaatatcgtttttaacacgacaaatataatctttaaactcgtaatgctcaaaaaaaatcataaatttgcgataccatggctatcaggttgactacatacgaacacgcaaaagacattcccgatttgccgggaacgaatgtctttcattctacggagttgtttcggatattggagcaaacacccgggtatcgtccggtgttgctggttgcttccgaagatgacaggccgattggaaagttgttgtgtgttacacggcgtaattttcgcttgctgggttttacgaataaaacgtatgtttatggtacaggagagtattttaagtcgaagcacagccgggaggagatttttgatgaattgttgacgtattttacgctccgttacaaggagtcttcgtttttgctggagttccgtaatctggaagagcccttgtttggttaccggtatttccggaggaatggctatttcccggtacggtggttgcgagtccgtaattcgatacatcatgaacagcttgacaagtggatgagctcatctcgtaaacgtcagattgccagaggtctcaagaatggagcttctatggagatagcttctgatccagaaacggtaaaggctttcttcgcaatgctcaaaaaatattattctgctaaaatacatcgttatcttcctgatttccgtttttttgcatcttttgccgaacaatcttctcttggggggaagggtaaaatctttgttatccgtcataaggaaaaagtgatagggggatcggtgtgcctgttttccgatgatactgcttatctaatgttttcggcaggaatgcgcaagagttatcccttgctctatccgggagtacttgctgtgtggaaggcgatgatttacgcccgggaacatggatatgagcattttgagtttattgaagcaggattgccttttcggaaattcagttatcgcgattttattttgcgtttcggtggaaagcagttaagtacacgtcgctggtttaaagtaaggtggaactggctgaatcgtctgcttattcgtatttatgtctaatctaaatatatattgttatgattgatcctgtttatagtgcggctcccaaccgttacgagagtggaatgaaatatcgtagagcgggtaagagtggtattttgcttcctgaaatatctctgggactttggcataattttggtgatgtggatactttggccgatagtcagaaaaagatacattatgcattcgatcgtggcattacttacatcgacctggctaataattatggtccgtcttatggttcggcggaagaaacattcgggcagattatgaagaaatcgatggctccctatcgtgatgaactgtttatttctacaaaggcgggacatgatatgtgggaaggtccttatggtatatggaattcgcgtaagcacctgatagcaagtcttgaccaaagcttgaagcggatgaatctggattatgtggatatcttttacagtcatcgctacgatccggaaactccactggaagaaacgttgcagacattggtcgatatggtccgtcaggggaaggctttgtatgtaggtatctcaaaatatcctcgggaggctgccgctacggcctatcgttatctggcagataaccacgtgccgtgcctgctttatcagggatgttacaatatgtttaaccgtgaggcagaggaaaaggggattttggaacaagcttataacgagggcagtggctttgttgccttttcgcctttggcgcagggactgcttacggaccgttatctgaatggtatacccgaagattctcgtatcgcgcggggaggaaatctcaagaaagaagctctgacggatgaggtgcttcggaaaataaaggcattgaacgaagttgccttacgtcgcggacagactttggccgaaatggcgctggcttggctgctgaaggaccagatggttacatcggtcattattggtgctagttcggtaaaacagattgacgataatttgaaagcgttgaataatacttctttctgtgacgaagaaattactttgatagacagcattttaaaatcttgagtaacaggctttgttgtagagaaggcagtttgcaaaagaggctagtggagaaaatggaatatttctgacaatggtgatttgtgtaaaataaaaaataaactaaaaaaagagtttgcagagaaaataaaatagagaaatatttctttattctgcacatttttgttttctttgtgcagttgatatgaaccaactttagattttaataccattaaaaacaacttgattatgaaaatttctcacatcgaacatttgggtattgcggtgaaaagcatcgaagaagcccttccttattatgaaaatgtactcggattgaaatgttacaatatagaaactgtagaagaccagaaagtaaagaccgcttttttgaaatgtggtgaaacgaaaattgaattgctggaacctacaggaccggatagtacgattgccaaattcattgaaaacagaggaatgggagttcatcatgtagcatttgcagtggaggatggtgtggcaaacg

SEQ ID NO: 1128 - DNA, 24530 bp, synthetic construct
  source 1..24530: mol_type = other DNA
  misc_feature 1..24530: note = Synthetic
gaagccctgtactgatgagcatggagccgttaggcagcatgtaggcatccggttcggtagattggatgacacgtacattcaattgttcgttgcgattcgggtcaatgccggcaggagcaagtttggcaaatacgccttgcacataggaggtgatgtaatcgtcctgataggctatttcatgtagcctgtccagatattcgctgcattcctcgtctatttcccggcgcaactcatgtctgtaacctcgttcgctgaaatgcttgtaaagctggtttttaaagtatgcttgttgccagaattcccggtcggtctgtggagtggaaagagtgattatgtacatttcctcctcaggtatagtttcctgtattccattgatttctatggcgtaaagaagagagaacgttttgggattctggattatacggcgaatgatgacgggagtaccggccggagtgtttcgatagttttttttcagttcgccattgatggcaatacttccactgatatctttaactttcggtttcgccccccccgtggccgcaaagagacatgccatgaggaatagaatggtaaatcgtttcatggttgtttatgtttttcgtttggtcttacaaaaatagaaaaaggtttctcctatttcctgtttttttccctatttcccgataggtgattccctattcgagttcaagaactgtctgcgaaactatgctgtctgttgcgatggagtcggtgtcgcggcgcaggattacggaacggcaaccatattccttcttaattttttctttggcttgcgggaatcgggcctgataccctttcagactgttgtctttcagcacttgctccatgaagtaggcaaatatgggcaaagccgtacggctgccttgtccaagttctccggtgcggaagtggatgctacggtgttctccgcccacccaagcacctcctatcagcttgggtgtgacgcctacgaaccatgcatccgaatgattggatgaagtgccggtttttccaccgaactcagtgttgtagcggtgcaggtcgtatccccatagggcttgcgaagtgcccatcggctcggtcattccggctttcagcatttcggtcatcaggaaagcggtttcgtaggggagcacttgtttctgtgaggtctcgtctttgtagattacttttccgttggcatcttcgatgtgggtaatgagtactgcatcgtgcatttttccttcattgatgacggtgctataagcattgaccaactccaacagagaaacatccgaagcccccaagctgagggcgggcgtttcttccagcggtgttttgatgcccatggcgtatgccgtctcagctactttgtgtacacccacttcttgtcctacttgtacggcaatggtatttatcgagcgggcaaaggctgctttcagggaaagcgtgtctccggtgtattcgccattggcgttgcgcggaatccattgggtaggtttgccgttttcgatgacgttccatacgtcttgcttgtcgatgcggtagtcgcagggagacatgccctcgttgaatccggcggtataaacaaacaatttgaaggtggaaccgggttgacgtttggagagcactttgtcgtatttccatgagccgaagtcgatgtcgcctacccatgcctttacgtgtccggtttgcggttccatggcaacaaagctgcaatgcatgaagcgttccatgtatcggatggagtccatggtgctgatggtggtgtcgcgagtgccggtgtcgtaatcgaacactctcagccgatgaggaaggttgaggtagtagtctacggagtccggacggtcgggatatttaccggccagtatcttgtaggctggggtacgtttggacaagtcttctataaaatggggtatttcctgatgattgcggtcacgccacggagcctgattgccccaatggttgttgaagttgcgttgcactatgcgcatctggcggtttacagcaacttcggcgtatcgttgcatgcggctgtcgagggtggtatatattttcaaaccgtcggcgtagaggtctatttggttttctttgcaccaaggagccagataatcggcgatggcttcgcggaaataaagggctttcccgtcatagttggtctcgatattataattcagattgatgggcagcttcttcagagagtcgcattcggcccatgtgatgccgtggtttctgcacaggttttccagcaccacattgcggcgcttcatgctgttttccgggttcaggcggggattataggttgtggtggctttcagcaaccccactaaggtagccgcttgttcgcaggttatttcacggggagtggtgtggaagtaggttttgcaggctgtttttatgccgtaggcattgctgccgaaatctaccgtgttgagatacattgtcaggatttcctgtttggagtagaacatttcaattttgactgccgtaatccactctttggatttcatgatgagcaatttcaagccgggaatttttcccagcaatcctgtggaatattgggaacgtaccttgaacatattcttcactaattgctgggtgatggtactggctcctcgcgcatcgcctttggccatgtctttgacggcggcaaacaccccttgaaagtcgatgccgaaatgctggtagaaccgctcgtcttcggtgctgatgagtgtttttatgagtatgggggaaatttcttcgtaacttaccggactgcggttttcgcggaaatatttgcctatcagctttccgtctgcactataaagttccgacgcaatgggctgttcggggttatgaatactggacagaccgggagatttgccgaacagccaaaagaaattgatgtctaccatgataaggtagatgaggaaaagaacaacgaaagagacggtggacgccaatactctcttataccaaggcttgttccggtagaggcttttgtaccatttgccagacttccggcaggattcaacgagaaaatgaagaacattactcatagccaaatattcctgtataacaaaaaagggaatcctttaacgaaaaagattcccttttttcagctttaagtaaaactgattatttcttgcggttaccataacggctcataaacttatcaacacgaccggctgtgtcgaccagcttggacttaccggtgtagaacgggtgagaagtgctggagatttcgagctttaccaacggataagtttcaccttcgaattcgatagtctcttttgtgttgcaagtagaacgagataagaacatgtcgccgtttgacatatctttaaatactaccggacggtaattttcaggatgaataccttttttcattttgatatttgttttataattattattctgttactattttggtaatgaatagtgtaatggtcttctttttcagagcgcaaagatagtgcaagtccgagacactgcaaaataaaatgcgatttattttgttgcgagaggggtaactcgcccggtttgagccggtacgttggccttgaaacagaaaaaagtggcggggaaagtaggtttatcgcattttatttctgacttttgcagaaaacaattttaataattatatgaagaaattacttgttttactctttgtttggctttatgctgcaacatcgggagcgcagaatacggagcaaaaggtatatagtgtggcgttttataatctggagaatttgtttgatacgattcacgatgcgggaaaagacgattatgagtttttgcctgacggcagttataaatggactgccgagaaatatgcatcgaagctgcggaatctctccaaagtgctgggcgaactttcgcgggatgtagtgcccgaaggcccggctttcatcggtgtggcggaagtggaaaacagcagggtactggacgatttggttaaacaaccggctatatccggctatcgatacgtacattatgaaggacccgaccaacgcggagtagactgtgctttgctgtacgacccgaagcaattcagcgtcaccgcttccgaattggttctttccactcctttcaagggagatacgacgcatttgacacgcggttttctgatagtggacggacagctggccggcgaacgggtttgcgtcatcgtcaatcattggccgtctcgcggagcagattcgcaggtgcgcgtgcatgcggcacggcaggtgaaagccctgaaagactcgctgatgcgtgaagacaaaagacttaagctcatcataatgggcgacttgaacgatgaccctatggacgaaagcctgcgggaactcggcacacgcaaatatcccaaacaggtgaagaaaggcgggctttataacccatggtgggagacattggaagacaagggagtgggaacgttgctttatcgaggcagatggaatctgttcgaccagattctcatttccaaacctctgttgaaagcccggaaaggattgaaatacgaccataacgaagtgttcatacgcgattacatgattcagcaggaagggaaatacaaaggcgctttgctgcgtacacatggcggaaggacttggctcaacggttacagcgatcacttgcccaccatcgtttatctgcggaaatgactcaagggtttagctgaatgctcttaggggacagcgcatgtgacatgacgctttcttaatgtggtgtgtttttttacttttggcaagaaagaaatcataaacaaaaaaaaacgcttctaacgttatgcaaatcaggtcggtagaaatttactaaaaactcaccggatttttactaaaaattccccgaagatttactaaaaatccggtgagtttttagtaaaaatggacaaggattttagaacgcatccgaaaatctttacaaacgacccattttttgtaaagaataaaaaacgtattccctccggtaaaagcctgcttgtattctacccggcattatcttgaagaaaatttaaacagaccctaaagaaaacaaaaccgagaacctaaccgtattcccggttgtttattatttaaatacattctaaattgcttgcggtatgtgtgcataaacactatctttgcatcattaaacagaaagagggaagagagtatgcgtttgtccgagttgaaaaccggtgagaaaggggtaatcgtgaaagtgctggggcacggcggtttccgcaaacggattgtagagatggggttcataaaaggaaaaacagtggaagtgctgctgaacgctccgttgaaagaccccattaaatacaaggtgatgggctatgagatttccttgcgacgccaagaagccgaaatgatagaaatcatcagtgagcaggaagccaaagcacaggccgtggagccggattaccacaaaggattgagcgaagaagtgcgcttgggcgaagccgacctcaaacggcttgcgctcggaaagcgccgcaccatcaacgttgctttggtgggaaaccccaattgcggcaagacctcccttttcaacattgcttccggagcacacgagcatgtgggcaattacagtggagtcaccgtagatgccaaagaaggatatttcgattttcaaggttatcacttccgtatcgtcgaccttcccggcacgtactccctctcggcctattctcccgaagaaatctatgtccgccgccatatcatcaatgaaacgcccgatatcattatcaacgtagtggatgcttccaatctggagcgtaacctctatctcaccacgcagttgattgatatgaatgtacgcatggtcatcgcgctgaatatgtacgatgaactggaagccagtggaaatacgctggattacgtcacgctcggcaggcttttcggcgtaccgatgatacctacggtcagccgtagcggaaaaggcatcgaccaactgtttcatgtaattataaatatctacgaaggagccgattttctggatcgcacaggcaagatgaacagcgaaatcttagacgaccttcgcaattggcatcaagaatacgtgcccgaccacgatttcggcagccacaaagaagaagtggaacatacacgcggcttttgcaggcacatccacatcaatcatggacctgagctggaacgaagcatagagggggtgaagcatgtaatcggcctgaacgaaaatatccgccataaatattccacccgcttcttggccatcaagttgctggagaacgacaaggatttggaaaaagaagtacagactttctccaacgcaaaagacattcttgaggttcgcgaccgggaggagcaacgccttcgcaatgcgataaacgaagaaagcgaacaagccattacggacgccaagtacggtttcattgccggtgccttgcgcgaaacctacgtggacaaccatcaggatacatcgcgtgtcacccacatcgtagattccatcgtcacacaccgcatttggggataccccatcttcttcctgtttctgtatctgatgttcgaaggcactttcgtgttgggcgactatccgatgcaaggcatcgagtggctcgtcgaggcattgggagatttgatacacgagaacatgtccgaaggcccgttaaaggatttattgatagacggcattatcggtggtgtgggaggtgtcatcgtctttttgcccaatatcctcatcctctacttctttatttctttgatggaagattcgggctatatggcacgtgccgcctttatcatggataagattatgcataagatgggcttgcatggaaaatccttcattcctttgattatggggtttggatgcaatgttcctgccataatggcttcgcgcaccatcgagaatcggaaaagccgcctggtcaccatgctcatcaatccgttgatgtcgtgcagcgcccgtctgcctatctaccttttgcttgtcggaactttctttcccgacagtgccagtctggtgttattgtcgatttatgccatcggcatcttgttggcagtggtcatggcgcggctcttctgtcgttttctggtcaaaggcgatgataccccgttcgtcatggaacttcctccttaccgtattcccacttccaaatccattctacgccatacatgggaaaagggcgcacaatacttgcgcaagatgggaggaatcatcatggtagcctccatcgtgatatgggctttgggctactatcccgatcacgaagcctacgacacgatggccgaacagcaggaaaactcctatatcggccgtatcggcaaagccatggaaccggttatcaagccattaggcttcgattggaaactgggcatcggcatcctttcgggggtaggagcaaaagagttggtggtgagcacgctgggagtactctatgccgacgattctgaagcagatgcggtgagcttgggcgaacgtattccgattactcctctggtagcttttgcctacatggtgtttgtattgatatacttcccctgcattgccactctggctgccattaaaggagaatcgggcagttggaaatgggcgttgtttgcggcatcatataccacggcattggcatggttgatgtcatttgcaatttatcagataggaggattgtttgtatgagtaattggcaggagtgggcagtagcctttttgttattgctttgttgcatacgcatcggtatgagtttttactctttttttcgtcgttcggagaagaacgaaaatccgtgtgccggttgtgccacaggttgtgacttaaagcggttactggatgaaaagcggggcgaatgcgaagtagaaaggaaaaaaaagaagaaaagttgctgcggatagttggaagttacggaaaatgtactacctttgcatccgcaatcgagaaataaagcattcttgagtttgttttggttccttggatgagtggcttagtcagcggtctgcaaaaccgtgtacggcggttcgaatccgccaggaacctcttttaatccttgtaactaactgaatatcagaattagttacaaggatttttggtttaaggattaaaaagaggtttaaaaccaacgattctccagtgatttaaggggtgagggatgcatagtaaaaacagaatccttataattacttttactggcatagaaaatgacctcatcaaatatgctaaggtatgaaaccgatattcaacgaagaacagcaaaagaaggcttcttttattttagagaatcccctttccaagttgtctgaactttattccaatgaaataaaggatttggctgtcgtttggtgctactattcggggaagatagaaggcaatacttacacttacgttgaaactgaagcattactgaaagacggcattacttctgaaaagagatacgaagatgccaaaatgcttaaaaacctctataacactttcatttccgaactagaatatatccacaaagaaaagaatcaagaaattatagacgagcgcactcttttcagagtacatcagtctatttctacgggattagtatctaatgaagaatcgggggcattacgggtacgagcagtgcgtattagcggaacgaactacgttcctcccaagaactcacaagaaatagaaagcaagctgaacgagattctttttcaacaagatgaatatactaatcctttagaaaaggcggtatatttgcattgtaatcttgctcgtttacaaccgttcattgacgggaataaacggactgcaaggatgatagaaagtattgctctgatgaatgcaggcctcattcccgtatattccgcaaaggattccgatattctgagttacagaaaaggactgatagctttctacgaaaaagaagattgcagcctctatgccgactactttctgaatcgccagattgaacgaatcaaagagatagaatagttattattcacttgcccgtttcagcctttccaaaatcacctcaataatactgtttatactgttatctatcccgaataaaagcaaccctctcttccttatcaacattggattagataaaaggactttaatcttcattttcgcatagccaccaatctatcaacttccgggcaatgctcagcttacgtggtatctcaggtagagagtctttggaaaaaaatgcagctgcactaagttcatctttctgtatctttatatttccgctttcatagtcggctatgaagcccaccatcaagccactgggataaggccaaggttgactgccaaaatatcggatattcttcactttcagaccggtttcttccaatacctcacgctccacgcattcctctaatgtctctccggcttcaagaaatccggccactaaaccatagaacgttccccgaaagttatgagcgcgcaccagcaatatctctttttcttttcttatcaatacaatgatagccgtagaaacaggcggaaacatttcgttcccacagctagggcatttcttcatgataggagtttgttgctccatacccgtaccgcacaccggacagaagcggctgtgttcatcccaataaagaatctgataagcttttccggcagaacgatatgcatccgtagtgatataatcatacgatgccctcaaccccatcatcacccattcttccgtttccgctataggctcatttaccgcaaatgccctcgcctgcttaccggcgaaagaaaccacctcatggacgttggccccattatcaagtcccaatggcgattcttctccaacaggtatactgtacatagcctctccattgttcgtataccctttctgcagtagcaattggtctttgaagaaaacaaaccattgcgtaacgttagtattgatattctttttcataattcatatattccacaaaacaaaaatcctctgccgtggcagaggattgcccccgaataaaggccgaggcacctaatgtattcacaacggaataatccttattgtgatttgcttcaaattagtaaaacaaagataaaaataaaattttagatattatagtattacaaagataaaaaacattatttttgtgaaaataacataagactaaatattatgaaaagaatattagggctagatttaggaacaaatagcataggctgggcagttcttaattcggaaacagtggaacaaactgaaaagatgtggatagaaatggccggaagtagaatcatacctatggatgcagccacattgggggattttgataaaggtaattctacatcacaaacagcagaaagaactcgcctgcgagctgcaaggcatttaatagaaagatgtctgctaagacgtgagcgacttcataaggtattgcacatattggacttcttacctgaacattattccaaacaactaaactgggatgaacacgcaggccagttttgcaaacagtctgaacctaaattagcatgggaaaagaaagagaatggccaatttgattttatttttcaaacggcatttaatgaaatgttggcagactttgcgcaatatcaaccagcattggtagaaaataacaagaaggttccttatgactggactatttactatttgagaaaaaaagccctaacacaaaaaatatccaagcaagaacttgcctggataatattgaatttcaatcaaaaacgtggatattatcagttaagaggagaagaggaggaagaggtaaagaataaattggtagaatatcatgccttaaaagtgactcgtgttgaagcaacagacgaaaagaaaggcaaagacatatggtataatgtatatttggataatggatggatataccgtcgagcaagtaatgtacctttggattgggaaggaaaaataaaagaattcattgttacgaccgatttgaatgaagatggaactattaagatagacaaacgaggtgaaataaaacgttctttccgtgcccccaacgaagatgattggacactgataaagaaaaaaacagaagctgatatcagcgatagccataaaacgataggatggtatatttatgacactctattacagaagcctcaacaaaaaatcagaggaaagttggtccgtacagtggaacgtaaatattataaagaagagttgaagcagatattagaaagacaatctacttttcatgctgaactgcaggatcgtgaattgtataagcaatgtctggattgtttatatccacaaaacgaagctcataaacaaaatatcgctaatcgtgatttttgttatctattcattgaagatatcattttttatcaacggccattaaagagcaaaaaatcactaatcagcaattgcccttatgaaaagaacaaatatgtagataaagagactggggaaattaagcaagttgcactgaagtgcatagctaagtcacatcctctttttcaggaattccgcttgtggcaattcatttcaaatctcagaatatatcagaaagaaaaaacgattgaaggaaaattgcataccgatgtagatattacaaaagagattctacaaaacgaagaagactatacctgtttatatgaatggttgaatgaacgaaaagaaatagatcaaaaatcattcctcaaatgccctttattaggcctgaaaaatgaagtcgcaaactaccgttggaattatgtagaagacagagtatatccttgtaatgaaacaagatacttaataaaatctcgcatagagaaggctaaggcatctttagacaacgtcctatctacagaaaatgaaacagctttgtggcatatattatattcagtcagcgataagcaagaattagagaaggctttatctacatttgcactcaagcatcatttaaacaaagagagttttgtggaagttttcaagaaagcccccccgtttgaaaaagaatatggatcttattcggcaaaggcaataaaaaaactattgccattgatacgaatgggaaaatattggagtgaagactgcattgatgaagtaaccaaagaacgaataaagaaaacaataataggtgaatgcgaagaggcagttaatagactaattcgtgataaagctatacaattacaaaaggtagataatttcagaggattaccgctgtggcttgcctgctatattgtctatggacgccattcagaggctaaagatataacgaaatgggaagaacctgctgatatagatgcctatttagcatcatttaagcaacattctttacgtaatccaatagtagagcaaatcatcgtagaaactttacgtgtagtcagagatatatggaaacgttcaggaagcattgacgaaattcatatagaattgggacgcgaaatgaaagctccagctaaacaaagagagaaaatgagcatgcaaattctggaaaatgaaaatgcaaatcttcgaataaaaatgttattgcaggaatttataaatcctgaatatgaaatagaaaatgtacgtccctactcaccaagccaacaagaattattacgcatctatgaagatggaatattcaatcaggttacaagtgttccagaagacatcgaggattttctaaagaaattgaaagaccgaaaagctccttctaaatcagaatttatgcgatataagttatggctggagcaaaagtaccgctcaccttatacaggtgaagttattcctcttgctaaattatttactccagcttacgaaatagagcatatcattcctcaatctcgtttctttgatgactcatttagcaataaagtcatttgtgaatcggaagtaaacaaattaaaggatagatctctcgcttatgagtttataaaagaacaccctggagaaaaggtcgaactaagctttggaaagcctgtaagaatttttactgttgaagaatatgaactttttgtaaaggaacattattcaaaatcacgaacgaagatgaagaagctcctaatggatgatattccagatacctttgttgagcgacagttgaatgacagccgatatattagtaaagtcgtaaagacattactttctaatattgttcgaaaaaaagatgccaatggcgagtatgaacaagaggcaatctctaaaaatgtaatagtatgtacaggaagcatcacagatagattaaaaaaagattggggaataaacgacgtttggaacaatatcatatctttccgctttgagcgtctgaaccaattaaaacaaactcaatgttttggacattgggagaacaaagatggaaaacgtttttttcaaacggatttacctctggagtatcagaaaggctttagtaaaaaacgtatagatcaccgtcatcatgccatggacgccattgtgatagcttgtgcatcgcgaaatcatattaactatctgaacaatgagtcggctagaaaaaattccccaataagtagatatgatttgcagcgattactatgcgataagcacaaaacagatgaatctggcaattataaatgggttataaaaaaaccttggaatacgtttacacaagatgttcaagtggttctaaatgaaacaatagtaagcttcaagcaaaatctccggattataaataagaataccaattattattggagctacaacagtaacggtaaaaaggtattatcttctcagacaaaaggagataattgggctgtacgaaagtcactgcacaaagataccgtgttcggtcgagtcaaccttagaatgacaaaagaagtacgcctatccattgctttagatactcctgaaatgattgtagataaacagctcaaaagaaagataaagcaattgattgattataaatatgacaaaaaacgcattgagaaatattttaaagagaatgcagttctttggaaaaatgtaaatctggccaaagttgccatctattattttacggatacgacatctgagccaatggtagccacacggaaaccattagacacgagctttacttacaagaaaattctgagttctgttacagacaccggcattcagaaaatcctattggcccatttaaaaaataaagaagagaattctgaattagctttttctccagatggtatcgatgaaatgaatcaaaacctaaaagaactgaatggtggtaaattacatcagccaatctacaaagttagagtgtatgaacctcttggatataaattcaatgtaggagaaacaggcaacaaaactcagaaatttgttgaagccgataaaggaaccaatttgttttttgccgtatatgccaacgaagatggtaagcgagcgtatgaaaccatacctttgaatgttgtgatagaacgcaaaaaacaaggagtaactcctgttcccgatagaaacggggcaggaaataaattattattttggttatcacctaatgatttagtatatgtcccaacagaagatgaaatagaacgaggaaagatagaagaaccaatagacagaagaagaatctacaagatggtttcttctacaagcatttcttgtttcttcattccttactatattgcaaatccaattattgatacaattgagttagggtcaaataataaagcggagaaagcttggagtggagaaatgataaaaagaatttgcatacctatttctgttgatagattaggtaatatagtaaaaaaaggatatttaatgtagtctcttaaaaagggaggatatcctttcataccatgggaaaccttattgtttactttgcttattgtctattgactaataaaagcttattgagcatttagcaaacgcagagaggacctatagcttttgttaagtcaggaagaaagagttattcatttcaatcatcgtcaaaagatttgatttttcgtaaagatattatgataaaaaaaacattatattttgggaatcctgtttatttgtctttaaagaacaatcaattaatgataagactaccggaaatattgagaaatagtattctgccggaaggagttaaaagagaagctgaaataacaaagccaatagaagatattggtgtagtggtattggataataaacaaataacgataacctcaggagtgctggaagccttacttgaaaataatagtgcaattataacctgcgatagtaaaaatatgcctgttggtttaatgttaccactatatggaaataccactcaaaatgaacgttttcgccaacaactgaatgcatctcttccgctaatgaaacaactatggcaacagactatcaaacaaaaaattgaaaatcaagcagccatattaaaaaaatgcaccggtgaggaaattaaatgcatggaaaaatgggcttccaatgtaaaaagtggcgattccgacaatctagaggctcgtgcagctgcctactattggaagaacctatttgcaatcgaagggttcacaagagatagagaaggtattccacccaataatttattgaattatggctatgctattttacgcgcagttgtagcacgaggattagtagcaagtggtttactaccaacattgggaatacatcatcataatcgctataatgcatattgtctagcagatgatatcatggagccataccgtccttatgtagatgaactcgtatacaatatcgtaaaaagcaaacaaaattacacagagcttacaaaagatctaaaagctgaattactttcaattccagttttggatgtaactattgcggggaaacgtagccctttgatgatagcagtaggacaaaccacagcttctctcaataaatgttttagtggagaaaatcgtaaaatcatatatccaagttttgaacactaatctcataaaaaataatttcttctcctactatggaaagattcagtgaatatcgcattatgtgggtactcgtattatttgatttaccaacagatactaaaaaagacaaaaaagcttatacagattttagaaagaatctgcaaaaagatggatttactatgtttcagttctctatatatgtacgccattgtgcaagtagtgaaaatgcaaaagtacatattaggagagttaaatctttcttgccagagtatggacaggttggaattatgtgtattacagacaaacaatttggcagtatagaacttttctatggtacaaaagcacaatctataaatacacctgggcaacaattagaactattctaaaaaaagaaatctcacccgaaagtgagatttctccatgaaaaccctccctttttttatttctaaaaaaacatttaacccattgatttacaatctacaacaaagaatctgttgtttccaataggtcaaagatactaatttgaaagttaatcacaacgatgctgtttcaacgttcgctaactcttttgttgtttccaataggtcaaagatactaatttgaaagttaatcacaactgcgttaccatacgggcgacttatcagacggttgtttccaataggtcaaagatactaatttgaaagttaatcacaaccactactcgctacggttctgctcgcaactagttgtttccaataggtcaaagatactaatttgaaagttaatcacaactgtgtggactaaggagcaatgggatgagctgttgtttccaataggtcaaagatactaatttgaaagttaatcacaacatatgtctacaggcgagctgttccgcataggttgtttccaataggtcaaagatactaatttgaaagttaatcacaacctataatcttaatcgtgtcacccgtgtgcagttgtttccaataggtcaaagatactaatttgaaagttaatcacaacgcatgcgacgccgttgttggaggtgttcgagttgtttccaataggtcaaagatactaatttgaaagttaatcacaacaaggccgtgttggcattattggcggcattggttgtttccaataggtcaaagatactaatttgaaagttaatcacaactgaattcccgtcaagcgttccaaacctgaggttgtttccaataggtcaaagatactaatttgaaagttaatcacaacaaaaaacaccatctcctaccttcgcatatagttgtttccaataggtcaaagatactaatttgaaagttaatcacaacaggacgcgataacagtcgcgcccaccttaagttgtttccaataggtcaaagatactaatttgaaagttaatcacaacatatgtctacaggtgagttgtttcggataggttgtttccaataggtcaaagatactaatttgaaagttaatcacaacagcacatacatgtcacatgctccgatgtcagttgtttccaataggtcaaagatactaatttgaaagttaatcacaaccgtactttccataattacctccccttacccgttgtttccaataggtcaaagatactaatttgaaagttaatcacaacgcagttcatgaagccctttctcaagagcaagttgtttccaataggtcaaagatactaatttgaaagttaatcacaactgaagaaccgtgtcgcggagctgctgtatagttgtttccaataggtcaaagatactaatttgaaagttaatcacaacccgtttacaacggaactcttttcttctccggttgtttccaatgggtcaaagataccaatttataataacagaaaaacttttctccctcttctttttatcatttagaatctttttattccattttttgttattactttgttattttgaatgcagacaacacttaaaatggataaatagatgaataataagacttatataattgctttttttggcactcagccctatgacgaagtttctttcaatgagaaaaacaaagagtatgctttcgaactccgctactacaaaggacatcttaacaagcacaatgccatactaacacaaggagtagatgctgtttgtatctttgtaaacgacacggctgatgccgaggttatccgactgatagcagacaacggcgtaaaactactggcattgcgttgcgccggatataacaatgtagatttgaaagctgcagcacactacggcatcactgtagtgcatgttcccgcctactctccctatgcagtggctgaatacaccgtggccttgatgttgtccctaaaccgcaagattccacgtgccacttggcgcacacgcgatggaaacttttcactccacggcctgttgggattcgacatgtatggcaagacagcaggcatcatcggtaccggaaaaatagcaaagaagctgatatgcatcttgcgtggttttggtgtaaatatcctagcctacgacctttatcccgaccataacttcgcacgagagcatcaggtggtatataccactctggatgaactttatcgtaactcggatatcatttccctacattgtccgctgaccgaacagaccaaatacctcatcaatgattactccataagtaagatgaaagatggggtgatgatcatcaacaccggacgcgggcaattgattcacactaatgccctgatagaaggactgaaaaataaaaaaataggttctgccggcctcgatgtgtatgaagaagaaaatgaatatttttacgaagaccaatctgacaagatcatcgatgatgatacgctggcacgcctactatcgttcaacaatgtcatcgtcacctcgcatcaagcattctttacgcgcgaagcgttggcaaacatcgctttgacaaccttacagaacatcaaagatttcataaataacaaaccgctggaaaatacagtaaccatgtagcccctcaaaaaaaatgagattatattacatttatcacagcggattcgcaatcgaatcagacgaagtaacagtcattatcgactattacaaggatggcttggaagagctttcaggcgaaagcatcgtacgcaaccgactcttgaaaaaagcaggcatcctctatgtgctttgctcgcatcgccactccgaccatttcaatcgcgaagtactttcatggaagtccttgcgcccggacattcgttatattttctccaaagacattatgagacatcgtctcgccaaacccgaagatgcagtttttatcaacaaaggaggcatctacgaagacgaatatatcagcatacgagcattcggttctaccgatataggcatctctttcctgataaaattacaagggaaacaaatctttcatgccggcgatttaaataactggcattggagcgaagagtccactccgcaggaaatacgaaaagccgaaggtgattttctggctgaaataagagaccttcaacaaatagcaccgaaagtagatgtatctatgtttccggtagacaatcgcatgggaaaagattatatgcgcggtgccgaacagttcgtggaacgaataaaaaccactatatttgtacccatgcattttggcaatgattatcaaggcggcaatgcctttaaatcttttgccgaaagcaaagggtgtcgtttcctctccatctctcatccgggagaatgctttgagattgactgttaaattaaagagatatatttattatgaaaaaattgacacatcttcttttcttattgttttgcttttgtctacctgctctgttgcatgcacaaaacagagatgacagcaaatatttggccggtgccgttcccgaagtggatggtaaggtggtattttccaaagagttcagtattcccggtatgtcacaagatgaaatctatgaacgaacatcccaatggatggacaaacgactgaagaaaaacaggaacaacagccgcattgttttcacagataaggacaaaggacagatcgtgggtagcggagaagaatggatcatattcagctcaagcgctctgtctctcgatcgcaccaaagtatcctatcaactgaccgtgaattgtcaaccggaaaaaagtatgctcaaaatagagaaaatccgattcagttatcgcgaagggaaagaaaagtacacagcagaagaatgggtcactgacaaatatgccctgaacaaagcaaagactaaattgatacgcggccttgccaaatggcgcagaaaaaccgtagactttgcagacagcttcgctcaagaaatggccgaagcgctcagtgcttctacaacgcaaaacttgaccgaagagaaaaaagaagaacaaaaagctattaccaactcaggcccaatagtgattactcctaaaaaacaagttatagcagatgctactcaagcaaccagagttacctctacagagcaaacacaaacaacggttgcagttgcaggatacaaacaagtacctcctcaagatctatcttctgacgccattcaaacaggaaacggaaaactggttatagtgattggagatgatccattcaacgtaacaatgatgactgccaactccggcggatcactgggtaaagtcaacgggaaaccggttgttttcagtattctgtcgtccgaccagccatacgaacaaatggaaaaagcagaaaattacatcatccgcttctatccaataggacatacagagcctacactgatactggaatgcaagaaactcccctcacctgctgctatggaaggcatgccacgcacctatgtgggagaaatcataaaagcaatggtcaaataatctatcaatatcaatccgaatgaataatggaaattaaaagcaaattcgaccattttaatatcaacgttaccaacctagagcgtagtatcgcattctacgagaaagccttaggtctaaaagagcatcacagaaaggaagcctccgatggttctttcaccttggtctatctgaccgatggtagcaccggattcctgcttgaactgacttgtttgaacgaacatccgcaagcctatgagttaggagagaacgagagccatctttgcattcgtatagccggtgattacgaagccatacgccagtatcacaaagagaacggatgggtatgtttcgaaaacactgcaatgggactctacttcattaatgacccagacgattattggattgaggtgcttcctgctaaataacagatttcgagaaaggtggtgtcaaatactaagacagcgctccaagcatctttgacaccactttcttcacaataaacccataaaaaacaacaaacatcgtgagcatagaagaagcaatgatgggtggtattgtctttaaaggcaaaaaggagaaacccaaagaagagaataaagtaaagaccaaagccaagaagaagacctacattacaggacaacatggttcagcctcggccaaaatgaaagcggaaattcgtcgtaaacgcgctaacagacacaagaaatgataaacagcaatcttttgtgtgccgaccaagatccgatgggagctgctatatccgactacttcaaatatggcaaagccgattgtctgcgagtattctcttcgctattcgacgaagatgaaattcccgtcaaagagctctttcgttcggaaaagcaaatgtcattgttggaacgcacagctctaaaaatggcaacaggcaggattctggatgtgggagcaggcagtggttgccacagtcttgccctacaagaagccggtaaagaggtttacgccattgacatttccccactctctgtggaaacaatgcgtcaacggggagtaaataatgtggcgctaaccaacctgtttgacgagcggttcattgattcatacgatacgatcctgatgttaatgaatggctccggcattattggaaagttagagaatctacctgagttttttcggaaaatgaaattgctacttcgccccgaaggctgcattctaatggattccagcgacctcagctacctattcgaagaagaagacggaagtatccttattgaccttgccggtaattattatggtgaaatcgacttccaaatgcaatataaaaacatcaaaggagattcattcgactggctatatatagattttcaaacacttagcctctattctgcggaaaatggtttcaaagcagaacttatcaaagaaggtaatcattatgattatcttgtccggttgtctctccaagtataagacaaagcgactcagcaagtccgtgagcacatccccctccaatttgacggacattctgaaaatttattctccgagcgtcctccatagaagcaataaaaaaaggatgagtattttcaactcatcctttttcgtgacttgtacaccctcagggactcgaaccctggacccactgattaagagtcagttgctctaccaactgagctaagagtgcattcttctaaaatgtagtgggtacgagaatcgaactcgtatgccatgcgtgagaggcatgtatcctaaccgttagatgaacccaccttttggtgcggaagctgggggattcgaacccccggtacggttacccgtacgtcagtttagcaaactggtggtttcagccactcacccaaacttcctttttgtaaccaacattcttgttaaatgcggtgcaaatgtagaggaaacttttggactttgcaaatctttcctacatattttttcattgttttctctcagcaagaggtaacatattaactctcaaaaccataaaaccgcagaaaatgacacatatcaatttttcctattttctgtttccttatctttgcacgttttttcagagacatatatacagcgataatgatacaacaggaaaatttaaagaaaagacttaccaaactggcggctcccatttttatagaaacgcttctcatcatgatgcttggtgctgtagacacctttatgctgagccgatattcggacaatagtgtggcagctgtaggtgtcgtcaaccaaatcatcatgctcaccttcctcgttttcgaggtcatcaatctcggaacctcggtactgtgttcccaatacctcggtgcgaaactacaaaaaaatgtggtacaagtggtaggtatctccatcttgatgaactttgtgatcggcatcaccatcagcctgattttatacttctgtgcccgtcccattcttcattcgatggggctcacttctacattgatgcaggatggcatggactatatgcgcatcgtaggcgcctttgctttctttcaagcattatccctcaccctctccgcttcattgcgcagtgccaacaaagccgtttatccgatgatggtaaccgtggttgtcaatatcctcaacatcgtaggcaactattcccttatcttcggacgcttcggttttcctgaattaggtgtagagggagcagccatatctactgccttcagccggggagtctccatgattattttgttcgtcattctgtttcgcaagcatatccctcgtttccctatggcctacttccgtcccttcccatggactgaactgaagaatctgctaaaggtgggacttccttctgccggagagcagctatcatacagttcatcgcaagtggtcattacttatttcatcaacatattgggggtagaagcgctggctacccgtacctactgtgtcaacattatcatgtttgcctacctgttcagtatctccatggcacaaggaggagccatctgcatcggacaccttatcggcgagaagaaacctcgcgccgcttttctcatgggaaaatatgtcatgaagaaagccgttatgattacggttctcctatccggtatccttgcccttttcggacatgccatcttcgggtggctcacctctaatcccgaaatcattcgcatgggagtagtcatcctctttatagacatcgttcttgaaataggacggcctatcaatatctttgccacaaatgccctccgcgcagcaggtgacgtcaactatcctttctatgtgggcttagtgatgcaatggggtgttgctgtcggcgtaggctatttcttcggcattttccttggctggggcatctatggcatgtggatagctttcttgttggatgagaatattcgaggatttatctttgtgcgtcgctggtatagcatgaaatggcttaacaaaaactttgtatagcacctgttttatcaatctttagcacctgtttaaaaccaaaagtcctatctttgtgcccgaacgaacagattcagggtttatggacgcattattgaaagaaacggtgaatgccactgtcagctcccattacccggggatgacacctgaaggcagaaaattaatagaaggaattcttatccgcaaggaagcagaaaaaggagaaatccttctcaaagaaggtcaaatcagccacaacattgtcattgtagggaagggtatgttacgccaattctactacaagaacgggaaagatctcaccgagcacttttcttacgaaggctgtatcattatttgcatagagagcaccttgaaacaagagcctacccgccttatgatcgaagccctggaaccgagtatagtgtatttgctcccatataacaagctattgatgctcaccgagatgtcgtgggaggtaaatatgttctatcgaaagattctggagaaatctctgattacttcgcaagtaaaagccgattcatggcggtttgaaacggcacgcgaacgttataaccgtctcatggccaatcagccggaagtcgtcaagcgggcacccctgttgcatatagcatcctacctgctaatgacccctgagacattgagccgggttcgttcgggtgcattataaacatcagaaagtcttgcgcgacaaacctttacaccacttttcagcagtccgaa

SEQ ID NO: 1129 - DNA, 24530 bp, synthetic construct
  source 1..24530: mol_type = other DNA
  misc_feature 1..24530: note = Synthetic
tactagtgattacgccgtctacgacatataagggttccgatgaacctttaatggtacttggacctctaagtctaattgaaaatccccctgcaggatctccagaattttgggtaatctgagctccaggcacctttccctgcaatgaagtcgtaatattaacaggagcccctttcaccagttctgtcgatttaatggtagtgacagcgttacctagtttttttctggattgggtgagcgacgaccctacgataatcacttcgtccaacgcattggaatcttcttcaagtataacattcacagtttgattctctccagtaagctttacctcagctgttcgaaagccgatataacttatggctaaagtttttcctgtaccatccgctacattaatactgaaattgccatcaaaatccgaaatcacccctttcgaggtaccttttattaaaatggttacccctggcaaaggaatcccattctcgcttgaaatggttcctgagattgtagctatttgagcatacgaactgtgcgcaaaaaagaccattaaaaacagagatagtaaataatacgtttttttcataagagttacttttgattaataattaaataaatatatagtaataattaaataaatatatgataatatttataattttgcaatgttttattgcaaaaaatcttaaaactatgtgaaaattaatctaaatccttacatgtgcaatgttatattgcattttataaccttttattttattaatatatttgtaaactattaaaataaacacaattggaaaagcttgagcgacatcaaattattttgaacgaagtccatatccataatagggtacttttaactgatttatcggggattttgaatgtttctatggacaccgtacgaagggatgtcaaagaacttgacaaattcaataaattgagaaaggtacatgggggggccgtttcaaatggatttaatataattaccgaccgatccagggatatttatgaacaggctagcaaaacaaaaattgctcaaaagggaatttctctgcttaaaaatggcgatgttgtccttattagcggaggttccacaaatctagaatttgctaaattgattcctaaaagaatggatcttaccttttttacacctagcctaccaatggccattgaattgttagatagtacgtcctctcgttatgatgttttttttgtaggtggaaaattatcccgaggctctcaacttgcgactggaggaagttcaataaacatcctctcagaaattactgctgatatctgttttttaggtactggatatcttgatgtagataagggaattacggaaactgactgggaaatcgctcaaatgaaaaaggcgatgatctatgcctcaaaacgagtaatagcccttaccatttctaaaaaactcaacaccttcaaccgctataaaatttacaacatcaaagggcttgatactttagttaccgaactggatccagataatgtcagcttagataaatatagagcgcaaaatatagatatattgtaattttctataccatctatagatgttcaaaaacagattaaatttagaattcttatttgctgtcacatcaaaagatccatctattaaaatatcgccagaataatttgttttggaattggtggatcgctccgagttaaattcttttaaagtagctcctgtaaataaccaaaaagtaggatcatttagattaaggttttgagtcttgacctcgagctgtcacttcgagtgattttcgatagaaaattgtatcgagaagtattttgggctttttgaattctcgccctgtcacttcgagtgttttgtttgttttacaaaaacaagcaaaatgtatcgagaagtaagacgaggcttgttgagttctcgccctgtcacttcaagtgattttcggtagaaaattgtatcgagaagtagtttgggattgtcgagttctcgatacgatttcatgggatttctttcgaatcccatcaaatcactcgagctgacaaagtgttgcgtcaatgtcacttcgagtgattttcgataaaaaattgtatcgagaagtaagacgggcttgtcgagttctcgccctgtcacttcgagtgattttcggtagaaaattgtatcgagaagtaatacgaggcttgttgagttctcgccctgtcacttcgagtcttttgtttgttttacaaaaacatgcaaaatgtatcgagaagtaagacgggcttgtcgagttctcgatacgatttcatgggatttctttcgaatcccatgaaatcactcgaactgacaaagtgttgcgtcaatgtcacttcgagtgttttgtttgttttgcaaaaacaagcaaaatgtatcgagaagtaagacggggcttgtcgagttctcgacctgtcacttcgagtgattttcgatagaaaattgtatcgagaagtagtttgggattgttgagttctcgatacgatttcatgggatttctttcgaatcccatcaaatcactcgaactgacaaagtgttgcgtcaatgtcacttcgagtgattttcgatagaaaattgtatcgagaagtagtttgaggtggttaacatcaattattttaaaccctatcggtttatgactctattgatgagatgaagtaaaagtctcaaacctcatccataaattagactaccatctcttttaaaatctctttacaaattacttttccatgatccagactcaggcccttttgaagtgaaggatcactattacaagcctctttccatcctttttgagcgatatctagcacatatggaaaggtgacattggtaagtgctaaggtagaggtgtaaggcaccgcacctggcatattggttacacaatagtgaaccacatcatcgataatataggtaggatcctcatgggtcgttggtcttgttgtttcaaaacaccccccttgatctaccgctacatccaccataaccgtacctggtgtcatgtccttaagcatatctctagtaatcaattttggagctttggctccaggaatcaatactgcaccaataattagatctgccgttttaatatgtttcctgatgttatattcattggaaaaggcagttaccacatgacttggcataatatcattcacgtacctaagccttttcatattgatatcaaatatcgtgacgtgagctccaagaccagcagccatttttgcagcttgaattccaacgactccagcgcccagaactaaaacttttccgggaggcactcctggaactcctcctaaaagaataccttttcctcgaatgggtttctccaaatatttggcgccttgctgagttgccatacgcccagcgacctcagacatgggcgttagcaaaggtaaactgccatcctcatcttccacggtttcataagcaatacacactgctttagaagcaatcatagccagcgttaaagcctgactagaagcaaaatgaaaataggtgaaaataatttgaccttctctaacaagcgcgtattccttttctataggttccttgaccttgacgatcatctctgctttttcatacacagcgtctaggcttgataaaatctctgcacctgcttctatatagtccaaatcttcaaaaccactggccaaaccagcttgagtttggacatatacgtgatgttttcttttcgtcaattcaaaaacacctgctggggtgatagatacccgactttcattatttttgacttcaatgggaactcctattttcataagtactttctttttaatcacaccctataaatttaggggtatattattattataataggctaaatgtaattattacccccctattttaatacatatatactaattaattataaaaatatatttcacaccccctattttacataaattaaattcagaaggaatgagtttcaagggttaactgtccctaaggtgaaaaagaaaaagtaggaaactgataaaaaaatctaggtcatgattttgcaccataaaaaaaagccctgcaattgcagagccttttttttatactaatagacgaaagaattacatcttcacatcgaatcggtctaattgcataactttagaccaagccgatacaaaatcagttacaaatttttcatcggcatcttcagtagcatagacttctgctaaagctctcaactccgagtttgatccaaagatcaagtcagcgcgagtagctgtccacttcgtatctcctgtttgtctatttttggaaataaagacttgttctttatcgtctttaggttcccatttatgactcatgtctaagagatttacaaagaaatctgtggttagctctccaggacgatctgtaaagaccccatgttgcgcattgccatgattggctcctaaggctcgcatccctcctatgagaacagtcatttctggtgcagttagggtaagcaactgagctttatctaccaataactcttctgtggttaaggtgtattgctttccctgatagtttgtaaatccgtcggccataggtttaagcaattgcatggattccacatcggtttgttcttgtaacgcatcggttcttcccggcataaagggcacttcaatagtatgaccagcttttttggccgcttgttcaatagctacattccctccgaggacgattaaatctgccatagacacctctttgttgttatactttttattaaaatccttttggatcatagtcagtttagacgccactttatccaattgcttaggattattagcttcccagctgcgttgtggctctagtagaatatgtcctccattagctcccccacgacgatcggaatctctgtaagtggatgctgaagtccaggctgtctctaccaactctgatgtatttagacctgacttcaaaatttcagcctttagtgctttaatatctgcggcattgaccatttcatattttgcttttgggatgggatcttgccatataaaatcttcttttggagcatcaggtcctatataagttgactttggccccatgtctctgtgggttaacttaaaccaagcttgagcaaaagttttattgaactcctctggattctcataaaagaacttggaaattttcaaataatcaggatctttaatcatcgttaaatctgtggtcaacatggttggtctgtgctttttcccttcaatatgagcatcaggatagatttctttagaatccttggcaacccattggtaagctcctccggggcttttggtcaattcccactcattttcaaataaggacttgaaataaccctggctccattctgctggagtgttagtccatattacctccaatccagaagtgatggcatcttccgcttttccagatttataagaactcatccatcctaagccttgttcttggatagaagctgcttctggggctggacctagagatgcatcgcctgctccatgggttttacctatagtatgacctccagcaataagagcgactgtttctttatcgttcattcccattcttccaaaggtttggcgaattccatctgctgcaagtgctggatctggatttccatccggaccttcagggttcacatagatcaatcccatttgaacagcagctagaggttgctcaatatctccattatcatcgtagcgcttatcatttgctaacatttcattttctgctccccaatagacgttgctggagggctcccaggtgtcttcacgaccaccactaaatccagctatctctaagcccatatcttcataagcaagagttcctgcaagaatcattaaatcggcccaagaaatactcttgccatacttctgcttaattggccatagcaggcgtcttgccttatccaaattggcattatctggccagctattaatcggcgcaaatcgctgttgaccatctctagatccacctcggccatccgctgtccggtaagttccggcactgtgccaagacatccgaataaaaaacggaccataatgaccatagtctgcaggccaccactctttagaatctttcatcagtgcgactaagtcagtttttaaagctccataatctagggctttaaaggcagcccgataatcaaaatcttcacccatagggttagatttttgagaatgctgtctcaaaacacttaaatctaaagagttgggccaccagtctttattccccattcgtttgggtgtcatttcttctgttactgaagatttatcctgcatcttagcatgaggattttcaccatctttaacttttatcctgatacctgttacaggacaggtcttatattcaggttcggtgctttgctgagcaaaagcgaccacaacaaacaaactaaatgctgcaattaataattttttcatgagtataaatttatttatgatagtcaaaagtagtattaaaccctaacctaaagacttacttaaaattacagtttttgatagacatattagaatttctaatagttaaatgttattgtattagataagcctataaataagaaggatacttatttggaaattatgtcgctggttactcttttttttgggatggcatgcggatccgttgtcggtgaataacactaaagataaatgtgaagtattttttgacaatcctaaattaatagtaaatttaaatcaaaaaaccaaagcttatgtcaccttcagtcatctttcaaatcgttaataccatcgttcttcccgcctggttgatcttgattttttttccaaacaaatcatggaaaaatccagtaatcaacggccttaccatagcgatgtctctggtctatgctttttacgttgtgacgggtttgggtgatttggatatggaatccttcaatgagcttgaaggcgtaaaagccatgtttacgacagatgtagctgttctcaccggttgggtacattatttggtttttgatctcttggtgggaaattggattttaaaccaatcccaaaaacacaagatcaatcattaccttataattccgtgtctgttgctttgttttgtgtttggccccgcggggtatttggtgtattccatcattaaagtcgctaaaacgaagcgtttggattaaagttttgggcttcggtacatttcgacaaagctcaatgcggcgcgattctcctgatgtcgaatcactcagccaccactaaggtctggtcgttgagtgttctgacgatagtcagaatgtatcgaaacgacatttcgcagttgggcttcgatacgattctcctactgtcgaatcactcagccaccactaagatttggtactggggcttcgatacgattctcctactgtcgaatcactcagccaccacaaagatttggtcgtttcgtactggggcttcgatacatttcgacaaagctcaatgcggcgcgattctcctgatgtcgaatcactcagccaccgattaaaatttggtactggggcttcgatacgattctcctgctgtcgaatcactcagccaccactaagatttggtcgtttcgtactggggcttcgatacgattctcctactgtcgaatcactcagccaccgattaaaatcgtatcgagaactcgacaacgctcgaactgacaaggcctaaaacctataaactttccaacatgtcttttaacttatcgtccagttcttttatggctttggcatatcgctggtcccacatttttaggtcttgagtggcttcagtttcaatttgatactggatacctggcaaaatccaagaggcatagccactaaatggatctgaggaggcataaagtgatttataccagtcgccgtaaggcatccctttgggatccaaaaagcttttttctagcgcgagcagctgagcattcagttgattcttttggcgtttggatattttttcagtggagaggagtttctcgagggctttcgccactgaggtagtcgagagttttaagctggatatcgcttgacttgaagctgtaaacccagtaaaatcagaataaaaagaatttacctgctgagtcgcattttcaaaatggagttccaaatctgtagcataccgctctatatcataaggaataaactctgcattggccaaccttaagctcaaaatacccatcagtttttcgaccataggtcccatctgaaattcgggatctacgaaattctcgtaataataaaagtcatcgtaattggtatggtataaggtaggtccgctggctccaccacttaaagacggcacgccagcaaacatataaaaagcaatatggtctgatcccccgcccaggtttccaatgttgggctctggcttcttacccgcccaatgctcataaacggtttcctctgtatagggataatctaccgctttggaagcttctaaaataagagtcttaagacttggtgctgaagaggctccaaaatttttcccagataccgctccatctaaattaatataagcgaccgctttggcttttagctcatccttcatttgctccacccattcgctagagccaatcacaccatgttcctcggcatcccaatgggcaatcataatagagcggttgggtctatcgccagcttcggctaaacgccctaatgattctgacaagctcaacagcatggcggttcccgaattgggatctgtcgctccaaaagcccacgcatcgtaatggcaaccaagaatcacccattcgtcaggttgttctttgccctttaaggtcgcaacgacattataaatcttggtcatttttttgggttggtcgactttgagtctcactttcaagtcctttccaccgttcactctataggtataaggcaatccgccttgccaagttttaggaaccacctcacctttcatatgtttaaaaatagactctgcggcaccataaccaattggtgttacgggaatagtgtgcaatcctgcatcttctggcgctaaacgctctggagtgtccttatggtctagtggtaaggcgggttggtagggcgtcaacggatctccagtccagtcggcggtaagcaaagagccacgttggattgcactagggttgtaatacacgccttcggggaaggttaagcctttggtaaacccagaatctttaggatcggtgtagataataagtccgactgctccatgagcttcggcaaatttggctttatacccacggaagttaccaccgtatctcgcaataacgattttatccttaaccgatacaccgagttcttccagcttttcaaaatcggctttggtaccataattggcataaatcacctcagcagtcacgtctccacttcccgaataggcattccagccttttacaagagtggcgttttgcgaatagggatcttcttccagagcttcctctttttgatcgagaagtatggatactggcgacactacttctaccaatgaggttccaggaccgctactcatatacacttcgtaaggataggtatctacagaccatccagccttatccatcgttgcaaccatataatctctcaccttttcgttggcgggcgtcccagcgatgtggggctcttgggttaaggtttttaggtgggttttaaagtcagccggcttcacctgatttaaaaaatcagtttcctgctgagcttgagtttcggcagaggctggcgtaaagcctgtataggtttgtgcacttaagctagcactagccaatagaactatgataaaatatcgcatgggttatggggtttaataatactattgtgaatttagataatttttagactcttgatcgggggagaagttaaaaatttggggggaaataaataggttggcttcttaatatcttaaaaataggagaatattgatttaatttcatatccctcgcgttagatgttgtgagtttgtaaagaatttattaagtttaagttctttaaaaaaagaaagcgacccgtaaaggccgctttaaatgttttcacaacggaataatccttattgtgaattgcttcaaaattgtgtaccaaatatattaatattataagacaaccaacatattatgaaaagaattttagggttagatttaggaacaaactcgattgggtggagtctaattgaacatgattttaaaaataagcaaggacaaattgaaggattaggtgttcgtataattcctatgagtcaagagatactaggtaaatttgatgctgggcaatcaatctctcaaaccgcagatagaacaaaatatagaggcgttagacgattgtatcaaagagacaatcttcgaagagaacgtctacatagagtgttaaaaattttagactttcttccaaagcattatagcgaaagcattgactttcaggataaagtaggtcaattcaaacctaaacaagaggttaaactcaattatcgcaaaaatgagaaaaataagcacgaatttgtttttatgaattcatttattgaaatggtaagtgaattcaaaaatgcccaaccagagcttttttacaataaaggtaatggagaagaaacaaaaataccatatgactggacattatactatctccgtaaaaaagccttaactcaacaaattactaaagaagaactagcctggttaattttaaatttcaatcaaaaacgaggctattatcaattacgtggagaagacatagatgaggacaagaacaagaaatacatgcaacttaaagtcaacaatttgattgattctggtgcaaaagtgaaaggaaaagtattgtataatgtaatttttgataatgggtggaaatatgaaaaacaaattgtcaataaagatgaatgggaaggaaggacaaaggaatttattattaccactaaaacactgaaaaatggtaatattaaaagaacatataaagctgtagactcggaaatagattgggctgcgatcaaagctaaaactgaacaagacattaataaagcaaataaaacagtaggcgaatatatttacgaatctctattagacaatccttctcaaaaaataagagggaaattggttaaaactatagaacgaaaattttataaagaggaatttgaaaagctactttctaaacaaattgaattacaacctgaactatttaatgagtcactgtacaaagcttgtattaaagaattataccctagaaatgaaaatcatcaaagtaataataaaaaacaagggtttgagtatttatttacggaggatattatcttttatcaaagaccacttaaaagtcaaaaatctaatatttctggttgtcaatttgagcataaaatttataagcaaaaaaataaaaaaacaggtaagcttgaattaataaaagaacctataaaaaccatttccagatcacatcccttatttcaggaatttagaatttggcaatggttacaaaatcttaaaatctataataaagaaaaaatagaaaacggaaagttagaagatgtaacaactcaactattacctaataatgaggcctatgttaccttatttgattttttgaacactaaaaaagaacttgagcaaaagcaatttatcgagtattttgtaaaaaagaaattaatagataaaaaagaaaaagagcattttcgttggaactttgtagaagataaaaaatatcctttttctgaaaccagagcccaatttttatcacgcttagccaaagttaaaggaataaaaaatactgaagattttttaaataaaaatacgcaagtaggaagcaaagaaaatagtccatttattaaacgaatagagcaattatggcacatcatatattcggtttctgatctaaaagagtatgaaaaagcactcgaaaaatttgcagaaaaacacaacttagaaaaggactcctttttaaaaaacttcaaaaaatttcctccatttgttagcgattatgccagctactctaagaaagctatatcaaaactattaccaattatgcgcatgggtaaatattggagtgaaagcgccgttccaacccaagtgaaagagcgttccttatcaattatggaaagagtaaaagtcttacccttaaaagaaggttactctgacaaagatttagctgatttgctttcaagagtaagtgacgatgatataccgaagcaattaataaaaagttttatttcttttaaagacaaaaacccattaaaaggcttaaatacataccaagccaattatttagtatatggtagacactcagaaactggagatatacaacattggaaaacacctgaggatattgacaggtatttaaataatttcaaacagcattccctacgcaatcctattgtagagcaagtggttatggaaaccttgcgtgtagtgagggacatttgggagcattatggtaataatgaaaaagacttctttaaggaaatccatgtggaattaggcagagagatgaaaagccctgctggtaaacgagaaaaattatcacaaagaaataccgaaaatgaaaacactaatcatcgtatccgggaagttttaaaagaattgatgaatgatgcctctgttgaaggtggtgtacgcgattattctccgagccagcaggagattcttaaactttatgaggagggcatttaccaaaatcccaacaccaattatttaaaagttgatgaagatgaaatactaaaaatacgcaaaaagaataatcctactcaaaaagagatacaacgctacaaactatggttagaacaaggatatatctcaccttatacaggaaagattattcccttaacaaaactgtttactcacgaatatcaaattgaacatatcataccacaatctaggtattatgataattctctaggaaataaaatcatctgcgaaagcgaagtcaatgaagataaggataataaaacagcttatgaatatttaaaggttgaaaaaggaagtattgtttttgggcataagcttctcaatttggacgaatatgaagctcacgtgaacaaatatttcaaaaaaaataaaacaaaactaaaaaatttattaagcgaagatatccctgaaggttttattaaccgacaacttaatgatagtagatacatcagtaagctggtaaaaggactattgagtaatattgtacgagaaaatggggaacaagaagcaacatcaaaaaaccttattccagtaactggtgtagtcacctcaaaactaaaacaagattgggggcttaatgataaatggaatgaaatcattgctcctcgttttaagcgattaaataaactcacaaattcaaatgattttggtttttgggataatgacattaacgcctttagaattcaggttccagatagtcttatcaaaggttttagcaaaaaaagaatagaccatcgccaccatgccttagatgccttggtggtagcttgtacttcaagaaatcatacacattacttgagtgcattaaatgccgaaaataaaaattacagcttgcgtgacaaacttgtaatcaaaaatgagaacggtgactatactaagacctttcaaataccgtggcaaggttttacaatagaagctaaaaacaacttagaaaaaacggttgtaagctttaaaaagaacctgcgtgttattaacaaaaccaataataaattttggtcttacaaagatgaaaacggaaatctaaaccttggaaaagatggaaaacctaagaagaaacttcgcaaacagaccaaaggttataactgggcgattcgcaaacctttgcataaagaaactgtatcgggaatttataatattaatgcgccaaaaaataaaattgcaacttcagtaaggactttattaacagaaatcaaaaatgaaaaacatttagcaaaaataaccgatttacgtattagagaaacgattctacctaatcatctaaagcattacctaaacaataaaggggaagcaaattttagtgaagcatttagccaagggggtattgaagatttaaacaaaaaaattacgactttaaacgaaggaaaaaaacatcaacctatttatagagtgaaaatatttgaagtaggcagtaagttttcaatttcagaggatgaaaactctgcaaaaagtaagaaatatgtagaagctgcaaaaggcaccaacttgttctttgctatttatttggatgaggagaataaaaaacggaactatgagaccattccgcttaatgaagtaatcacccatcaaaaacaagtagcaggttttcctaaatctgaaagattatctgtacaacctgattctcaaaaaggcacattcttattcaccctttctcctaatgatttagtttatgtaccaaataatgaggaacttgaaaatcgtgatttatttaatttggggaatttgaatgtcgaacaaataagtagaatttacaaattcactgactcaagtgataaaacttgtaattttataccatttcaagtatcaaaattgatatttaatttaaaaaaaaaggagcaaaaaaaattagatgttgattttattattcaaaatgagtttggcttaggaagtcctcaatctaaaaatcaaaaatcaattgatgatgttatgataaaagaaaaatgcattaaactcaaaatagacagattagggaacatttcaaaagcctagtttaaactagaaatacgttatccgaactgaaaaactcttcaatgcttatcaacccttaaagagttaaaagtcggtggaaattataaatgctatacctgcaacgtctcaaagaccttgcaggtataaataaattaaaaaaaatgacagacactgcttctcctatgtttccagaacacatctatcatatctacaaccgagctaatggaaggtatgttttgtataagaagagaagagtttttcgtttttatttaaagcgttaaacacctgtcaggttttataaacctgtcaggtgtttaagtaataatccttatggatatttgaaatagtaaaggagtgttaaaaacaaaaaaatggcaagtacaaaagcaattttaagcacagacagcatctatcacatttacatcagggcaaatggtaatgaacttctttttaaaacaaaagattattaccactattttcttcaaaagtatgattcctatatttccctaattgcagaaacatactgctattgtttgatgcccaatcattttcattttttggttaggattaagagagaaaatgatttaacggagaattctaagataaaattagaaaagacaaccataaagaccagacaggttttgaaaacctgtctggtctggtttcttgccaatttagtaatttatcggtgaaaattataaatgctatacctgcaacgtctcaaagaccttgcaggtataaataagttaaaaaatgaaagaaactgcttctcctatgtttccagaacatatctacaaccgagctaatggaagtgatattttgtataagggagagaagagtttttcgtttttattttaagcgttgaacacctgacgggttttaaaaacctgtcaggtgtagaagtaataatccttatggatatttgaaatagtaaaggagtgttaaaaacaaaaaaatgtcaaatacaaaagcaattttaagctcagaccgtatctaccacatttacaatagggcaaatggtaatgaactcctttttaaaacagaagataattaccgctattttcttcaaaaatatgactcctatatctcccttattgcagataaatactgctattgtttgatgcccaatcattttcattttttggttaaggttaagggagaaaatgatttaacggaaaatctcagagataagattagaaaagacaatcataaagaccagacaggttttataaacctgtctggtctggtttcttgccaatttagtaatttatttaatgcttattcaaaagccttcaacaagcaacaaaacagaaagggaagtctttttataagaccttttaaacgcaaacaagttacagatgagcagtatttaaaaaagcttgtacactacattcattacaatcctgttgaggcaggtcttgctaaaaatcctgaatattggaaattttcatcttataaaagcttcgtatctaagcaaactacaaaacttaaaagagcagacgtaatcagttggtttgatgatttagataacttcatatactgccatcagcacccacctactttaacaggtatagaaaaacacattcatttataagcttatgtaaaccaaaaaaccatgattaaacgcactctatttttttcaaacccagcctacctaagtaccaaacaccaacaattatatattcgttttcctgaagaccataaagaagacaaaacagttcctattgaagatattggaatgctcattttagagaatcaacaaataacactaaccaatggcttaattaccagactcattcaaaacaaaacagctattgtcaattgcgatcaattccatttacccatcagtttattacaacccctcaatgggcatagtgaacagatggaacgcatccggtatcaaatagatgccagtattcctttaaaaaagaatttatggcaacaaaccattacctttaaaataaggaatcaagcccatcatctaaaaaaaagagaaaagaacggacttaaattgattaactggagtaagcaagtaaaaagtggtgatcttgaaaatcatgaaggggtttctgcggcttattactggcaacacttatttgatattcccaactttaatagaactcctaaagggatttcaccaaatcatttattaaattatggctatgccattttaagagcttcaacagcaagagcaataatagcgagtggtttactgcccaatctgggtatttttcatcgaaataaatacaatgcttattgtctagctgacgatttgatggaaccctatcgcatttacgtcgatgatctggtctatgatattattaaagatttagatgatccagatattgaaatgaatactgaacttaaaatgaagctattacaaattccagtcttagacgttactattgaaggacaaagaagtcctttgatgaatgctttaagcagaaccactactagtttatttttctgtcttgagggaagttcaagacggctcttatatcctgaatttaattcataaccaaataattatggaacgtggaaaacaaactatcgagattaaatcaatatagagttatgtgggtaatggtattttttgatttacctacagaaaccaaagtggagcgaagcgcagccacaaggtttagaaaatcattgctagatgatggatttaggatgtttcaattttccatctatacgcgattttgtgccagccgagaaaatatgcaagtacatattaacagagttcaaaagtcactgccaaaaaaagggaaagtagggattatgcaaatcaccgataaacaatttgggatgatagaattgtttcacggcaaaaaagaagctaatattgactccccatctcaacaattagaattgttttaaagctagtgttcattccttataatattgaaaaacatcattttacctagcctatttattgcataaaaaacaggatatcagccttttatagcttataccctgtgaattatcactaaaaatacaattttgaaagcaattcacaacagaaatctatttcatattctttatattcaacctgtgaattatcactaaaaatacaattttgaaagcaattcacaaccagacccaccttacggaacaactgcatgcacctgtgaattatcactaaaaatacaattttgaaagcaattcacaacccatctgaactgctattaatagttacgctacctgtgaattatcactaaaaatacaattttgaaagcaattcacaacatctagggcggtgtaatacgccgcctttttcctgtgaattatcactaaaaatacaattttgaaagcaattcacaacatataccaattcctatcgtgcaaccctctgcctgtgaattatcactaaaaatacaattttgaaagcaattcacaacccctgtgtcgttgtaaacaatagggtataacctgtgaattatcactaaaaatacaattttgaaagcaattcacaacaacattacatgaacccatataaaccagcttcctgtgaattatcactaaaaatacaattttgaaagcaattcacaacccatcaagactattaatagttacgctagtacctgtgaattatcactaaaaatacaattttgaaagcaattcacaacatgtgaaacaatggaagagttaagcggattcctgtgaattatcactaaaaatacaattttgaaagcaattcacaacacactatttataaggataagtacccagaagcctgtgaattatcactaaaaatacaattttgaaagcaattcacaaccaaacactttgcagacttctatccattcgcctgtgaattatcactaaaaatacaattttgaaagcaattcacaacatttttaaaagcaagaatgtctcctgttaacctgtgaattatcactaaaaatacaattttgaaagcaattcacaacatattgctatttatcctttttagattttctcctgtgaattatcactaaaaatacaattttgaaagcaattcacaacacaatctatacaacaaactaaacaggggtacctgtgaattatcactaaaaatacaattttgaaagcaattcacaacctaccagtaagtttagctttaaatgttcttcctgtgaattatcactaaaaatacaattttgaaagcaattcacaacaaaccttcttgtgttaaaaagttatgtgctcctgtgaattatcactaaaaatacaattttgaaagcaattcacaacacaccgtcatagtaaaagtgatcttcattcctgtgaattatcactaaaaatacaattttgaaagcaattcacaaccgctctttttgttactatgtcgagatattcctgtgaattatcactaaaaatacaattttgaaagcaattcacaacaaatagcttgtgtggatataagtgttctttcctgtgaattatcactaaaaatacaattttgaaagcaattcacaacataagatgaagaaagataaataacgcttaacctgtgaattatcactaaaaatacaattttgaaagcaattcacaacagaaaacaacgactgtatagactatgtaaacctgtgaattatcactaaaaatacaattttgaaagcaattcacaacggtattagagacggtcaaggcggtttaagcctgtgaattatcactaaaaatacaattttgaaagcaattcacaacctattctattactactatagtatattattcctgtgaattatcactaaaaatacaattttgaaagcaattcacaaccaggctaaaactttagttgatcccgatctccctgtgaattatcactaaaaatacaattttgaaagcaattcacaacaacggtatattagtttccgtgccgttgtcgcctgtgaattatcactaaaaatacttccgatgtttcggaatgaaagcaattcacaaccaataggtgcagtttactttcattaagtacctgtgaattatcactaaaaatacaattttgaaagcaattcacaaccgatttcggtttgccttgtaacttggtgctcctgtgaattatcactaaaaatacttccgatgtttcggaatgaaagcaattcacaacggagatgtagagctatatgcaaccctaagcctgtggaatcatcaatgaaaataatgccgtagttgttagagaggtaattccagacgagaaggaatatcaaatattttagttgatgtttaaaatatttatttaccagaaatgttacgatatttttttattaataaatcaatcccttgtttgaattttttcattataagcttattgtttttttctagaacatcccaatcaaaacgtttgtctttataaacataaatggatgatttatgataattccaataatacttaaaacctttaaactcatattcattataactcttcttccatttattaaaaataatttcaagatcttcttctggcagatttatctcaattccaaagcgattaccttcaaaagttacatctatgttatcaaaataatttttgcataaaggcaaccagtaatgcccttttatttggacaggtttaaatcttttattcaagaaaaaattatttagggcttgctgatttactcaagcttattttagttcaagaggtatgtaattttgaataaaaaagggtttagtgacatcagtattatagaaacacccttttattttgggatttagcttagtgtatatccaattttcaaataaggcacaaaaaatagcatatttatctgctatttttgataagtttattaagttcattatgaagaaaatggcactaatccagctttctgatgtgtcttttcttttggcttttattttgttaagtccgtatgcgttttttgcttgtccaaactttccttctattaggtttctttggtttcgctcttttttgagttttcgcttttgataggcagaaagttcttgttttggcggtctccctaatggttttcctacaattctaatccctttttctttgagccattttctgttctctctgttaaggtatatttggtctgctagtagtaattctgggtagtgaccaaaggtggttctgtaggattctacttgtaatactaaatctttagattcattaaattgatcccaacttatatgttctactctactcattccatctatctcactagcactaatctttgctccaaattctgtcgatactttatcctttcctcttgggatagggcgaacgtaaggttgataaatattgactattctattttttacactattaactttttcgtgatacatatagttttgttgttcatagatgagttgaagcacccagtaaatcttttggtcccgttttggtaaagggaatttacagggataagcagtgctaagatctgtaaacatgccaggcaagtgttcatcctttttttgatcttctatttggtctaacagtttttcaatataagataggttacgcctagtatatcctagttgttttcgaatgaacttgtttatttgtttggttgtctttctgcgttttttagaaaatacaagatattctgttcttgctactcgacggtaatcccgaggtttattaactccttgggtttgctcgtagagcaaatctataattcgctcactttctttgcgtgctgtattaagcagaccagcatcggtagggaacactattctttgatcagccacactagcatcaatctttagtttgcctttgtgtttactatcagagacacattgattaggggcatcttcctcggtgtccttttgaatattgcttgccctttttggcttcaagctatctgccttttcaatgattagagtattccaagagtcaaaatttactgcccccattcgtttacgaatagctacaagtacagtgggatgaaaagggggtttggtttgaaaacactttaatccacagaaatattgcaagtagatgttttcgctaatcatcgcaacggtctctctatcgtttagccctatcttatgctttacaataattgcacctataaccatgcggacatcaatactctctctaccgttacgtgcattgagtttattggaatatacctttgccaaagcatcccaagggatgagttgtgctaattttacccagcgattatcagataacaattcttgttcgaagggatgtgaaaactcggataaacttaactgattagaaggcgtatattttatcataactgcataggtttatgactagaagatacgaaaaaccatgcaattacgcaagaaaaaaacgtgtgtttttatgcgtaaaacactgatgcttaatttaatagattataattataagaaaaacagcaagccctatttagttcttcacatttttcaaacgtcaactcttcttcattttttgctatctctatttcgaaaggagaatcttttttatcatcattcaatttttcaatggtacttccatttattatttcttttatttcttctacagcatctaaaaaaatagtgccaaaatcactgtctactaaaatttctttcttatgataaattctttctttggtaaacaaagttcccatttctctattattcaactctgaatattcatataaattcatagagcataaaatcaactgtgctccattataataacatttacaatgaatatttggatgatgaagaatagttatatttttcaatgaaaagagtttgattttctctttttcatttaatttgttttctctgtaaatcaaaattatttcaacacccctttcatctgcatcttgaagtgattcaaaaatattattagatgtttttatgtatggaactattaagatcaattctttttcagctccactaattatttcatttaaccaatatgatattttttgtgtatttaaaaatagtgccatttaaaatttaattcaaaatttgaatccactaatttaaaaaattcttgctttaataaaacataatttcctgctgcctttcagaaaaaatgtaaaacaaacttgacattgtcagttaataaatgacacttataaagtcttgttgacataacgtatactcttgatgactttttctatgaaaaccaagaaacaacagataaatggagaggatatagacccatttcaaaagcttatgacgtaatacaaatctaaagtaatagaggattaaatttaaaagcgccccatacatggatacgtcaagttaaatcttggataaaaaccaccttttcttgaataagtgatgataatatcactagatatttcaatgaattcaagttttaaaataaatcgctcacaaaataaagcaactatattcaatgatgtcattttcgaaatcgtggatgaggacaaattatatcaatcagaatcaatgagtaactaactactaacctctaaatcattatttaagtagatattgtatgggtaaaaacgtttaattcaccctaactcttacatcaacatctctctgaccttgattcattttaacaagcttgttgtcgtaaaagtagtagaacataacgttttgagcgctgtaaccgtaaaaaactctgtaaatagtccatccactatccatagaaacaagctcttcatacttagcctctttaataaattctcttacagtcatgccactccatatctgcggagcttttatagaaacgcatgaggtaaaaagcattaaaattaaagatagtaacaccaatttttgtagtaaagtttccatgttccagactttaaaattttgaaactaaattactaaaaaatatagtgcgaacttcttaagcacattatagtcatatccaacccaacccacgccgacttcaggcgagttaaaagggtttaaagtttataaacattcaagaaaacttccccaagagatcccaaattgtaggtgaacgtgagtgttttaggcttatcatctaagcaattttagagttggcatgagcaaaatcaaaagagaaaatacgtacgcctttcaatggcctttcagaaaaaatgtaaaataaacttgatattttcagttaatagattacacttataaagtcttattgatataatgtaaactcttaatgacttttactatgataaccaagaaacaacagaaaacagagaattaaagattatccagaacctgtgaatcatcactaaaaatacttccgatatttcggaataaaagcaatacacaacctgtcaatcgcaatagttacatgcgtatccctacgtgtcattaatgaaaatacttccggaggtgatagagtggaaattccaagtgagaaagagtataaataagaattaaattttaacgatcaatcacttcccaataaaaaactcttgatctaaacccttcttctccaaaatgattaagtaaaccaaacccagaagcttcttatcttcaacatcttcaacatcttcttgattaaaattcatcttttgaatatcaaaacgctttctgttcccgtatttatccaaaatggtagcaatatttttaggaatgaaaaatgatgattttccaataattttctttttatattcattcaaataaatacctattccagcaaagtcaaagtcgccaaaatgcaggtagtcattagaaattgaatttatccactttataaaatccttattttggttttgtggataccgtgaaataaacaagggttttatatgcgtaaataaatatttctgctgtctgatttgactgaagttctgagcattttcaactcctacaatggtgatatttttagggattttaaagctttcatagtcggaaataaaaagaaagctgcctgcactaggattgatgattagcttttcattgtttagttctgcttttatagggtgataactgttaactagaaatcctttaaatgctctttctttagaatttttagaatcggttgtgatttttacaaaatctcctcgagatgattctgtgttttctaaagctgagatataattgttcaaatcattaatttgcaattgattcgctaaataaatatgcaagtctttttcattgatgagctccaaagtctttctatgtt

SEQ ID NO: 1130 - DNA, 24530 bp, synthetic construct
  misc_feature 1..24530: note = Synthetic
  source 1..24530: mol_type = other DNA
atcgctccggcttcacttggctgagccggtacttcggccaacgatggcgactgaggttgaagatccagttcccttgtccttcttccgtaagtgagtttgcgattagttggcatagtccttcagcaaattaacaaaccgtatggctccgtagcgtccttcgttataccctcggaagggagaaatggtgtggtgctccttgaaatcattgtgcgaatagagcactgaagctccttcacgcttatccacaaaccagatttcatccgagcggagaatgtcgcgctcatcgagcaactggttgtcatgagtggtaaagatgagctggccgttggtgtcggctgtctttgcaaagtattccacaatgcccttgaccatggtgggactcaggcagcagttgatttcgtccaccactaccgtcttgccttgcttgcaggcatagtagagtgccggaagcagcgtcaaggcacgcagcgttccgtccgactgcatactggtgtccaaagtgcccacaaatccactcttgccgatgttgtcgaatatcagctgatagacctttcgcaccccattttctacattgatggacagcaccggagtggtgttggcattcagcgaaagcgatttcactttgtccagatcacccggcaggttttgggcgatggcgatgtgctgtttagcccagctgtcgaaatccgtttcctgcaaggtcatgtcgttgacacccacttccaggctgctgaccaactgacggacaaactccatcatgggttgattgtcgcgcagcaaatcgatcaaggtcggcagaaaagtgtgtacaccgatgatttccagctgtccgttgaaccattgagcagccaatgcacaacgggcgtccgcaataatcgggaactcccggttcagtgccatcaacgatgcgagcggattcttttccagcattttccgggttgcttccgcaatggcttcatccgctgcttgtgcaaattccacctcctcctgcttgcgctcgtaaatcaagtccagctttccttccttggggtacgactcgtacagtccttccttggctacaaaggtttcggtcagttccacttcgtaaaagaagaaatgctgctgtatctcaaattccactgccaatgaaataggctctttgcctgcatctttcttcagcagatagaagaacttgccaagttccaagttcttggcaaagtccttgtccaacgcaaaggcacgcagaaattccatggctttgaccacgttggactttccggcaccgttggagccgtagatggccgcctgcttcagcaggggtacatcacaaaggtctgtatagacatgcccagccagctgggtacgtttcatgttcggaaacatatcgaactgagcttcgtcatcgaacgaaagaaagttcttcaaaatcaggcggagtatcatagtgcttctattaaatgaggatgctgacttgttgtttatttgtataaaggacaaagccttgtcacttgcaaagataatcatattttttgtagggtgaaattttcacgtgaattattcacttcaaaatgtctatttttccgttttgtaaatgcaagaatgctgtaaaagagttttttgcagtgaaaagaaaaataaagccgttggctgaaacaacgccgtctggcaaaacagtttagtttacgtgggttagctttatatatgcgctaacctaaagtaaagtatttatgtctatcgaaaaatgcagttgtattgccacaagaaaaacgggaagagccacatttcgacttcttcccgctatgcaccggatgataggtactgagccttggagaatcattttttcttttcactgcaaaattacagaatgtgttcgtcaatttcaatgacatgccttccggtcgtagtgcgtaggttctttcgcactgtagtgaatgaagtattgctgaaccattcattaaaggtggctataacaaatctggcagtaaggtcgccactgatattatactggaaagcgatgttccaggcaaaatttttgagtgcaatttgtgtaacgttcatccgccttttgatgtgcacctctgtttgattcaatacctgctgattggtcacaaagtagcgtacacactcacagatctggaagatttctgtttcatcgaagtccagacgcttaaacgtatcacgggtgtatttaaggattgctgccagtttcaggtcattctctttttccttctggagcaagtaggattgttgctccaattgaaattcgtggtggaacagttccatgcgtttcttttgtacttcagctttacccaatggatgtttggagtactcgctttttgtagaaaggttggctacactttctttagaagttgcatgtcgatgaatccaagaagttcctttgcgatagaaaaccttcaataggataaagactacaagtagggtaatcggtatgatgtatgtcatcatgcccagcacttctctcagcaacaaagttagcatggaggttgtaagtatgatgagagcttcaattatcgctggtcggatgctgtatttattctgcttcatagttatcgttgtttatcactcaacgcaaaaatacgaagcaaatccataactatcgaaagacaaatagtagtgccatgagcgccattcaatcgggaatgagagtgtcatgaaaacaaaatatgaacaagtgaaatcaatgccaagtcagtgtaaacaagtgaaagataaaaggcgaatggttaattatctataatttttcagaaaggagtagtcctataggtatctttatgggcaaataaatacctcaagttctctattgcatggtatcagaaatacccttcataaaattaccatatttgtaccatggtatagtaaagtatgtgattatcagatgtgtttagttttgaggaagtgaagtaatatcactagatataaatagtaaaaaggtgtgtagcttatcaagttacacaccttttcttttgttgtatttgggtgattttatcgactggttgtctgaatagtttctgtatcatattgggctttgtaataaagaaatgaaagattagtgacagacatatacttatgtgaatctgtatttagtgaatgtcggtaaagaatttctttggaacataaattgaatagcagcctgtcaaaatataaataattcagaaaatagctgtcctttcacggaaaattgctatatttgcaccccgaagtataagtgggattcaatgtatagtttagagaaacagatagaagttaaaagagcttatccggattcgggttggctgaacacatatttttttgtatttttctatcttgcattgcagtccttttcatatttaggctgtgatatttgtgaaaatttaatagtgagaaaatacctgaaattgcttattggcaagttcaggtatttttttgatgctgtataaggactaactaacgattcggaacaatatggaaccattaaaacatgaatgcggagttgcgttgattcgcctgttaaaaccgctggaatattatcaggaaaagtatgggacctggatgtacggactgaacaagctttatctgttgatggaaaaacagcataaccgcggtcaggaagcggctggtctggcttgtgtcaagttacaggcaaacccaggtgaagaatatatgtttcgcgagcgcggactaggctcgggagcgattaccgaaatattcagtacggttcacagttgtttcaaggatttgacacctgaacagatggccgatgcagaatatgccaaacagtgtctgccttttgccggtgagttgtatatgggacatttacgctattcaacgacgggtaaaagtggtatttcatacgtgcatccgtttttgcggcgcaataactggcgcgcaaagaatctggcactttgcggaaacttcaacctgaccaatgtggatgaaatctttgctgacattacagccgacggccagcatccccgtaaatatgccgatacttatatcatgctggaacaggtgggacatcgccttgaccgtgaagtggaacggctttaccagcaatgcaaagaagaaggtctggaaggaatggatataacacatgccattgaagaccggattgatctgaccaatgtattgaaaacttcaagtccgaaatgggatggaggatatgtcatctgcggtctgaccggtagcggtgaaagttttgccgttcgtgatccctggggaattcgtccgggattctggtatatggatgatgaaatcatggtactggcttctgagcgtcctgttatacagactgctttgaacgtaccggccgacagcgtacatgaacttcttccgggacaggctattctggtcaataagaaaggagagatgcgtctggcacagatcaatgagccgaaacaaaagaaggcctgctcgtttgaacgcatctatttcagccgcggaagtgatatggatatttaccgcgagcgcaagcagctgggtgaaaaactggttgatccgattctgaaagccattgaccacgacgtggtacatacggtcttttcatttattcccaatacggccgaagttgccttctatggtatgctggaaggttttgacaattatttgaaccagcagaaggtacaacggatcgaagcattgggacataagcccagtcacagcgaactggaacagattctttcccagcgtatccgcagtgaaaaggtggctattaaagatatcaagttgcgtacgttcattgccgaaggtaacacccgcaatgatcttgcagcacacgtatacgacattacttacggaagtcttattccgtacgaagataatctggtgattattgatgacagtatcgtgcgtggtacgacgctgaaacagagtatcatcagtattctggaccggttgcatccgaaaaagattgtcattgtttcttcttcgccgcaggtccgttacccggattattatggtattgacatggcgagcatggagcagttcatcgccttcaaggcagccattgccttgctggaagaacggggcatgcagcgtgtcattgaggatgtttacctcaagtcgaaggcacagctgtcgcttccgaaagaagaaatggtgaactatgtgaaggaaatctatgctccgtttaccgatgaagagatttctgccaagatggtggaactgctgacaccggccggaactcaggctaaagtggaaatcgtataccagactcttgaaggactgcatgaagcttgtccggatcatgaaggagactggtactttagcggtgactatccgacaccgggcggagtgaaactggtgaaccaggcctttattgattatgtagaacagatctatcagttctgagaaaagttgagaaatattaacagtaaacaatagatacagaatatttaaggtaatgagaaatgtaacattgatcctcgacgacgggagccgctttcatggcaagtcgttcggctatgagaaaccggtagccggtgaagtggtgttcaacacagcgatgaccggataccctgagagcctgaccgacccttcgtatgcaggtcagctgatgacgctgacttatccgttggttggtaactatggcgtgccttcgttcacgtttgaagcaaacggactgcccacctttatggagagcgaaaaaattcatgccgaagcgattatcgtgagcgattacagcgagaagtattctcactggaatgcagtggaaagcttgggcgactggctgaagcgtgaacagattccgggtattacaggtattgacacacgcgaactgaccaaggttttgcgtgagcatggtgtgatgatgggaaagatcgttttcgatgatgaactggacaacattcccgaagctgcctatgccggtgtgaattatgttgataaggtttcctgcaaggagatcatccgttacaatgaaggcgaaggcaagaagaaagtggtactggttgactgcggtgtgaagtcaaacatcatccgttgtctgctcaagcgtgatgtagaaatcatccgtgtaccctgggattacgatttcaactctctgcagttcgacggcctgtttatttccaatggtccgggcgaccctgatacatgtgatgctgccgtgcagaacattcgcaaggccatgcagaacgagaaactgcctatcttcggtatctgtatgggtaaccagctgctgtcaaaggcaggtggagccaagatctacaagctgaaatacggtcaccgcagccacaatcagccggtgcgtatggtaggaactgaaaaatgtttcattacctcacagaaccacggttatgcagtggacaacaacaccctgggagcagactgggaacctcttttcatcaatatgaacgatggttccaatgaaggaatccgtcataagaaaaacccctggttctcggcacagttccatcctgaagctgccagtggcccgacagatacggaattcctgttcgacgagtttgtaaagttgctgtaatccattaaaatcaaaagaaaacaatgaaagaagatataaagaaagtattattgttaggttccggagccttgaagatcggtgaagcaggcgaattcgactattccggctcacaagctctgaaggcgttgaaggaagaaggcatcgaaaccattctgatcaacccgaacatcgctaccgtacagacatcggaaggtgtggcagacaagatttacttcctgcctgtgactccttactttgtagagaaggtgattgccaaagaacgtcccgacggcgtgttgctgtcattcggtggtcagactgccttgaactgcggtgtggctctgtataaggccggtgtgtttgaaaaatacaatgcacgcgtgctcggtactcccgtacaggctatcatggatacggaagaccgtgagttgttcgtacagaagctggatgaaatcaatgtaaagaccatcaagagtgaagcggttgagaacattgaagatgcccgtcgtgctgccaaggaactgggttatccggtgatcatccgtgctgcatacgcactgggaggtctgggctcaggtttctgcgacaatgaagaagaactgaacgtactggctgaaaaagctttctctttctctccgcaggtgctggttgaaaagagtctgaaaggctggaaagaggtggaatacgaagtggtacgcgaccgtttcgacaactgtatcaccgtatgtaacatggaaaacttcgaccctctgggtatccataccggtgagtctatcgttatcgctccttcacagactctgaccaacagcgaatatcacaaactgcgtgaactggctatccgcatcatccgtcatatcggaatcgtgggtgaatgtaacgttcagtatgcgtttgatcccgaatcagaagactaccgggtaatcgaagtaaatgcccgtctgagccgttcatctgcactggcttccaaggcaaccggttatcctctggcattcgttgctgctaagttaggtctgggttacggactgtttgacctgaagaactcggtaacaaagactacttctgctttctttgagccggcactggactactgtgtatgtaagatcccccgctgggacttgggcaagttccacggtgtagaccgtgagctgggttccagcatgaagtctgtcggtgaagtcatggccatcggacgtactttcgaagaagcgattcagaaaggtctgcgtatgatcggtcagggcatgcacggtttcgtagaaaacaaagaactggtgatcgaagacatcgacaaggccttgcgcgaaccgaccgacaagcgtatcttcgttatctcgaaggcaatgcgtgccggttacactgttgaccagatccacgacctcaccaagattgacaaatggttccttgacaagctgatgaacatcatgcagacatccaaggaactccatgaatggggcaacaaccataagctgctttcacaacttccgaacgaattgctttataaagccaagcgtcagggattctctgacttccaggtggcacgtgccatcggatacgaaggtgaaatggaagatgccatcgtcgacatccgcaaccatcgtaagaaagtaggtatcgttccggttgtaaaacagatcgatacgctggcagctgaatatcctgcacagaccaactacctgtatctgacttatagcggtgttgccaatgatgtacattatctgggcgaccataagagtatcgtggtactcggttcgggagcttaccgtatcggttcttccgtagagttcgactggtgcggcgttcaggcactgaacaccatccgcaaggaaggctaccgttccgttatgattaactacaatcccgaaaccgtttctaccgactacgatatgtgcgatcgtctgtacttcgacgagctgaccttcgaacgtgtcatggatattcttgatctggagaacccgcacggcgtgatcgtttctaccggcggacagattccgaacaacctggcactgcgtctggatgcacagaaagtaaatatcctgggaacatcggccaagagcattgacaatgctgaagaccgcgacaagttctcagccatgcttgaccgcatcggcgttgaccagccggaatggagcgcactgacttcaatggaagacatcaatgcatttatccagaaagtaggattcccggtactggttcgtccgtcatatgtgctgtctggagctgccatgaacgtatgttccaatcaggaagagctggaacgcttcctgcagctggctgccaatgtatcgaagaaacatccggttgtagtcagccagttcatcgaacatgccaaggaagtggaaatggatgccgttgcacagaacggtgaaatcgttgcatacgccattagtgaacacatcgaatttgccggcgttcactcgggagatgctaccatccagttcccgccgcagaagctgtatgttgaaaccgttcgccgcatcaagcgcatcagccgccagattgcgaaggagctgaacatttccggtccgttcaacatccagttcctggcccgcgaaaacgacatcaaggttatcgaatgtaacttgcgtgccagccgttcattcccgtttgtcagcaaggttctgaagatcaatttcatcgaactggctacaaaagttatgttgggattgccggttgaaaagcctgaaaagaacttgtttgaacttgactatgtaggtatcaaagccagccagttctcattcaaccgtctgcagaaggccgaccctgtactgggtgtcgacatggcttctaccggtgaggtgggctgtatcggtgaagacacttcatgtgccgtactgaaagccatgctgtctgtcggttaccgcattccggaaaagaacattctgatgtctaccggaacaccgaagcagaaggtggaaatgctgaaggctgctcaggaattgaagaagaaaggctacaatatctttgcaacaggtggttcttcgaagttccttacagaaaatggaattgaaaacacccgtgtatactggccgagcgaggaaggacatcctcaggcattggaaatgcttcataagaaggaaatcgacatggtagtgaatattccgcgtgacctgtcggcaggtgagctggataacggttacaagatccgccgtgcagctgtcgatctgaatattcctttggttacgaatgcacgtctggccagtgccttcattcatgcattctgtacgatgactatcgatgatatcgctatcaagagctgggatgaatataaataatccggctgacagataatctgatttttactggcgccactctgaaaggactgttccttttggagtggcgtttttttcgtgcgtatttattgatgatattgttttgggggtaaaagagaaagtataaaaaaagaaagcgaccttttgcaagaccgctttaattgttttcacaacggaataatccttattgtgatttgcttcaatttagtatttgcaaatatatgaaaagttttttgataccgatatctttgtgagataaattttgtctatatttgagaaaaaataacttaagtagattatgaaaaagacattaggcttagatttaggaacaaatagtatcggatgggctgtaatcaattctaatatagattctgaaggtaaagaaaaactagtaggtatttcttcttgtggcagtaggattattcctatggatgctgctacattaggagactttggaaaaggaaatactaaatctccagtagcggaacgaacaagacttcgaggaatacgtcgcttgctggaacgtagcttacttcgtagagaacgcttgcatcgggttctgtctgttatgggttttttgccggaacattatgcttctcaactggatcgatatggcaagttcttgccggaaacagagcctaaactggcctggtataaagatgattctggcagatatcaatttctgtttcagaaatcatttcatgagatgcttgaagactttcgtcagcatcagccggaactggttgcgggagagaaaaagataccttatgactggactatttattatttgcggaagaaagctctttctcaggaaataactaaggaagaactggcctggatacttctcaactttaatcaaaagagaggatactatcagttgagaggagaagaagaacaggaagaaaataataaatcagtagaatatcatgcgctgaaggtcgtatctgtggaagactccggagagcgtaagggaaaggacatctggtataatgttacattggaaaatggctgggtttaccggagggccagcaatattcctttagactggaccggtaaggtgaaagagtttgttgtaacaacagaattagatgatgccggaaatcccaaaaaggataaggaaggtaacgtgaagcgttctttccgggctcctaaagaagatgattggggattactgaaaaccagaacgcaggcgcagattgatgaaagtggtaaaactgttggtacatatatttatgaatcattactttgtatgcccaatcagaaaatcagaggaaaactggttcgtacgatagaacgtaaatattataaagacgaacttcgacagatcttggttaagcagtctgagtttcacgcagctttgcaagatcataatttgttgctttcttgtattgaagaactatatcctaacaatgaagcacatcgtcggttattatctgcttccagttttatctattttctgatagaagatatattgttttatcagcgtccactgaaaagccagaaaggattgatagacaattgtccctatgaatcacatatatataaggataagaaggatggcagtttgcatcatgttccattaaaatgtgtttccaaatcacatccgctgtttcaggaattccggttgtggcaattcctttctaatttacgcatatatcagcgtgaaagaatgatggatggatctcttaagctggatgtggatgtaacacgtgaattcttgccgagtgaggaggattatgtaaaattattcgactggctgaatgaacggaaagaaatcagtcaaaagtttcttctggcatataaacctttcggattaaagaaaaatgagcaggctaattatcgttggaactatgtagaagacaagagttatccatgtaatgagacaagagcggaaatcaagagcagactgagtaaggctggagttccggaggaattcctgacagaagaaaaggaagaggctttatggcatatattgtattctatatcagataagaaagagttgacaaaggctttaggcacttttgcagcaaagaacggtctgaacgaaagttttgtggaagtctttgccaaaattccgccttttgaaagtaattatgcagcttactccttgaaagctatccgtaaattgcttgcattgatgcgcatgggaaagtattggaatgagcagaccattgacaggcaaacccgcgatcgaatagaaaagattctgacaggagaatatgatgaaactattcgttctcgtgtgcgtgaaaaggctatgcttttgacagatatatcttctttccgtggacttcctttgtggttggcatgttatattgtttatgatcgtcattctgaatcaaaagaacttgtgaaatgggaaactcctgctgatattgatcatttcttgagtaagttcaaacagaattcattgcgtaatcctattgtagagcaggttattacagaatctttgcgtactgtacgagatatttggaagcaagaaggtaaaatagatgaaattcatgttgaattaggtcgtgagatgaagaatccggccaaagaacgtgctcggataacagctcaggtacaggaaaatgaaaataccaatttgcgtataaaagcgttgcttgcagagtttatgaaccctgaatttgagatagaaaatgttcatccttactcgcctgggcagcaagagattctacgaatttatgaagatggagttttgtcgggtattgcagaaaaggatttgcctgatgatatcacagcaatattgaaaaagtttagagaaaatgatgtaaagaaacgtcccacaacttcagaagtcttgcggtataaactttggctggagcaacgatatcgttcaccttataccggtagggttattccgcttggtaaattgtttactccagcttatgaaatagagcatgtgataccacagtcacgttattttgatgattctatttccaataaggtcatttgtgaatcagctgtgaataagttgaaagataattgtctgggatatgaatttatcaaaaagcattccggtgagatggttgaactggggaatggtgaaacggttcctgtcttttcggttgaagagtatgaacgtttcgtgaaagaatcttactttggcaatagcaagaagatgaagaaactgttgctggaagatatacctgatagttttattgagcgtcagttgaatgatagtcgatatatcagtagggtagtgacatctttactttcaaatttggtatgtgaagagggagaacaggatggtttgtcaaagaatgttatagtttgtacgggtggaataacagatcggttgaagaaggattggggagtacaggaggtatggaaccggattattcttccacgttttttacggttgaatgagattactggcagaacagatttcacttctacaagtgtaaacggtcatctgttgcctgccttacctttgtatctgcaaaaaggatttaataaaaaaagaatagaccatcgtcatcatgcgatggatgccatagtcatagcctgtgctaataggaatattgtaaactatctcaataactcttctgcaagaaagaattctgagatatctcgttatgatctgcaacgtttgttgtgtgaaaaggtgaaaacagacgcaaacggtaattacaaatggattcttcgtaaaccttgggagacatttacacaggatgtatatgcagcattgacgaatattgttgtcagctttaagcagaatcttcgggtaatcaatcgtaccacgaactattatcagcattataatgaggctggagaaaagagaatgattccccagactaagggtgatcgttgggcaatccgtaaaccgatgcacaaagatacggtatatggtgaagttaatttgcgtaaggaaaagacacttcctttgagagacgttgtcaagaatccgtcgattgttgtggataagtcattgaaaaacaaattgtatgagttgctaaaatctcagtatgacctgaaagcaatagcgaagtacttcgaaatccatcaggatgtctgggctgatgtcaatttaaagaaaatcaaggtatactattttacaaaggagacaaatgaacgcttctttgcaacacgtaaatcactagatccaagttttgatcagaagaaaattgaagaagaagttacggatacaggggtacaaaagattttgctacatcatttgcagcaaaataataacgatccggatatggctttttctcctgatggaatagaccgtatgaatcagaatatgacaattctgaacgatggcaaatggcatcaacccatttataaagtacggacttatgaaaaagcagataagtttgctgttggtgagagtggaaataaagctaaaaagtttgtagaagcagccaagggaaccaatttgttttttgcagtatatgaatctgtacaagaggatgaggctataggaaagcaggtctgtaaacggacttttgcaaccatacctctgaacgaagttatcaagcgtaaaaaacaaggattacctgctgccccggaagatttaaaaggtaatctgccaaaatttgttttatctcctaatgatttggtctatttaccaacagaagaagaacgtaatagcagcagaataattcaacctttggatagagaaagaatttataaaatggtttcttcttctggtagtcaatgtttctttataaaagtatttgttgctaattcaatttgggataaaaatgagtattcctctttaaataagatggagcgtgcaataacaaatgaaatgataaaagaaatttgtgttcctattaagatagatagattaggtaatgtttccttgatacaaatatgatataatgataaagaaaacactgtattttggcaaccctgcttatttatcactgcaaaataagcagttggttattaagttgccggaagtggagcgtaatgcttcacttccagaatgctttaaatctcaatcggttataaccagaccgatagaagatataggattggtgatattagatcacaagcagataacaattacttcgggagcgcttgaagcgcttttggaaaacaattgtagtgtcataacttgtgataacaaaagtatgcctgtaggactgttattgccactttatggaaatacagtacagaatgaaagatttagggaacaactcacggcaactcttccgttgaagaaacaattgtggcagcaaactataaaagttaaaatacagaatcaggcacatgtcctgcaatattgttcaggagaagacaataaatgcatgaggatttgggcggaagaagtaaaaagcggcgatcctgataatctggaagcgagggctgctgcttactattggaaaacactttatgctcatattccaggatttacacgcgaccgtgacggaatccctcccaataatttattaaattatggctatgctattttacgcgcgattatagcccgtgctttagtttccagtggtttgttgccaactttaggcatacatcatcataaccgctataatgcttattgtctggctgatgatataatggagccttatcgcccttatgtagataaacttgtatttcaacttgtcaagacttatggcgaaaatatagaactgaccaaggaaataaaatctgttttattgacgattcccacgcttgatgtggttataggtagaaaacgaagtccgttaatgatagctgctactcagacaactgcctctttatataaatgctttagtggtgaattgcgtaaaattgcttatccagaaatgtgatggatagatacagtgaatatcgtattatgtggatacttgtattttttgatttgcctacagaaactcaaaaagacaagaaagcttataccttgtttcgtaagaacctgcagaaagacggctttacaatgtttcagttttctatttatgttcgccattgtgccagttatgaaaatgcagaagttcatatcaaacgtgtcaagtctttcctaccagaatttggtcaaatagggattttatgcataacagataaacagtttagccagatagaattattttatgggaagaagcctcaaattaagaatgttgctggacaacaattggagttgttttagaaataaaaaaatcccgtttaaatacgggatttttttattagaaatatttcttttttattcctaaaacgctttgcaacttattggttcttatctagttattagatatcagctgtaagttcttatgcaaagttactaaaatgaaagcaaatcacaacatgatttccgttccgtattcatctttatagctgtaagttcttatgcaaagttactaaaatgaaagcaaatcacaacttaacttgtcggacgcacgtaccaaaatcagctgtaagttcttatgcaaagttactaaaatgaaagcaaatcacaacgtctttcggcaaataatcatccaactccccgctgtaagttcttatgcaaagttactaaaatgaaagcaaatcacaacgagcaattaacaaaggaactttctaaaaaagctgtaagttcttatgcaaagttactaaaatgaaagcaaatcacaactaggtgcaattagggtattcttcaaaaaaggctgtaagttcttatgcaaagttactaaaatgaaagcaaatcacaacaccacatcagataaccttccggcaccatcggctgtaagttcttatgcaaagttactaaaatgaaagcaaatcacaacactggttggctattgaaaatgtgatagacgctgtaagttcttatgcaaagttactaaaatgaaagcaaatcacaactagttagaatggccatagtattgctgtgctgctgtaagttcttatgcaaagttactaaaatgaaagcaaatcacaacaactgatgaaatatgtattaggataaaaaagctgtaagttcttatgcaaagttactaaaatgaaagcaaatcacaacaggaacggaaagaaaaacgtatctttgttgctgtaagttcttatgcaaagttactaaaatgaaagcaaatcacaacaaaaatgttatgtttattccggctgttggtgctgtaagttcttatgcaaagttactaaaatgaaagcaaatcacaactatctgagggaagaacgaccagacatttgcgctgtaagttcttatgcaaagttactaaaatgaaagcaaatcacaacatccaatgtaggaatagcataagactggcgctgtaagttcttatgcaaagttactaaaatgaaagcaaatcacaacatatacaaatatatttgtactttatttctgctgtaagttcttatgcaaagttactaaaatgaaagcaaatcacaaccatctgcaaacggtaacaaagtagcaaatgctgtaagttcttatgcaaagttactaaaatgaaagcaaatcacaacgatacatactacttccttttacgctgatcagctgtaagttcttatgcaaagttactaaaatgaaagcaaatcacaaccgtgttgcccccacggttaattattattgagctgtaagttcttatgcaaagttactaaaatgaaagcaaatcacaacgatatctactttcccaatcaaaaggcataagctgtaagttcttatgcaaagttactaaaatgaaagcaaatcacaactagtacgttcagcagcccggatgcaatatagctgtaagttcttatgcaaagttactaaaatgaaagcaaatcacaacaccatttacacattttcctactatgtatcagctgtaagttcttatgcaaagttactaaaatgaaagcaaatcacaacaagatctgcgctgtctgcctgggagtattcgctgtaagttcttatgcaaagttactaaaatgaaagcaaatcacaactaagttcaaaatcataaacaaacacgtatggctgtaagttcttatgcaaagttactaaaatgaaagcaaatcacaacgtgaaggttcttctgtagcctttactatcgctgtaagttcttatgcaaagttactaaaatgaaagcaaatcacaacacaatatgaacgaattctcaataaatcagttgctgtaagttcttatgcaaagttactaaaatgaaagcaaatcacaacatacgtatgagttgcgttccgggaaaggcgctgtaagttcttatgcaaagttactaaattggagtcaaatgaccgcacaataccttcgtcattgaactggtcaatgcaaaaaaatcgaccgcacgattggccttcaacgaccgcacgattgagctccaacgaccgcataatttgccttgatcgaccgcacgattccggaggcctgtcagaatgagttttcagaggctggaaatacctttggaagaggtgaaataaagcccgcgggctttttaaaaaacgtttcgggctttgaaggaaaagacttcgggcttttgagtaaaacgtttcggcgtttttctgtgcttatgctgaagcttttctgttaagaatcttcttgagaatattttttcttgcaatggcaagtccggaggacaacggctcattgtccaacaggctcagaatgttttcaagttctgacaataagtcagtatgaaacttgcactgttcgtatgaaagctttatgcataaggctctgactccacatgagttttcacaggacgtaattccggacaggcagtaatcgatgaagtcggttctgagttcatcttcccggaaaggcagtctgaggatgagggtcagcaggagtcgtttcttgccttcgtgtgtttcctgcaatgccagactgatcagttcgtcctgtctgggggcaagccattggaagttatacgggtcaaaatgcgtgaatacccataaggcattgtacgacactttttcatcaccgtcttttatgcaggcatacagttcttccttatgagagttgtttctttccccttgagtgtagaaacagatttcatgaatatcgtctgcgctcagcctttgagtcagtttgttgcgtatcacagaacggatgtttccatgtgtcatggtgatcatgctcatgccgttgtttatccttgctgccgggtagaagcggagggggtgtcgctgttgcatttatgcggtgagcggcaggcgtacagcaggcgtttgctgtaatagtcttctgtggaagaagagacggttactccctggcgtgcagcgtgaatgaatgaaaattctccggtttcgttgttgactgatacgacgattcccacgtgaccgatcttgttggatatgcggcttccgctgaaaaataccaggtcgcccaggtgcaagtccttgtagtctgaaacttgtttgtccttacagaaaaggctggccgaggagcggggaacggagatgtccagtttccggaagacataggacacgaagcccgaacagtcgaatccgcgtttgggattacttcctcccggggtatagcgaatgccggagtattgggtggctttctgaacgatatcttcaccgctgaccttgttgttggccatggcgggcagggtaattataagcagcaaaaagaggtacacgtatttcattgcgggttcagtttttgtggttatcgtgggttaaagttaactttttattccgagaaaagagaattttctccgtctagcagcggaaagtttaggcttttttcagggagctgttaaaaggctgttaagaaagcggggaggggtgaatgaggaatatggaatacaggttttgtgttaaaatgtcatattcttggggatttatggaaaaataatcactttggctcaacttttgatggggaatagttgttgtgtttatgtatcaaaaagacagatacgggctttttgatttattctgatcactaatataagaagaaaaaactatggaggatgtaaaaaagactcgggtggagagcgatttgatcggctctcgtgaaatttcagatgaatgcctgtatggtgtacagacactgagaggaattgaaaatttttcgatcagcaaatatcacctgaatgagtatcctttatttatcaacgggctggccatgaccaagatggcagctgcccgcgccaatcatgagctcggcttgctgacggatgaacagtttcaggccattacgcaggcttgccgtgaaattctggaaggacgttttcacgatcagttccctgtagacatgattcagggaggagctggtacgtcgacaaatatgaatgccaatgaggtaatagccaaccgtgcactggaaatcatggggcatgcacacggagattatgctttttgttcgcccaatgaccatgtgaactgttcccagtcaaccaacgatgcatatccgacgactatccatctggggatgtatgccactcatctgaagctgttgccttatctggaagatctgattgctgccttccgccggaaaggagaagaatttgcccatatcatcaagatgggacgtacacaactggaagatgcggtgccgatgacactgggacagacgtttaacgggtttgcaagcatcctgacggatgaaatcaaacatttgaacgaggctgcggccgatttcctgactgtcaacatgggtgcgacggctatcggtacgggaatctgtgccgaaccgggatatgctgaaaagtgtattgccgctttgcgcgacatcacgggctgggatatccgtttgtcggatgatctggtaggtgccacttccgatacatcctgcctggttggatatgcttcggcaatgaagcgtctggccgtgaaggtaaacaagatctgtaatgacttgcgtctgctggccagtggtccccgttgcggactgggcgaaataaacctgccggccatgcagccgggatcatccattatgccgggcaaggtgaatccggtgattccggaagtgatgaaccagatctgcttcaaggtgatcggtaatgaactttgtgtcacaatggcaggtgaggctgctcagatggaactgaatgtgatggaacctgtaatggtgcagtgttgctttgagtctgccgaactgatgatgaatggtttccgtacgttgcggacgctttgtgtggaaggcatcacggccaatgaagagcattgtatcaacgaagtgcatcacagcatcggagtagtgacggctctgaatccggtaatcggttacaagaactccaccaagatagccaaggaagcgcttgaaacgggaaagagtgtttatcagctgatactggatcacggtattttgacgaaagaggaaattgatcagattctgagtccggagaacatgattcatccggtgaaactgaatatcaagcatcgctgatcaggtggtgaatggattggcccgaccggagactgaggtttcggtcgggttgattttattccgggagagaagtgtcgcaaaggcatttttctcccggttcttcaaattcaatggtcgtatgtatgatgtgatactggcgcgccacggcttgtatttcctccttcagctgatggaagtttgttccggaagtgaccgcgtggagggtcattacgtgcgactctccgtccagactccagaggtgcatgtcgtggattgaacggatgccttcgatttcggtcagtttccgtgtcagttcatccaccgggatatcttcgggaacggattgaagcatgatcctgaacactgcatgcagatttttccagacgttggtcagcacccagatggaaattcccatggaaagcagggtgtcgagcatcggaaggtcgatgaaaagcatgacaatgctgacaatcagtacggaaacccatcccagcacgtcttccatgatatggagaaaggcggcgcgctcgttcagggacgagcctttcttcaggttgaaagctgctcctccgttgataagaataccgatgacggccacccagagcatgccctgggcattgacgggctgagggttcagcagtcgctgtccggcttcaaggaggacgatggtagaactgatggcgagcactcccgaaagaaagacactgcccagcagggagaatcgcttgtagccgtaagtataggtagatgtacgtccctgggtagattttttttgcagcatccaggctatggccagcgacaggcagtcgccgaagtcgtgaagggcatcggtcaggatggcgatactgttggtgagcaatcctcccaccagttcaatgacaacaaaggcggcattgagaaaaaatgcgaccgaaatgttcttcgctgcattgcctgtggaatgatgatggtgatgatgtgacatgattacagatgttttcgtttggcgcagtttgcgcagattcctttgacgatatagttgatcttgcggggaataaagccttccggcaggtctacgtgagggatcagatcctggtccagacaataggtcttccggcattcctcacaatagaaatggcagtgttcttcttctttgcggcagtttccgtgattgtgacagaaacagtatttcagcgagccgcttccgtcgtctacgctgtgaatgagccggtgatcgtggaagagagtcagtgtacggaaaaggcctgacttgtcgatactgggcagacgttcttccagatcgcccagagagaaggtgtttttttcttccgcaatggcttcatacaccaggatccgggttgatgtaggacggattccggcttgtgtcagtatgtcgcagcagtctttggcattcatgtttttcttgttttatctgtctgcaaagttaagcatctgtttttgcaaccgggttgcaaactggcggaaaaaattaaagccaacccatccgtcacggatttgtcggccagtcatcttaaggaatatatctatgtttaacagtatgtgtcccttttcacattgcaaaggtagcggagggatgtttcccgggagtgacatccgtgttacgttcgtatgaaaaaaagacacgaaccgcgcagggccggttgtcggctgtctgtgcggttcgtgctggtttgtccggaagtggtttgaaaccgattatttgatttcgaattcttccttcatgtccagttcctcgcctttggtgtcatagaatttatattccaggaaggccaggttctgattgggaatgactttgataccgaatccaaacttcatttgccatttccgtttcagggaaacaagtccctgattgacgtatgctgctacataaggatggatgtgcagcgtaaatttcttcactttcagcttattgaccagatagtcgatcttgctttccagggtgtcggtaaacaagatggacggcttgatttttccttttccgaaacaggtcggacaatcttcgtctgtattcacgtccatggccgggcggacgcgctgacgggtgatttgcatcagaccgaacttgctgagcggcaaaatattatgttttgcacggtctttctgcatgttctgacacatgcgttcgtagagtttctgccggttttcagcaagattcatatcaatgaagtcgacaacgatgattcctcccatgtctcttaaccggagctgacgcgccaactcatcggctgcgcccaggttcacatccagtgcattggcttcctgtccgtttccagacttggaacggttgccgctgttcacgtctaccacgtgcaatgcctcggtgtgttcaatgatcagataagctccgcttttgtaggaaatagtttttccaaacgaggatttgatctgtttggtaatggcgaagttgtcaaagatgggaagctggcctttgtatagcttgacaatgtttacccgttcaggggcgataagcgctacataatctttcacttcgttgtacacggcttcgtcgttgacataaatgttttcatacgacgggttgaacagatcgcgcagcatggctacggtacggcttgtttcttcgtacacgagtgaaggcagcttggtggccttttgtactttggtgatggtttcttcccaatgtttcagcaagactttcagctcggcatcgagttcggcaacgcgctttccttcggcaacagttcgtacgatcacgccaaaatttttaggcttgatgctttgtaacagctgtttgaggcgggcacgttcttcattcgatttaattttttgtgatacggaaaccttatcattgaaaggtataagtaccagataacggcctgcgaatgagagttcgcacgtcaggcgcggacctttggttgagataggttccttgacgatctgtacaataacttcctgaccttgctgcaggacattcgaaatggatccgtccttttcgatgtcggggagcatggaagctttcgtaatggggtacagtttttttctgtcgcttacgacttgcttgagatacttctgatacgaatggaattgtggtcctaagtctaagtagtgaaggaaagcgtctttctcgaaaccgacatctacgaagcaggcgttcagtccgggcatgatttttttaactttgcccacgtacatgttacccactgaaaaagaaagattgcgttcttctttttggagttccaccaggttcttgtcttcaagaagtgcgatagaaatctctttgggctgtacgtctactactaattcgcttgtcacttgttacttagttttaaaagttataactgagattctagaattacgcggattatgcaaggagcagaatccgcgtttttttcttgactaatacgcaaagaacaaacctgaaagactagtaggagctttgcaagtttgttctttattgaagtcggacagactaacaattattttttgcttttatgtctgttctttcttagtctttttttacgtttgtgagtagacattttatgtctttttcttttctttccgcttggcatagcttcaaaattttatagggttaatactagtgttaatttatttttttactgacaat

SEQ ID NO: 1131 - DNA, 24530 bp, synthetic construct
  source 1..24530: mol_type = other DNA
  misc_feature 1..24530: note = Synthetic
agaaatggggatatgaactggcggaacgtgaattcggagatgccattgcgtcaggcaagttggtgataaaagactgcatagccgatgcattcttgcagaatacgttattgattcccgaagaatattcggtggtggctaccttgaatttgaacggagattacatctcggatcagttggctgccatggtaggcggcatcggaattgctcccggagcgaacatcaattacaataccggtcatgccatttttgaagcgactcacggtacggctcccaatattgccggaaaggatgtggtgaatccttgttcattaatcctctcggctgtcatgatgttggaacattttggctggaataaggcggcggagctgatagtgaatgccttggaatccagttttggcgagggacgtgccacacatgaccttgctcgttttatgcccggaggtgtctcgcttggcacgtcggcatttacaaaagaaataatagaaagaataaactcctaaaaactcacggatatgaagaaagaatatatcatttacaaactctccgaggaaatgaagaatgcgacccggattgagaacgaattgttcaagaagtttgatgtaaagcgcggattgcgtaacgaagatggcaccggtgttttggtagggttgaccaagataggcaatgtagtagggtatgaacgtattcccggcggaggattgaagccgattcccggcaaacttttctatcgtgggtatgatttggaagatttggcacatagtatcattaaggagaaacgttttggttttgaggaggtggcttatctgttattgtccggtcatttgcctgacaaggaagagttggcgtctttctgtgagttgattaatgacaatactccgttggaacagaagaccaaaatgaatatcattgagttggagggaaataacattatgaacattctggcccgtagcgtgcttgaaatgtaccgttttgacccgcaggcggatgatacttcgcgtgataacctgatgcgtcagagtattgacttgatatccaagttcccgaccattattgcatacgcttataacatgttgcgccatgccacgtatggtcgttcgttgcatatccgtcatccgcgtgaaaaactgtctatcgcagaaaacttcctgtatatgttgaaaaaggattatacggaacttgatgcgcgcacgcttgatttgctgttggtacttcaggctgaacacggaggtggtaataactctacttttaccgtccgtgtagtttcgtccagccgtacggatacttattcggccatagccgcaggtatcggctcgttgaaaggtccgcttcatggaggggcaaatatccaagtggcggatatgttccatcatttgcaggaaaatatcaaggattggaccaatgtggacgaaattgatacttactttacccgtatgttgaataaggaagcgtatgataagtccggtctgatttatggtatcggccatgcggtctatacgatatccgatcctcgggccatcttgttgaaagaattggctcgtgatttggcaaaagaaaaaggtaaggaagaagaatttgccttcctggaattgttggaggaacgtgccattgctatgttcggaaagattaagaataacggcaagacggtgtccagcaatatcgatttctattcaggtttcgtatatgaaatgattggtctgccacaggaaatatttacacctttgtttgcgatggctcgtatcgtggggtggtgcgcacaccgcaatgaggagctgaattttgaaggaaaacgcattattcgtccggcatacaagaatgtgttggaagaactggaatatgtgcctttgaagcagaggtaattggcaagcacggataacatgggtttacacggatttttctgtgaaattcatgttatccgtgtctgaagaataatatcatcgatggttttactgtcactttctcgcattttatagtctttttccacaaaaactatctaaaatatttctcctctctcgaattttctttaaatttgttagtgactaactaaatctaataaaaggaggaccgagtatggaacaacagacttttgacttattacttctgacaatgtctgcattagcggttgttgtttttgcagccctttattatgtacgtgccggctatggtatgttccaaacttccaaatggggaatttcgttaaacaataaactaggttggatattgatggaagcgccggtgtttttcgtcatgctctatttatggtggaatagcagtgtgcgttgtagcgctgtgcctcttgtctttttcctactctttgaactgcattatttccagcgtgcctttatattccctttcttgatgaaaggaaagagccggatgcctattgccattatgttgatgggagtggtattcaatgtgttgaatggttttatgcagggcgagtggcttttctatcttgctcccgaaggactttattcggatgcatggcttaatacttcttctttttgggcaggactggttctgttttttgcaggtatgggaattaatattcattcggacagtgtgatccgtcatttacgtaaaccgggcgatactcgtcattatttgccacagaaaggaatgtatcggtatgtcacgtcaggtaattatttcggagaattattggaatgggtaggttttgccgtactgacttgctcaccggctgcttgggtatttgttctgtggacatttgctaatttggctccgcgtgccaattcgattcgcaatcgttatcgagaagagtttggagcacaggctgtgggtggcagaaaacgaatgattccttttgtttattaaccgattagactataaaattataaaagtcatgatagattctaaactatttactccggcatccatcgggccgcttactttgagaaatcgtacgattcgttcggcggcttttgaaagcatgtgtccgggcaatgtaccttcacaacagttattggactatcatcgttcggtagcggccgggggagtaggaatgactacaatcgcttatgctgctgtagctcaaagcggtttgtcttttgaccgacagctgtggatgcgccctgagatagtgccggggttgaaagacataaccgatgccatccataaggagggtgcggcagccggtattcagttgggacattgcggaaacatgtctcataaaagtatttgtggggtaactcccgtaggagcttcttccggtttcaatctttattctcctacatttgtacgcggtttgcgtaaggacgaacttccggcgatggcaaaagcttatggtcgttctgtcaatttagcacgtgaggccggctttgatgcagtggaaattcatgccggacatggatatctcatcagtcagtttctctctccttataccaatcaccgtaaagacgagtatggcggttcgttggagaatcgtatgcgttttatggatatggtaatggaagaggtgatgcaggctgcaggtagcgatatggcagtattggtgaaaatgaatatgcgtgatggctttaagggaggtatggaaatagacgagaccatgcaggtagccaagcggttggtgcaagatggtgcacaggcgttggtcttgagtggaggttttgtaagtaaagctccaatgtatgtcatgcgcggtgaaatgcctatcaaaacgatgactcactatatgaattgctggtggctgaaatatggagtaagaatggcaggcaaatggatgattccggccgtacctttcaaagaggcctatttcttggaagatgctctgaaattcagaaccgaaataaaggatattccgttagtatatgtcggtgggttggtttcgcgtgaaaagattgatgaggtattgaatcatggttttgaatttgtgcagatggcgcgtgctttgcttaatgaacccggttttgtcaatcgtatgcgtgaagaagaaaaagcgcggtgtaactgtaagcatagtaactattgtatagcacgaatgtacactattgaaatggcttgccaccagcacttgcgggaagagctgccggcaagtttgaaaaaagaaattgaaaaattggagaagaaataagtgtttatatataaaagcaagagtggaaaaatgagtaaattagctgttataaccggtgccgacggaggaatgggaaaggaaataactcgtgccgtagccgaggcagggtatcatgtcattatgttgtgttatactctttttaaaggagaagaacgtaagaatcagatgatattggaaacaggaaacaaggagatagaagtacgtcaggtcgatctgtcttctatggcgtctgttatcaatgttgcagacggactgttggggcgtggaaaacatattgaccttttgatgaataatgccggaacaatgagtactcatttgatgcagactgaagacgggctggaaagaacagtggcggtgaattatgttgctccttttcttttgactatgagattattgcctttgatgggaaaaggaagccgtattgtcaatatggtttcgtgtacttattcacttgggcatatcacgtccgattttttttcccacggaaagtcaggtagcttttggcgtattcctatttatagcaataccaagttggctttgtggctgtttacgcgtgaactgtcggaaagggtgaaagacagcggaattacagtcaatgccgccgatccgggaattgtttctaccaatatcatccgtatggatatgtggtttgataaactgacagattggttttttcgtccttgcatccgtactcctaaagaaggtgcggcaacagctattcacttattgcttgatgaagaagtgtcggaggtgaccggacaaatgtttgcttcttgcaaaccgaaaaaagtaaaagataaatttatgaatcatccgcaggccaaacaactttgggaggacacggagaaatatatagagcagcttcgtttggaagagtcaattatataaatctccgagttgggggattgcaacaactatggttagtgcctgtctttttgaaccgtttgttcagccagcatctgttcgcggctcttactttgagtgacgatgtacactcctaagaataccaatacgacggccagtccttttgccggtccgaaagtacccatgcccaataaaatagagacagaagtaccgacaatcggttgtacatagttatacatactgataacggtcgggcgcaatgtcttttgtcctatcatcattaaaatataggcaaagaatgtgcctcccaagataacaaaaaggacgcagccccacgtggtggtggatatctcgttaaattgaatagccgaaacttcgtgataggagaatggaataaagcagatggcggcatatgtgaacatccatttcattaatgtgaagatattatatctgctgattaatcctttaaagatagccagataaaaagaaaaacttatctgagcagccaagcacaacaagtctcccggaatgcttccggccttatcatctgtggaaccttgactactcataatcaaagttaaagccccaatggagcctaagaagatgccgattactttctttccggttaccggttccttcaaataaatggctgcaacaatcatggttgcaatcggtgcggtggttgttacgatggaagcatcgatgggagaggtcagtgataacccgaacgtaaaacaaccttgattaaatacgatacccaatagtccggcaaagaacaacatcatcaagtcatgaggctttacttgttctttgggtgcgaaaatagatgcaatccaaaaacagactgctcctcccgtcattcgaaaagttgccagtgaaagtcctgaaattccgttctctaaagctgttttgccgataggagacattaatccccacattatggcagcgcccagcaatgccaaatgtcctttatacttctgaatagccatatcttttttaccttaaataacagtacaaatgtaggtgtttctttttatattttctatctttgctttatagtaaatttatataaaatgaaaaagcaggctgattatattaagcgtatcgagataaagcggctgtggggacgtaaagatatctcgtgggaacttcgccctgatgttaatattctgagtggggtgaatggaataggtaaaagtactattctgaacaggtctgtaaatagtttgagtgctttggaagggggggctttaagtaatggctctgcaccgggggtacattttgttttttctcctgaagatgctacgcaaattcattttgatgttatcagaagttttgaccgaccattgattcattccgagttgcttgaaaaaatggcggataagaatgtgaagacagagctggactggcagctttatcaattgcagcgccgttatttggattatcaggtgaatatcggtaatcgtattatcgagtgtcttacttccggtaatcccgaagaccagatgcgtgctgcccaaatgtcttatcctaagaagaaattccaggatttaatggatgatcttttcggagaaacgggaaagaagattattcgtcagagcaatgagattttgtttgaacaagacggtgatactttatacccttaccaactttcttcgggtgaaaaacagatattggttattttgcttactgtcttggtacaggacaagaggcatggagtgctgtttatggatgagcctgagatttctcttcatgtggagtggcaacaacgtcttatttcattaattcgtgaattgaatccgaatgtacagattgtactcacgactcattcgccggctttggtcatggatggatggcttgatgccgttaccgaagtgagtgatataacacaatgaatttaactaaacgacacggctatgggaaagagattatccgacaacctttcttctttatatatcggtgcggcgaataggttaaagcccaaaaaggcaagacgaaaaattgtggcttatgttgaaagttacgacgatgtctctttttggcgtaccctattgggagagtttgaagatgatactcgttattttgaagtaatgctcccttccaagaccactttggcgaaaggcaagaaatctgtattaatgaatgaactgggttcacagttggggcagaatatgattgcctgtgtagacagtgattatgattatttacttcagggtgctacccatacttcccgctatattatcaataataagtatgtttttcatacgtatgcatacgccatcgaaaactatcaatgttattcgggagctttgcatgaagtgtgtgtcatggctactttgaatgaccatccgttggtagattttgttgcctttatgaagatgtattcacagattgcctatccgctttttatttggtcggtgtggttttatcggaaacacatattatccgagttttcattgcttgatttttgttcgtttgtcaagttggatcaggtaagtgtttaccggcccgagcgcagtttggaaaatatgagccgtcgtgtaaggcggaaattgcaggagttggagcatcgtcatcccaaagcgataggagagatagaggcaatgaaagaggagttcgctcaattgggagtatatccggataatacttatatgtttattcaggggcatcatattatggatagtgtagtgatgaaactgttgacgcctgtttgtaatgttcttcgtcgtgagcgtgaggcggaaattaaagaacttgcagagcacgatatgcagttccataatgagctgacaagctatcagcgtcgtcagctaggagttgatatagtactccgcaagcatactagttataaagaatctccgctttataaaaggttggaaagtgatatcagacgctttttaaagcatattgattaatacttatctgttggttttcgatatagctttagcgataaagtgatcgatagaatactttccgggcccggctatgtacatcagaacaaataccacaagatagataaatgccagttctttgacagagaacgggtcattgccgtgaattacaaaaaatgccatgcccattgtgaaaatcataggaatcatagcaagacggtaaaggaatccgaagataaaagccagtgaacaggtcagttcgccaaaaatggccaaaatgagagacatttggcttcctactcccaaaggatccgggaaactttcactcatggcatcgaagtttgcccatttttgtactccgtgagacattaataatacaccgaataaaatgcgtaatgccaataatagtaatgacatggctgtgctgtccggttttgagggaaataagaatttataaataacagacataaattaggcttttaaagtttatactatttatctataaaaacgtaaaaaacgaataattgttcattttattcttcggctgtctctttagggatggttatttcattgccgtctcttgtggcaatatagtgaggagacataatctcaatgcctgccttattgaagtaatcctgtatgttttggtgtagaacagaataaatggcggccattttgtctgcatcttttatataggcattaacctgataaaccggataccaatcacttaatgatgtttccagtacaaatgattccggatcggcctgtattcccggagtggccaaagcagcatcaataagtaactgatgtactttcctccaaggtgcatcatagccgatggttacttccgaatgaatgattagtccgtatgttcttgccgatttcggtgtacggattcgggttacgaaagccgtttttttcaccacatttcctgttgtctcgttcaacttgatacggtctcccagtttgaaggccttatataagtagtgataaagccttcaatgatattaccgatgacagtactcgaaccgagtgagataatcagaccgacaaatacggaaatcccttggaacacaccggaatcagcccccggcaggtatggataaatcatgactatcataaaagcgtagagcaagaaccgtattatggaaagtcggcatggtccagtcggagtagaaaccgtttattttcagtctctcagagtcaatctccgttgccagataacgcaaaccttttatcacatacctgatggttctttgatgaaatgttttcactatatctgctgtttgtatatatttccgtcctaatcaatcaagcaatggaatcagttcctctgctttttcgatgatgtgtgcgggatgaagagcttcaagttctgttcgcggtctgaatccccaagccactcccacggcagtgactccggcattgtgtgccgtttgcatatcgacattggaatctcctacatacagcacttcttctttggtgactccggctgtggcaatgatatcatttacaatagaagggtccggcttggcaggtattccttccctttgtcccaatacttccacaaaatttatttcggggaaatagtgtgcaatcagtttccgtgtagcagcttgatatttgttggacgccacagctatttttcttccgtctttttgtaaagccagcaatagtgctgctatacccggatagggacgactaaaatccgcgttgtgtttatcgtaataagggacaaactgagaacggatttttgaaatattttcttcgcttctttcgttctcgggcaatgctcgttcaaacagtttgttgattccgtttcctacaaagaaacggtaggcatccgtgtcatgaatgggatagccatagtactgtaaagcttggttggtagcggcagccaaatcagctattgtattcagcaatgtgccgtctaaatcaaatatcacaagtttcttcatatttgtatttcttttaaaggataaatataaaaagcccccgttaaaggacgagggcagcctaaatgttttcacaacggaataatccttattgtgatttgcttcaaattagtattgcaaaactatgaaataaatatgtaaagaacaagtgattatcagaataatttgataactttgaaaagttttgataaaaatattgggttatgaaaaatatactaggacttgatttgggtaccaatagcataggttgggcagtagtaaatggaagtgtcaatgacaatggaagtgaacaattggttaaaatacaagcttctggaagtcgtatcatacctatggacgcagctatgataggagattttaataaaggtaattctatatctcaaactgccgaaagaaccagattgcgtggaattcgtcgtttaagcgaacgatatctgcttcgtagagaacggttgcatagaattcttgatattttaggatttttgccttctcattttgctcaagatttagataggcatggtaaaatagttaagggtaaggaacctaaattggcttggcgtaagaatgaagcaggtcagtttgaatttatattccaagattcatttaaggaaatgctggaggattttaagctaaatcatccgaatctgataacagatgataaaaaagtaccttatgattggactatctactatctccgtaaaaagggattgacttctaaaatttcaaaagaagaattggcgtggatattattgaattttaatcaaaagcgtggatattatcaattacgtggtgaggaagagaaaaaaaatgataatgttatgattattaattcaaaagtgattgatgttgttaaggcagagaaagataagaaatatgaaaaatattggtataatgcactattggagaatggtttattgtatcgagctgcattttataatgatatttctttttggaaaggacatactaaggaatttgttttaaaaactattaaattaaagagtgggggtacaaaacaggaattatcttttttaccatcttttgatgaaatagaaaagatggagaaaaagcaaaaagataaaatgtacttcaaaataaaattgaaaacagaagcggatattgatcagactcataagactgtaggtacctatatttatgatacgcttttaggaaatcctagtcagaaaattcgtggaagattggtgagaaccattgagcgtaaatattataaggaagaattgaaactgattttggataaacagaaggaattccatccggaattgcaagatagagcattgtatgctgcttgtgttgaagaactatatacaataaatgaagcacatcggaataatattggtaatcgggattttacttatttgtttttagaggatatactcttttatcagcgtcctcttaaaagcaaaaaatcattaatagacaattgcccttatgaggagaatcattgccttgataaggaaacaggagagataaaatcttttcctgtaaaatgtattgctaaatcacatccgttatttcaagaatttcgtttgtggcaatttatagtaaatctgcgtatttataggaaaggcttggcacaagatgtggatgttacaaatgagttattgaagactgaagaagattatgttgctttatttgactggttgaatggtaaaaaagaaattgatcaaaaggcttttctgaaatatccgctttttggactgaaaaaagaggtagagaattatcgttggaattatgtacaagataaaccttatccatgtaatgaaacccgttcatcgatgttggcgcgtctggagaaatgtgatatttctattgaattcctgacaaaagagaatgaggaagctttatggcatatattatattcggttgaagataagaatgaaatagtaaaagctttgcagaaatttgcggataaacacgacctgaatgcttcttttgttgatgtattccggaaattcccaccttttaaaaaagaatatggttcctattcggcaaaagcaattaaaaaattattgcctttaatgcgtatgggaaaatattggagtgagaattcaatagataaaggaacgcgtgaacggattgataagataataacaggagaatatgatgagaaaatagaaaatagagtaagggagaaagcaattcatcttgctgatgtttctgatttcagaggtttgcctctttggttagtgtgttacattgtttatggtcgtcactctgaagcaaaagaaataacccagtggaaatctcctgctgatattgattcgtatttaaaatcttttaagcaacattcattgcgtaatccaattgttgagcagattattattgaaacactacgtgttgttcgtgatatttggaaacaagtgggaaatattgatgagatacatgtggagttggggcgtgagatgaagaatccggctgacaagcggaagaaaatgacacagcaaatatctgaaaatgagaataccaacttgcgtatcaagtatttgctcacagaatttttgaatcctgaatatgaggttgaaaatgttcgtccttattcgccaagtcagcaggatattttgcgtatttatgaagagggtgttttaaatagtgtctccgatttaccggaggaaatatcggatatattgaaaaagtttacagaaacagacttgaagaagcgtccttcaaggtcagaagttttgcgttacaagctttggctggaacagaagtatcgttctccttataccggtgaagtgattccattaggtaaattgtttacgtctgcatacgaaatagagcatgtcattcctcaatcatgttattttgatgattcttttagtaacaaggtgatttgtgaagcggaagtcaataagcttaaaagcaatttattgggacatgagtttatagtgaagcatcatggggagatagtagaacttccttttggaaaaaaagtaaggatcttcactgtggatgaatatgagcaatttgtgaaagataactattcgcgtactcgtggtaaaatgaaaaaacttttgatggatgatattccggaggagtttgttactcgtcagctgaatgatagtaggtacatcagcaaagttgtaaagcctcttctttccaacatcgttagagaaaaaggagaggaagaagcaatttcaaagaatgtaattccttgtaccggaggagttacggatcgtttgaagaaagattggggaataaatgaggtttggaataagattatacttcctcgttttcaacgactcaatgagttgaccggcacaaataaatttacaactaaaaatgttgggattcaagaaattccgacaatgcctttggaattgcaaaaaggttttaataagaaaagaatagatcatcgtcatcatgcaatggatgccataataatagcgtgtgcaaataggaatattattaattatttaaataatgagtcggcaacagctaaggctgaattatcccgatatgatttgcagaaactgctgtgtgataaagctaagactgataataacggtaactataaatgggtgatcagaaaaccgtgggcatcgtttacacaggatacatatttggctttggaaaatataatagtcagttttaagcaaaatttgcgtgttataaataaagctaccaatcgcttcttgcattataatgaagaaggcaaaaagatctttgtgaaacagggaaaaggggacaactgggctatacgtaaatccatgcataaagatacggtatttggagaagttaatttgcgtaggataaagactgtagctttaaatgaagcgatgaaaaatcctcaaagcatcgttgtgaaagacttcaagagaaaattattggaactttggaatttaggatttgacgcgaagagaataaagaagtactttgaagataatagagaaacttggagtgatataaatctgtctaaaatagaggtttactattttagtaaagatactaaagatcgattctttgctactagaaaaccgctggatactagttttgatagaaagaaaatagaaaataatattactgatacgggtatccaaaaaatattgttacgtcatttggaactgaaagataataatccggatattgctttttcgccggatggtattgatgaaatgaatcgtaatattattcagctgaataatggaaagtatcatcagcctatcattaaagttcgttggtatgaacaggctgataagtttgcagtaggtcaaacaggtaataaatcttctaaatttgtagaggctgcgaaaggaacaaatttattttttgctgtatacgagtcgaatattttagataaaaagacgaatactataataaagaaaagaaattatgctaccattccactgaatgttgcaattgaacggcaaaaacaaggtttacctgttgcaccggaagatgagaatggtaatgaccctatttttgtattgtcacctaatgatttggtttatcttcctactgatgatgaattagctaatggtattattgcccagcctttggataggggaaggatttataagatggtaagttgtacgggaaatgaaggacattttatacctgcgagaatagcgaatcctattttacaaacaatagaattaggtagtaataataaggcgcaaaaggcatggacagatgaaatgataaaagaaatatgtatgcctataaaagttgatcgtttaggaaatgtcttagaatcaagtagttcatataaaaaataatatattcttattttatggaagaaaacaaaggacaaattcttttatatcaaacggtagatggtgagtcaagaattgaagtaacactatgcaatgatactgtttggctgacattagatcaaatggcagcattatttcaacggaacaaatcaacgatttcacgccatataaagaatgtttttgagagtggggaattacaggaaaattcagttgttgcattttttgcaacaactgcttctgatggtaaaatatatcaagtggcttattataatttggatatgattataagcataggctatcgggttaaatcttaccgtggtgtgcagtttcgaatatgggcaacacaaatactaaaagagtatttagtaaagggatttgtaatgaacgatgagctgttgaagcgtgcaggtggtggaaattattttgatgagttattatcacgcatacgtgatattcgttcctcagaaaagatattctatcgtaaaattcttgaaatttatgctttgagcatagattatgacccaagtactgagtctactcgattgttttttgccacggttcaaaataaaatgcatttttcagtacatggacatacggctgctgaggttatttacggtcgtgcagatgcagggaaagattttatgggattaactaattggacaggagcagttccaaagcggaatgatatagaatatgctaagaattatttgacagatgatgagttggatacattaaatcgtattgtaagtttgtatcttgactttgcagaattgcaggctaaaagtcatactcctatgtatatgaaagattggattcaaaaattggatgattttcttagactgtcaggaaaagaattgttacaacatgctggtactatttcggctgaattagcaaagaaaaaagcaaatcttgaatatgatgaatttaagaaacgcattagtaatcagttatctcctgtagaaatagatttcattgaaaatttcgaaaaagagcagaagaaattgcgaggtaagtaatatattaacctttaaaatatgatactatgataaagaaaacactttattttggtaatccggcttatttgtcattacgaaataaccaattagtaataaaacttccggaagttgagaaaagtgattcattgccggatatctttaaagaacaatcggaagtaacgaagccgattgaagatataggtgtcgtagtactagatcataagcaaattactattacttccggtgtattagaatctctattagagaataattgtgccgttattacttgtgatagtaaaagtatgccagtgggtttaatgctccctttgtatggaaatacaactcagaatgagcgtttccgtcaacagttggatgcatcattgccattgaaaaagcaactttggcagcaaacaattaaggcaaaaatagataatcaagcatctgtattgagagtttgtgtaggtgaagaaatgaaatgtatgcgaatttgggcgaatgaagtgaagagtggtgatccagagaatttagaagcacgtgcggctgcttttttttggaaaaatttatttgcagatattattggcttcactcgtgacagagaagggatttctcctaataatttattgaattatggttatgctatacttcgtgctatcgtagctcgtgctttagtggcaagtgggttgcttcctaccttagggatccatcatcataatcgttataatgcatattgtttagctgacgatgtgatggagccatatcgaccttatgttgatgaattagtatttggtttagtgaaattgtatggtgcaaatttggaattaacaaaagaaataaaatcacgtttgcttgttattcctacattggatgtacgtattaacggtaaacgtagtccgttgatggtggctgtcgctcagactacagcttctctatataaatgtttttgtggagaaattcgtcgtattagttatcctgaacgataatggaccgttttagtgaatatcggattatgtgggtactagtattatttgatttgccaacggaaactaagaaggacaagaaagcttatactgattttagaaaaaatctacaaaaggatggctttacaatgtttcagttttcaatttacgtccgtcattgtgctagtagcgagaatgcaactgttcatataaatagagttaaatcttttttgcctgaatatggacaagtgggaataatgtgtatcactgataaacaatttgctgctattgaacttttttatggaaagaaactacaaggtgtaactactccaggacagcaattggaattattttaaaaataagaaatcccgtctgaaacgggatttcttattagaaaacaactttgtttttaatttctgaatatatgtgtaactaattggtaattagcttgtaacatatattcagctgttttcaatggttcaaagatactaatttgaaagcaaatcacaactaacagactatactcgtattgcagcgtaatgctgttttcaatggttcaaagatactaatttgaaagcaaatcacaaccattggtaagatgtactactcgcaaagatagctgttttcaatggttcaaagatactaatttgaaagcaaatcacaacgagttggacgttcggtcgttcagatatacagctgttttcaatggttcaaagatactaatttgaaagcaaatcacaactgcttgttttccatcttaatgccttttttagctgttttcaatggttcaaagatactaatttgaaagcaaatcacaactggtcttgatcggccacttgttgtagttctgctgttttcaatggttcaaagatactaatttgaaagcaaatcacaactggcttcttcatgtgccttgccgatatagtgctgttttcaatggttcaaagatactaatttgaaagcaaatcacaacaaacgccccggcaccatcttttgcctccgcgctgttttcaatggttcaaagatactaatttgaaagcaaatcacaatagtaatttgataataataggattgaaaattacaaaatgagaatataaatagttcgtaagcaattgataaatgatactcattgcaaaaagcttgggatatattagcaaagttagtatttttgtctgcaaactaataataatgcttatgaactttctagaattagtaaaagcgcgctattctgcccgcaaatatgccggtcgttcggttgagatagaaaaattggagtatatcatggagtgtgtacgcttggctccctcggcagttaatttccaaccgtggcggtttaaaatagtcacagatgaacctacattaaaggcgttgcagcaatgctataagcgtgagtggcttgccacagctccctgtatcattgtggcttgcacaaaccatgaagagtcttggcatcgtcgtgccgacaataaagatcatgcagatattgatatagctattgcggtggaacatctctgtctggctgctaccgagcagggtttgggtacttgctgggtttgtaatttcgatgcttctcagtgcagcactgttttgggattgcccgaatatatagagccggctgtgttgattcctgtaggatacgctgaagacgaacctgttgaaaaaaaacgcaagatgctgaatgaaattcttttttaaggatttcgtaatgtcattgggcagattcaatctgcccttacagcagaccaaagtgctgttttttcctgagttgatggctgttttaggtttttggaacgctttctttcttcgtgtatcttcttcttttctactaattttgcatatttttcaacccctttattataaaaataaaaccgaaatgcctaaatttgagcactttttaggctttgaataacctataagtgcagtaagtactattaataacactagatttatggagaacataggagtcggattgatgctgatggtagttggaatggctactgtctttgtcatactactcattgttatctatctgagcaagtacctcattactattgtcaacaaggtagctcccgaagaagctcccaggaaagtgcctactgtagctcctacaaccgatgcaggagctatggatgctattaaggcggcagtagagattttgacagcaggtaaaggtcaggtgataaaaattgagaagctataatccaaaagaaaaacacatttaaggaaaatggaaagagaagtgaaatttagtctggtcttccgcgatatgtggcagagcgcaggcaagtatgtgccccgcgtagaccagttggtaaaagttgccccggccattattgaaatgggttgttttgcacgtgtagaaacaaatggcggtggttttgaacaggtaaatttattgtttggcgagaatccgaataaagcagtgcgcgagtggaccaaacccttccacgaggcaggtattcagacacacatgttggaccgtgctttgaatggtcttcgaatgagtcccgttccggcagatgtccgcaagttattctataaagtaaaacacgcgcaaggaacagatattacccgtactttttgcggtttgaatgatgttcgcaatattatcccctctatcggttatgcccatgatgccggcatgatttcacaatgctccctatgcatcactttttctccggtacataccgtggaatattatgtaaacatggcccaacagcttatcgaggccggagcggatgaaatctgtatcaaggatatggcaggtatcggacgtcctgtttcactgggtaaaatagtagcaggaataaagaaaataaaaaatatccccatccaatatcactctcacgcaggacccggtttcaacatggcttctatattggaagtatgtcaggcgggttgcgactatatcgatgttggcatggagccgttgtcatggggcacgggacatgccgatcttatcagtgtgcaggccatgctgaaggatgccggtttcaaagtgcccgaaatcaatatggaggcgtacatgaaagtgcgttctcttattcaggaatttatggatgacttcctcggactatatatcagcccgaagaaccgtctgatgaactccttgctgattgctccgggacttccgggaggtatgatgggaagcttgatggccgatctcgaaacaaatcttgaatcgatcaacaagtataaggcgaaacgcaatttgccgtttatgactcaggacgagttattgataaaactcttcaatgaagtggcttatgtatggccacgtgtcggttatcctcctttggtgactccgttcagccagtatgtgaaaaaccttgccatgatgaacgtaatggccatggaaaagggtaaagaacgctggggcatgattgccgatgatatttgggatatgattttgggcaaagccggccgtctgccgggcaaattggctcctgaaattatagaaaaggcagaacgcgaaggtcgtaagttctttgatggtaatccacaggataattatcccgaccaattggataaatatcgtaagatgatgctcgaaaagcaatgggataagggtcaggacgatgaagaactctttgaatatgccatgcatccggctcagtatgaggcttataagagtggaaaggcaaaggaagacttcttggcggatgtgaagaaacgccgggaagaaaaagccaatgcaacggctcctgtcgaagcagagaacaaaacaaaggtattgacggtagatgtaaacggtcaaccttatcgtgtcacagtagcttacggtgtcgtagaccctgctaccctcaatgctgctgcaggaggtactccggcggctcaaactgttgctccggtgggcgaaggaaaagatatcctttctccgttggaaggaaaattcttcttggtaaagaatgcacaggaaaccccgaagaaggtaggtgataaagtggcaaaaggcgaagttatctgttatgtagaggctatgaagacatataatgcgattcgtgccgaatatgacggaaccatcactgccatttgtgtaaattcgggtgattctgtgtcggaagatgacgtattaatgaagatattataatggaagatatatttgcaagactatatgaaatgactgctttcagcaatattattgccgaaccgcagttcctgataatgtatgccattgcgttcatcttgctttatctgggtattaagaaaaagtatgagccgttattgctgattccgattgctttcggagtattgctggccaacttccccggaggtgaaatgggcgtagtccaagccgatgaaaacggcatggtaatggtgaatggcgtgatgaagaatatttgggagatgccgttgcatgaaattgctcatgatctcggtttgatgaacttcatctactatatgttgataaagacaggcttcctgcctcctattatttttatgggtgtgggtgctctgacggattttggtccgatgcttcgtaacctgcggctctctattttcggtgcagctgcacagttgggcattttcaccgtattgctggtagccattttgatgggctttacaccgaaggaagctgcttcactgggtattatcggtggtgctgacggtccgacagctatctttaccaccatcaagctggctcctcatctgttaggtcccattgccattgcagcttattcttatatggctttggttccggttatcattcctttggtggtcaaactgtggtgtaccaagaaggaattgagtatcaatatgaaagagcaagaaaagaaatatccttcaaagacagaaatcaaaaacctgcgtgtgctgaagattcttttcccgattgtcgttactacagtcgtggccttgttcgtaccgagtgcagtgcctttgattggtatgctgatgtttggtaatttggtgaaagagattggcagcgatacctcgcgtttgttcgatgcggcatcaaacagcatcatgaatgccgccaccatttttctgggactttcggtgggcgctactatgactaccgaagcattcctcaactggacaaccatcggcatcgtgattggcggtttcctggcatttgccctgtctatttccggtggtattctttttgtgaagatattcaatctgtttaccaagaaaaagataaatccgttgattggtgcatgtggcctgagtgctgtgccgatggcaagccgtgtggccaatgaaatagcattgaagtatgacccgaagaatcatgtacttcagtattgtatggctagtaatatctctggagtaatcggttcggcagtagctgccggtgtattgatttcgttcttgggataagcggtatatatagaaatataaagatacggatgtgtagagaatatcggttctttaggggtaaaagaacaatgaagtctgcataatccgtatcttttttgtatattcactattttaaaacatttggaggcgaaaaactgttttaaaactgcattctttttgcatttgtgtgcaaaaatgaggcataattcatttattgtttgtatctttgcaaactaatttaacactaatataggtatgagttacaatttgttgaaaggaaaaagaggtattatttttggtgcattaaatgaacagtccattgcatggaaagtagcagaaaaagctgttgaggaaggtgctgtcattacattatccaatactccggtggcagttcgtatgggtgaagtttcggctttggcggacaagctgcattgcgaagtgattcctgctgatgctacgagtgtagaagatttggaaaatgtattcaagcgttcaatggaagtgctgggtggcaagatagattttgttttgcattctatcggtatgtctcccaatgttcgtaaaaaacgtacttacgatgacctcgattatgatatgctgggcaagactttagatatttctgccatatcattccacaaaatgattcaggcagccaagaaactggatgctattgcagaatacggttctatcttggctttgagctacgtagctgcacagcgtacattctacggatacaatgacatggctgatgcaaaagcattattggaatctattgcacgcagcttcggatatatctacggacgtgaacatcatgtgcgtgtgaacactatttctcagtcaccgaccatgaccactgccggttcgggcgtgaaaggcatggacaaactgttcgattttgccaatcgtatgtctccgctgggcaatgcttctgccgatgaatgcgcggattattgtatcgtaatgttctccgacctcacccgcaaagtgaccatgcagaaccttttccacgacggaggtttctccagtgtgggtatgagccttcgtgccatggcaacttacgaaaagggattggatgaatataaagacgaaaacggaaatatcatttacggataatcaccgatgatacgcaaaattatattcatattagtatgtctcgttgctctttcttcttgccattggaacggaggaaagagtagcgattctgccgaattgaatataaaagtagcccgttatgaccgtttgttgtttgagtatgtgactatgaacaacctttcggcactgcaaaagatgaatactgattttccgcaagccaccaagctcctgatagaagatgtgctggccattggcgaagtggatgacaataagataaacgaccgtctgatggagtattatgccgataccactttattggtattgatacaggatgccgaagaaaaattcaaggatatgggctggatagagaagaaactcaccaaaggcttcaagcagttgaagaaagaagttccctctttgcccgttcctcatttctatgcccaactttctgctctcaaccagtcggtagtggtaggagacagtatcgtagggttcagcatagataaatatatgggggccgactatcccctctataaacgtttttactacgattaccaatgccgcagcatggagcccgaccgcattgttccggattgtttcaccttttatttattgagtgaatatcccatgccttggggacccggacgtaccttgctcgatatgatcttgcacaggggaaaaatcaattgggtagtagcccgtatattgggttatgaatcatttgagaaagagatgggatatgacgagaaagaggcggaatggtgcaagaagaacaaatcagccttatggcaaggtatgctggacaacggacatctggatgctaccgatccgttgattgtacgcagctatattcgtaaagatccctttataccgattatgacaggtgagcgaaccccggcaagtatcggtgtatggatgggcattttgctgatagacgaatatatgaagactcatgacgacgtaaccataaatgatttattgaacgataccgattatcgccgcatattgagtgaagttgatttcaagccctgataagaacagaattatggaaacagcattatacctgttgcccgttaccttgggcgacactcccgttgagaacgtattaccggtatacaacaaggaaataatccttggtatcaagcattttatagttgaggatgtgcgttctgcccgtcgttttctgaagaaagtggagcgtagcattgatattgattcacttacattctatccattaaacaagcatacttcacccgaagacatttccggctatttgaaaccgttaatgtcgggcgagtctatgggagttatttctgaagccggctgtcctgccgttgccgacccgggggccgatgtggtagccattgcccagcgcaagaatctgaaagtggttccgttggtaggaccttcttccattattatgtctgtcatgggttcgggctttaacggtcagagctttgctttccatggttaccttcctattgaaccgggcgaaagagccaagcgaattaaggtattggaacagcgcgtttactcagaagaccaaacgcagctctttatcgaaactccttaccgaaacaataagatggcggaagatattctgaaaaactgtcgtcctcaaaccaagttgtgcattgctgccaatatcacttgtga

SEQ ID NO: 1132 - DNA, 24527 bp, synthetic construct
  source 1..24527: mol_type = other DNA
  misc_feature 1..24527: note = Synthetic
tatgtcgagagcagaaggctccttgccctgttgtagcgaacggtgcagttccggatcgtgacatccgcgcctctggagatgttctcaagggcgatattcgttgggttctcaattcgtgtcagatcaaaatccatctcgatcagataagctttacgatcagatttgtctatcgacttgataacgcctgaacctatcggacggagattggatttgtccacgaaactgatcttgtctccagcgtcagcgaattgattgccaacctgttggaaatgaccgaaatgcgctcgtaaagtattcaccgacagcaccgagtccacaagcatatatattccgtgaatgttggcggcatcgtccagcatactctctaacaggctgtcctcgatgattatctttccgttgcagctgacaaagtgggtcgcgtcagcggaagtggtcaccatcctcggagaaccttcgtgagccgcagtagagaaacctttcatcgagatattctctgaatattcagctatcagtcccatcccgccactccggtagatgtggacattctctatgtttatattctttgatgacagcactgccatcgccgggaaacgtctgttaagtcctgtaggccctttgtcgtcccagacgcttccaacaggcggaacgtccctcgcactcaggcgggtgaactcgaccacgccgtcgccgaaatccctggctcccatctcgcccgaccaatagccgtggtcgtaggcgcaggtgtcgaagaaaggtctgtgggtctccgggtcgaaaaggatgctctcccccatcggatactcccagtcatagcctccgaagaaaagcctgtcgccttcgatgcggtacttggtgtccgggaagaccttgacagtgaagcttctgctgaccggatcgctggagagaaccgtcccttcgaaagtccaaggatagtcgtaatcgaccgacacacccttgatggtgacattggacgactccttgacggcgaacggcaccatgcacccgtggaacatgaagtcggagccgtcgccttcgatcgtgacattcctcatgtccttgatcaggaaggctatgcgcttgtcaccgctgtcgttgttcgagagcgtcaggaactcccgcgtcccctgctccgggtagaacgggtagacacctttgccgaagagaatcctcacgtttcctttcggattgtcactcaagattttggtcacgacaggcgtgtagtccttgacagtctcgtcaaaagggatctccaccgccttgaccgagcaagaggccatgagaaccagtcccaatgcggccacaaagattttgttaagcttgttcattatgcgtttctgtttgacattcctggatcgacgacagcgccaagtccccgggcaaagtagagcgaatttacaacatctccgagacaatcacaaccattttttgagtttttaatatttattccttcctttacggcaaagatataaatctaattaaatcatccgattatggtaaacaaaacaaagtatgactctcccatcgcggagattttgacgatgagccttgatggagtcatctgcggcagcggtccagacaccgatggtatgactgtcgggaacccgttcggtgacaacaccgaggagatatggtaaggaggacaacgttatgaagagactttcaattatctctgtggcggcaatcgcagcattgctgtctgcatcctgcaacaaatctatcgagactcctgtagtgccagtgcctcagggttcaatcatccttgacctcaacatttccggatttgacggtgccggggacaccaaggcggtgaaggccgactgggcagccggagacaagctcaacctgtggttcgacgactggaactataacgagaaggtcaacaacccgaccccggatcttgtcattacctatgacgggacgaaatggactgccggcgaactcgccgccggacgaagtcttagggcaggcggcaagttctctgtcatgtatgaaggctttaataacctgtccaaatatacgcctgacttcttttcgatttcgcagttcttcaggccgcataaagaattgtatgctgtcggaagagtttatttcatacctttagtttttgaatgtgaaagaatagactatacctatgcggacaataagttgtcagcgaccatatcaggctggaagacacctactgcgctcaaggttttagtcaaaggtcttaatccggcggaggcgaagagctatattctccagacagcggatgtaacgacaccggggacagagatgtatcctgattgtatcggagggatagttgttgatgtttcagattattgtccaacttttagcctgttagtgcgaggtagcagtggctgcatgggcggagttccggatgcggatggagttgctttttattataatagctgcgactttaccaatgctgatatcgagttccggcttttcaagaagaacgcaagcggtaattttgaaggaactgccaaagcaccgaaatttaccggaaagacgctcgtgacggacgacaagaagactatcggtatcgttatcgacaagaacaagttcgagtagtttctggcggcaatgaccgccagactccaagtaggattattcaaacccggcgccacctaccgaaagaaggcgccgggttgtttctttgtgaacttagagattagtcgcgtcctatacgctgagcgatgaaatgaccagctacagcgaggacaagaccgaggatggcgaagagcagcattccccaccagggccagacgagggataatgaatatgccgcgtacgcgatgagagggacggagataatgctggtcacaagtccgggaacatagcctttgagggttacagcgcgcacgaggtttatcagggcgcacactgaatatgccataaagacagtcgtccagacgagttcggcccataaaccgccggcgaacaatgcggcggtcgaaaggagaaccgcaaggaaaccggctcccgcggctatgaggaatgacttcatattcatcccggaaagccggaataggacatccaataaatccggatgcaatatcaccgttatagcacccgataatcctaaaaatcaaatctcataactctgaaacagaaacctttttactatatttaaggtaaatttgataatagaaaatctatggataggttaaaaatgcatacacaggacatggcggatgccaatgccgagacgatcggtaagttgtttccgaaccgcctgacggagagggttgtaggaaaggatatgaatggcaagaatattatcgggaaagaagaataatatagtcacgaaaacactcactaataatatggaatgtctcaactttcattctctgattatcagcaaatgctcaacaagttgttgggcattttgatgcgaaaataatgggacgattccaccaaccgctaaaaatggataaaatgaaagaatatattgacaccagtctaaatgtaactcagcaagaagacatcataatatataatactgatgacggtctttcttccgttgtattgatcagtacggacggaatggtttggctaagtcagatgcagatcgcaaaactttttgccacctctaaacaaaccgtcagttatcatatatccaacatattaaaggagaatgaattgcaaaaaaaagcagttgtcaaagaaattttgacaactgctaccgatggaaagtcatatccggtagaacactattctctggatatggtgctggccatcggataccgcataaaaggggtacgcggaacgcagttcagacaatgggcgaccagaaatctatccgagtatatggtaaaagggtttgtcattgacaccgagcgacttaagaatcctgatggaagacctgactatttcgacgaattgctcgcaaaaattcgtgacatacgcgcatccgagaagagattttaccagaaattgagggatctattcaaattaagcagtgactatgtagctgaagacaagtcaacgcagatgttctttgcagaaacacaaaacaagttgctgtatgccgtaacataccacacggcggcagagattgtgatggaaagggctgatgctcaaaagcagaatatgggactgacttcatggaaagggagcattgtccgcaaacaagatgtcatcatcgcaaagaactacctttccaatgaagaacttgataaattgaacaggttagttacaatctttctggaatctgccgaattacgtgtcaaggaacgaaaagatcttacaattgatttctggagaaaaaatgttgactccatgctatcgtttcagggacaagaggttttatctggaaaaggaagcatttcaaatcagcagatggaaaaacaagttatgcttatttacgataaattcgataaaagacgcaaagcgtttgatgcagcagaagcggacagacaagatatgttggaacttagagaattagaagaaaaaattaaacaccgttagtatttggcggatgtaattcaacttcaagatacaacagtaccagactgacgcggtgaagagcacggtggcggtctttgcggggcagccgtatcaggacggatttctgtaccgcagggatttgtggaataaggacgtcggggctatcacttatgaggatgaccacgccggcttcagaaacgcagtcaggacgtaggcaaggcgtaccgtgcggcaaagagcatccaggattatgttttcaccgacggcatcgctgatgacaacaatgagaaaaagttcgtaaggtcacttgatcaagctacagaggtctgtgtctatcgaaacttccacgtggtttccagatcccgactcctgtcggaaattactcaccggattgggcgatagcgtttaatgagggaacagtgaagcacgttttcttcatcgctgagagcaaaaggggatatgagttctatggagatcaggcctatcgagaaagcaaggatagactgcgccagggctcttttcaacaacttgaacggcgctgatgtcaggtacgattgcgttgatagttacgagaatcttatctcggtgatgccgaaatagtggttgaaagctaccctatacgctgagcgatgaaatgaccagctacagcgaggacaaggccgagaatggcgaagagcagcattccccaccaaggcctgacgagggataatgaatatgccgcgtacgcgatgagagggacggagataatgctggtcacaagtccgggaacatagcctttgagggttacagcgcgcacgaggtttatcagggcgcacactgaatatgccataaagacagtcgtccagacgagttcggcccataaaccgccggcgaacaatgcggcggtcgaaaggagaaccgcaaggaaaccaacaacagcggcaatgactaacgctgacatattcattccggaaaggcggaagaggatattcactaaactttggtgcgcctcatccgaggaagcgctatgatgtgatgcccaccgtctggcggtaaacaccacctctaacgcatggcaaaaggataccgccaggagcgggagaactataaacagtactgaaagcgcactcatcgtctcttactaattacaatcatttgaataaaagcggggtaaactgactgagatagacgcgccagttgcgccagatgtggccgccgtcggactctacgtaggaatattcataaccagcgtcatcgagtttcttgcggaagtcggagttggcctggtagagaaagtcatcctttccgatgccgatccagaaaagtgatggcttggtggcgaaaagtctcgccagtttgccgtcaaagtcctcatagacacgagattccttttccgggaatatggcggcggagaacaggcctatgtacgagaatgtgccgggatattcctttgagatgtggagggaatggaacccgcccattgacagtccggctatcgcgcgtccctcctttttgcggattgtacgatagtgggagtcaacatattcaatgatttcagggaaggaggtttcgtaggtgccgtccattgtcttcggaaggttgaactgtggctggacgaggccgttggaagtctcgcccggggcggcctcctgcgaggcgttgccgttcggcatcaccacgatcatcggcttcgccttgccttgcgcgatgaggttgtcaaggatttgggaggcgcggccgagttccatccacgcctgttcgtccccgcccattccgtgcaaaaggtaaagcacagggtatctggcctttccgttgttttcataacctgccggagtgtagaccgtcatcctgcgcctcattccaagcgaagggctgtcataccagaccttcgacaccgtcccgtgcggcacgtcactgactttgtaaaggtcagcctgccctccgctgacaatgaatatgctcgtgaccgtggccacatcccttatctgatagacattcgacgggtcgttcatacgctggccgttcactatgaaagagtagctgtaaagctccggttcaagaggggcactggtatattcccagacgccgttctgattctgtgtcagttcagcgatgcctgggatttcgaggtcaccgttcggagtgctgattttctgtggcggcagaaagtcgccggtcacctggactcttattacatttgggccggagtacctgaaagtcaccgtgttgtcttcattgatttgaggggacaccacctgcgccccgctccaaagcgcctgctgcgcggaagcgtcctgagccatggcggacgcgagcataaccattgccgccagacaaaacaatttatgaatatgttgtctcataatatgacctaatgtttagaagctgtttacatggtaggttcgacacttcggcagctctgtacaccgcaggctcaccaaccatataacgtcagaatatcaagataaaacacagagcggcgaacgcggctccggcgatcgggccgaggacaggaacccagctgtagttccagccgctgtcacgcttagggctcttgaaaggaagaacggcatgggcgatacgcggggcaagatcccttgccggattgatcgcgtagcctgtcgcacctccaagggacataccgatcgccataatgagcattgtgacagggaatgagccacaggcgccaagtccgacttccgaggtgttgccactcacggagaacataaggatgcagaacaccagcagccaggttccgacgaactcgcagaagaagttcctcgccggattgtagatggccggcatcgtgcagaatgtgccgagtttcgtgtccagatcgtcagtggcatcgtaatgatccttgtagaatgcccagacaagggtcgcaccgcaaaagccacctaacatctgcgcgatgatgtagcctaaaaccgaaacccaagggaacgagccagccacggccaaaccaattgtcacggccggattgagatgcgctcctgaatatggtcccgcaatgaagactccgcacataacggcgaggccccacgccaaggttatcactacccaaccggcgcccttgcctttggatttctcaaggctggtgcaggcgcagactccgtcacccataaggattagtactagcgtgccgaggaactcggcgaaatatggattcataatattcaaaaattatcttggtttgactggtttgaagatcaatctcatcaaagagcattcactacttattggttaatgttcgtccgatagcgtcggcccatccggctttggccgccttgacggcatcctcatccatcgaaggagtgaagacgctgtctgcctcccattgcttcttcacatcatcaaggctctcccagaagccgacagccagcccggcaaggtaagccgcaccgagagccgtcgtctcggtcactttaggccttatgactttggcgccaaggatgtcggactggaactgcatcataaggttgttgcgggacgcgccgccatccacttttaattccccgagatggattccggaatccttctccatagccgagacaatgtccattgtctggaatgcgatgccttcaagagccgctctggcgatgtgtgccgccgtggttccacgggttattccgaatatcccgcctttagcatactgatcccagtacggagcaccaagtcccgtcaacgcaggcaccatatagactccaccattgtccggtacagaggccgcaagagcctcaacctcagatgaactcttgatgattccaaggccgtcacgaagccattgaacgacagagccggcaacgaatatagacccttcaagggcatagtccaccttgtcgccgatcttccacgcgatggtggcgagaaggttgttcttagacattatcggcttctcacctgtgttcatcagcaagaaacaacctgtgccgtaagtgttcttgacggatcccggctcggtgcacatctgaccgaacagggcggcctgctggtcaccggctattcccgcgacaggaacgtttccgcctaaaagatcagtctctccataaacttccgatgaggatttgacctgcggcatcatcgatgcgggaatattcagaagatcaagaagttctccatcccattccagtgtgttgatattgaacagcatcgtacgggaggcgttgctcacgtccgtgatgtgctcgtgtccgccggtcaggttccacaccagccaactgtccactgtgccgaagcgaagctttccctgctcggcacgctcacgggctcccggtacattctcaaggatccaacgtatcttcgttccggagaaataagcgtcgatgatgaggccggtcttgcggcggatcatatccgtcactcccgcggccttgagcgagtcgcaatattcagaagtccttctatcctgccacacgatggcattataaacaggttttcctgtctcggcgtcccacacgatagtggtctcgcgctggttggtgattccgatggcggcgatgtccgctcccccaagtccaagcgatgtgaccgcctcagtcatcatcgcatattcggtggcccagatttccatcggatcgtgctccaccatccccggcttcgggaaatgttgtgtgaattccttctggcgaacagccatagcctcgcccctcttattgaaaacaatggctcttgacgagctcgtgccctgatcaagggcaatgacatattctttcatattcaagaactaatcttcattaacgtgttaataatcctggtcacgcctgcctggaaagcaagcagacaaacgattccatcatggcagtttgtccaaacaaaagtaaaaaaatttccaatcaactccaacctttcctctaaaggtcaatgaatatgctaatgaatattcaagtgccggaatattacgcccacattatcctttgcctctatgaatatgccaccataattcatagcactcgcactcacggcaacaccttgcctcccaaaacgttgccagatagggcttgaaacacatcttcatcaataaaaacgccattgatcgttcccgtcctagatggtcactcgcacggccgtgattgataaagaactactaatcagcaagttacaaaacattaccctccagccatgactggcaataattcgtaacacattaataatcaatcaataagactccgcaataagcgatcactttgtcgagaacactttgtgacatttcagcttccgtcgaagacaagcagtaacactacagaagcaattttgtgcgatatagcacctgttgcaagtatagattactaccaaaattcccttgttcacctcattcactgacatcagtcatagcgtactattacatttagttgatttacagcatacaaatggatgaacgctaatcatgcttttcaaaacacaacaatagtctatttttatcgaagtatacaatatttcatattttttatgtaagtttgtgacagacactaatattgaagccaataaaaaaggcgaggaataacttccccaccttggatgttttcacaacggaataatccttattgtgatttgcttcagatgcgacaaatatatgttttttttaggtaaaaacaaaattttaactacaatgaaaaaaatacttggtctagacttgggtacaaactcaattggatgggcactgatcaatgtgtcccaaaatgatgatggggaagaatccttcgagaacatcgcaatatcgggttctcgcattatccctatggaccaagcttctatcggtgatttcaatagaggcaacactatatcacaaaccaaagaaaggacacaacaccgaggtacacgcagactgtacgagcgtggacatttaagacgtgaacgtatgaaccgtgtcctatcaatcttaaattttttaccggaacattacaaaatatgcttggatgaatatggaaagattaagccagatttggagcctaaaatagcgtggaaattaaattcttgtcagcattatgaatttctatttatgaaatcatataatgaaatgttgcaagatttcaagaaatgtcatcagacattattagaaagcgggaaaaacatcccctatgactggacaatctattatttgaggaaaaaagcgttgagcctaccggtctcaaaatatgaattagcttggatattattgaacttcaatcaaaagagaggctattatcagttacggggagaagatgtttctgagaatacacaaaaagcagaagaatactactcgcttaaagttgttgatttaatagagaccggtgaaaagaaaggaaaggatctttggtataatgtagtgttagaaaacggatttatctatagaaggacattcccagaaaaacctgactggatcggtaaggtaaaagatttcattgtaaccacagatttagaaaaagacggaaagcccaaagtagataaagaaggaaatatcaagagatccttcaggatgcctaaagaagatgattggggattgttgaagaaaaagaccgaagcagatattgacaaaaccaataaaacaataggcgaatatatttacgatgccttacttgctgaatttgaatgcaaggtaagaggtaaacttgtcggagttgttgagaggaaatactacaaagcagaactggcaaggattttagaggcacagaagaaatttattcccgaactcaacgatataggtctgtacgaacgatgcataactgctttatatcccaataacaccgcttatcgcaatagtatagcaagcagggatttcacttatctttttgttaatgatattctcttctaccagagaccactgaaaagtaaaaaatacctaatcaatgattgcccgatggaaagtaggcactacatagataagggaactggtgaatgcgtgacaataccgttaaaatgcatcgcaaagagtaatcctctgttccaagaattccgtttatggcagttcattacaaatctaaggatatatgaaagagaaagaaagattgacgatagtataaaagaaaatatagatgtcacatctcagttcttaccgaattatacctcatactcaaaattatacgattggcttaacaacaagcaatctattaatcagaaaacttttctctgctatccagaattcgggctgccccaatcggcaagagacacttatcgttggaactatgttgaagagaaagattacccctgtaatgagacacgttcattaatgttgaaatatctgtcaaaggcaggtgtcccttctgaatttctcacatcgaatacagaaagagaattatggcatattctatattctgtagaagataagatagaaattgccaaggctttgtcttcattcgcgaaaagacattttttaggagacgctttcgtggaagtattcagaagaatcccttcttttaagaaagactatggcgcatattcggaaaaagccataaaaaaacttcttccattaatgaggatggggcaatattggaaagaagattctattgattccaatacccatgaaaggatcaacatgattcttactggagaatatgatgaaagaatcaggaatcgcgtccgcgaaaaatctattggattaaaagatattcatgattttcagggtttgccagtatggcttgccaattacattgtgtatgataggcattctgaggccaagagtattgtaaaatggtctgggccagatgacatcgatgtttatcttaattcattcaaacagcactcattacgtaatcccattgtggaaagtgtgattcttgaaactcttcgcacagtacgagacatctggaaggccgaaggacagattgacgaaattcatattgaactgggaagagaactgaagaattctgcggacaaaaggaaaaggatctcaaatcaaatattggagaacgagaataccaatttaaggataaaggctatgctgcaagagttcttgaatccagaatatggtatagaaaatgtacgcccaaattctccaagccagcaagacctattacgcatatatgaagaagctgtactagacaacactgatgttcctgatgacattcagcaaatcttgggcaaattcagcaaattggatgacgccaagcgtcccacaccttctgagatgctgaagtacaaagcttggttggaacaaaagtacaggtctccatatacaggtgccataattccactgggcaagctattctctcctgaatatgaaattgagcatatcattccacgggctgtatatttcgatgattctttcagcaataaggttatatgtgaatcagaagttaacaaactgaaggataatatgcttggatattcctttattaaaaagcatcaaggagagatcgtgacattaaatggaggcaagacggtcaaaatcttatctgttgaagcttatgaaaagtttgtccaagacaactattcaggaaagaagagtatagccaaaaagagaaacctattgtcggagaatattcctgaaaaattcattcagagacagctgaacgacagtagatacatcagtaaagtcatcaagactctgctttcaaatgtcgtcagagtggaaggtgagcaagaggatatctccaagaatgtcataacttgtacaggaagtgtgacagatcggttgaaaaaagattggggaataaacaagatttgggacgaaatcattatgccaagattcaagcgtatgaatgatgttatgcaaaccaatggtttcgttgcggttaacgcaaacggaaaggaagtgccgaccgtgccaatctcatatcaacgtggtttcaacaaaaaaaggatagaccatcgccatcatgcaatggacgctattgtaattgcctgtgccacaaggaatataatcagttatctcaacaacgaatcagcatgtaagggtgccagaatcagcaggtatgaccttcaacgacttctatgtgataaggttcatgatggacgtaaaagagattataattgggtaatcaggatgccttcgaatacatttgtcaaagaagtaaagagttctttgagagatatcatagtcagctttaagcagaacatcagggtaatcaacaaatcatcaaacaaatacgaagtaataaaggatggcaaaaagataaaagtagctcaagtaaaaggcgataactgggcgatcaggaagtctctgcacaaggatactgtttatggtgaagtaaacttaagacgacaaaagaacgtgtctatcaatgaagcgcttaagaatccttcatgtattgttgataaggttataaagaatgaagtattatccgatcttaataaggggtataatttaaaggaaataaaatataatttaactcgatcacatcctgatatatcttccatggctgtttattactacactggcgactctaaagatagatttttcgcagtaaggaccactttggacgagagcttcactaaagaggttatagaaagtagtataaccgattccggaattcaacacatcttactgaaacatttggaatcaaatgataataagcctactatagcattctctccggatgggatagacaagatgaatgcaaatatcgttgatctaaataatggaatgtaccacaaaccaatacgcaaggttcgtaaatatgagaaagcggataagtttgcaataggagaatcaggatgtaagtccaagaaatttgttgaggcagacaaagggactaatttattctttgcgatttaccaatccgaaggcaagcggaccttcgctaccatcccacttatcgatgtaatcatgagagaaaagaatggagagcatcccgtccctgatgttaacgccaacggagataagctcctgttttatctctctcctaatgatttggtctatgtcccgacagctgatgaaatcgagtctggacatattaatgatgttattgacaaggatcgtatttataagatggtatcatcttctggaaggcaatgtttttttgttagtgagactatggctgtttctatcgttgataagaaagaattttcccctttgaataagatggaaagagccctctcaggagaaatgataaaggatatatgcattcctattaaggttgatcgattaggtcggataacaaatatcatagatagtataaaatgattaaacgatccttatatttcggaaacccagcatacctttcattaaagtcagggcaattggtaatcaaaaggcctgggtcagatggtgacatgccagattttgacaaccctaaaacattcacggagaccgtgaaaacaattccgatagaagagattggggttgtcgttttggacaatcagcaaataactgccacagagggtctattggaggccctacttgaaaacaattgtgctgttgtgacatgtgattgtaggcatatgccagtagggttattgcttccattgtacggcaatactattcaaacagaacgatattcggagcaaatcaatgcgtctttgccactgaaaaaacaattgtggcaacagaccgtacaaagtaagatcaagaatcaagcggctgtccttaaatattccacaggttttgaagccaagaatatgttggcttgggcagaaacagtcagaagcggtgatactggtaaccttgaaggacgcgctgcagcatattactggaagacggtctttgtagataatcccaaatttgtcagagatggcaatggtgttgtaaatacaatgcttaattatggttatgccatcttgcgggcaatagtagccagagcattagttggtgcgggcttactgccgacattaggtatacatcaccacaacaggtacgatgcatattgcctggctgatgacataatggaaccatatcggccttatgtagataagcaagtaattgatattataggaagtggcataccagaggaatttgacactaatataaaaaagattttattagaattacctgtaaaagaagtatgtttaggcgggactagaaggccattgatgatagccgtcagtcaaacagtatcttcactgcagaaatgcttctctggacaactaagaaaattgaccttccctgaaatggaataaatggaaaggtttaatgaatatagaatcatgtgggtattagtattctttgatcttcctactgacacaaaaaaggaaaggaaggatgctgccgcattcagaaaacgcttgatagaagacggattcataatgttccagttctccatctacatgagacattgtccatcttctgaaaatgcacaaacacatatcaatagggtaaagtcttttttgcctgatttgggacaggttgggatcctctgtatcacagacaaacaatttggcaacatggaactatattctgaacataaacccaaagaaacaccaaatttattcgtccagttggaattattttgaatctgaattccgccacaaacaaaataaaatccagcatttccatgctggattttatttttcggcaacaacagctatagcattgtgttacaagttattatctataacaggttgttatcattctgtcaaagataataaatctgaaagcaaatcacaacatcatttctaatatttcacattatggaaaagttgttatcattctgtcaaagataataaatctgaaagcaaatcacaactcgctccttttaaaggagccaccatccgaagttgttatcattctgtcaaagataataaatctgaaagcaaatcacaactatcttgactacgcgaacgagagttgggtggttgttatcattctgtcaaagataataaatctgaaagcaaatcacaactaaccgagcacacagacgcctctttttggagttgttatcattctgtcaaagataataaatctgaaagcaaatcacaacgaaaaggataacccaaatgctgataaagaggttgttatcattctgtcaaagataataaatctgaaagcaaatcacaacaaacgtaacgagaagcaccgccgcaacggtgttgttatcattctgtcaaagataataaatctgaaagcaaatcacaaccagatcttcaagaacatgtaccgtctcttggttgttatcattctgtcaaagataataaatctgaaagcaaatcacaaccaactcggccttatagataggctgatcgccgttgttatcattctgtcaaagataataaatctgaaagcaaatcacaacgtttttgcacattacaattacttggccgatgttgttatcattctgtcaaagataataaatctgaaagcaaatcacaaccggaaattctaattctcataactttgtttgttgttatcattctgtcaaagataataaatctgaaagcaaatcacaacccatgtgtcaaaaaacgtttaagcatttcggttgttatcattctgtcaaagataataaatctgaaagcaaatcacaacatcaagtcactaaaaggccttcagataatgttgttatcattctgtcaaagataataaatctgaaagcaaatcacaacggcaacagttgccgttgcagttacagcgttgttgttatcattctgtcaaagataataaatctgaaagcaaatcacaactgctgatggtgttggaatgcttaaatatgtgttgttatcattctgtcaaagataataaatctgaaagcaaatcacaaccgcattatgtaaaatggcagcatacaaacacagccatggacaaagtggtgatttagagtatgtcgcatatagcgcaagaaagcatatctggtatacaacttcatccatacaggcatagagacattgctgtgtgccacccaccattctgcaatatgacattctttatcctaaaaaaaaggttgaccatattcaggcttgaagagttggaagccagtggtgagcgattcgaccacaccgcagactcataggtgcgcgaatattctcacaccgggaaaagcaacctgctggatgtcagacaaatgaggttttaggtgcgcatggttgctcactcgtaaaggatcgggaaaccatcagactttgtgggacaggaaacgtaccgcggagggccttttcgtgtacctaacgcaataaatcacgccattggtacagggaacatacttcccgtgtaccaatttaagccatctggctcgggtcggggggaagaacgccgtggctggacatttgacaatgctcgtccttccatattcttcagggaatcacttgaagtactcttacgactgtaaacatcttacaaaatgcgttcagtcgcaccaagcgcctatgcccccccagactgtctgaaaagtctcggcgagagttgaaaagtctgtacccctatacaggggcgactacgaattctcaatcctcactgggggcacttttacttttaagacagtctcccccagaagccatatcgggctgaaaaactcgaaagcgatagggcaagatttcacggcaaagtacaatgagtgcttctatccaactatgggctgaaagcgtttcgtaatcgccacaacattcttaagcctgcatttacggttcacgtcagccagctttgacgtaaggttcagacatctcattcagattcagggcagatctatcgggtgcgcaaatgtaggttgggcacccgaggttaaatcctgatttggatccgggtgtgtaaagcctcttatcgcacctgaatcaaaactgcgaaatattcttctgtaccttgtctttcagagtgccttataacggatgaactcaatgaactttaagtcattgacatatgacttatcagacataagcatagttaggtagtaattggttaaacatcaatactataagataaagtcaactcgcatatagttccttatatttttctgtgggcgacattttcggcctcaagcgttgcccgagagggttagacgtgggcgacaggcgacatttcaagcagattacatcgcccgagagggctaagaagagatccgtggcaacattttaacgtgatttcgttgctaaagaggaacgaaaaaagaccgcaggaaatctgcggtctaaaatattgtcagccaaaattggcttcacataaacttgggattaggcctcggcctcaacggttacctttacggtggccttgacagccttgtagcacttgacagagccttcgtactcgcctacggtcttgatctcaccgagggtgatgttcttcttgtcaacctcaataccggcggccttgagagcctcttcgacctgagcggtggtgacagatccgtagatcttgcctgactcgctgacctttacggtcaccttaaccggtgtggccgcgatcttggctgcgagagcctcggcgtcagcgatgagcttggcctctttgtgagccctctggcgctttgtctcctcaagctgcttaagagcggatggagtggcggcgcaagcgaatccctgagggataagatagttgcggccgtaacctgactttacctctaccacatctccggcctcgccgagattggcaacttctttcttcaaaatgatcttcataatctcgctctcctattatttaagaaggtcagttacataaggaagcagagcaagggaacgggccctcttcactgcctgagcgactttcctctggaacttcagagaagtaccggtgatacggcgagggagaatcttaccctgctcgttgaggaacttcttaaggaactcagcgtccttgtaatcaacatacttgatgcctgccttcttgaaacggcagtacttcttcttcctaacctctactgtaggaggattgagatagcggattccagcgttctgtgcgtcattctgtgccataattcattcctccttgattatgcgttttcctctgttttctcttcagcggctaccggagcctcagccggagcctcctctgccttaggagcggcaggcttgttcctgttctcccttctcttcgcggcgtaagcctcggcgtgcttgtcaagagccacggtaaggaacctgatgatcctctcatcacggaaatactgggtctcaaggttggcgatgaagcttggctcagccttgaactggataagataatagaatcctgaggtcttgtgctggattggatatgccagctgacgaagtccccagtcctcctcgtacactacctcgccaccattgtcggcgatcagttttgtgtacttggcaaccgcttccttcatctgttgttcagacaaaacgggagttgcgatgaaaacggtctcgtactgttttaacatttgacttaattgtttaataataaataaattgcaatcctttcggggacgtatgccaacccaaaaggactgcaaatatagtcaattatctcaactttcgcaaattagcggtcaaatcgcatttgaatattcatacaaaatccgcgaatatgtccggcgcttcggcaagctcagcgtcagaaatgactattgccgccaacctcatagtgaggaaaactacttttcaggaatattctcaagcactgcgacgaggaacttccaggtctcggcgacggaagcgatgttcacgcgctcgtccggagagtgaggatagaggatggtaggtcctatggaaaccatctcccagttcggatacttggctcccataatggcgcactcaagtcctccgtgggtggcagtgatcttgagttcctttccgaagaggctcttgaaggtgtcctccagaaccttgatcatcggagtgccgagtttcggagcccaaccgctgtaagcgcctgatgtcgaatatttcgcgccggcgagctcaaagacgtaacggatcgagtcagcgagatacatcttggcggcgtcgatcgagctgcgggtcagagaatgaaccgtaagatgtcctttctgtgtgcggacgatagccatattggtagaggtctcggtcaggccaggaagagtgtcgctcatcctctggactccgtgagggcaggcaaggatggccttgacagccttgccgatcaccttagggctgatgtaacgggcagccggagcgctctgcttctcatagatgagaatcatatccgggtctgagtactggtactcgaacttggactcctcgaacttcttctcaacgagagccttgaccttgcgcgagtccgctgacgggacgaggatctcggcctcggcctcgaacgggatggcgttgcggagggatccaccggtgatggacgcgaccttcacgtcatattcagagattacggcttcgagaagacggcagatgatcttgttggcgttgcccctgaagagggaaatgtccattccggagtgtccgcccttgagtcccttgacggtgatcttgtagccgacgaatccttcaggagtcttatatgttctgtaagcgaagtcagccgcgccgtcaactccaccggcgcaaccggtgcaaagctcgccttcctcctcagagtcaaggttcagaagaatgtctccctttaatattccggccttgagcgagttggcaccggtcatgccggtctcctcatcgtaggtgatgagagcctcaagcgggccgtgcttcaaagtcttgtcctgaagaacggaaagagcgagagcgactccgattccgttgtcggctccgagggtagttcccttcgcggtcacccactccccgtctatctcggtctcgataggatcagtgaggaagtcgtgcttcgtgtcagcggtcttctgcggaaccatgtccatgtgggcctgcattatcactcccttgcggttctcgtagcctggagtggccggaactgtgaatatgatgttgccggtgtcgtccttcttcacgtcaacaccgtgttcttttccccagcccaggagatagtcctgaaccttgccttcgtgctttgaaggacgaggaacccttgtcaggccgtagaagttctcccaaacggcctttggccgcaaatctttaattgtcatagcgttacttattaatatgtgaatatttgaaaattatttcgaaagcgggaaatagccctccgttccgagctggtagacagcgatcctgtcctgaaggagggatgtcacaccgtcggagaggcgtaccgtgcagatggccgggatcctgtagatggccacattggtcttggactggacagccttgccttcagcctcccctatgggctgaggaataacctcaagaaggtaaggcttaccggacatgttgtcggcggagaccacgccatcggtgtcggaaattctgaatgccacataggtctgggatttcctgtccttcaccggaaccacgtcacatttcagcttctgggtctggaaatcgctgtaaccgatgaacatcgacatgtattccttctccaaggcggagatctcggcaagggcggcgcccatggcctcgccgctgtaggtcgcgtcggtgtcgccggtgacgatctgaaccctcttctgacgaaggttgaagatcatgtcggcggcttccttagccctctgttccaaggacttctggacaaccatattctgctgcacggcgatgcggttgtaggatgcgtcttcctttactccgcggtaaagcgtggcggcctcggatgtgaggttagaacttacaccctttccgttgaaatcagccccggcctgcgtggtgaacctccactcggcgctctcaccgaaacttccgtcattgaccgcgataagcccctgggaggtaagcgaaaggaaagactgtgtggccttgtcaggattgacatagtagcggaaattctggtcggcctcgatgtacggggtcatacggaccgtgctgagcgtgcaggtggtctggtcggcctgacgggcgtcaacgccaagatatttctgggcgtacttggcgtaagggcctgcatagaaatattcacggacggcctccacctcgatcgtgatggtggtctgaggaagggcgtaggaaacggttcccacggggttctgggccgagattcttccctccggcagcaaagcggcggcaagacagagaagcgatactgtgcggtaattcttcatattcataaaatttttgtcatttccatcttttgtgcgtccagaggtagttctccgggtgtttttccaaatcggcctgaagcaggctgtaatattcctgcattatcgagtgaggggtcatcgtcgaggcgtcgcggcagatttccttgaatgtccattcgtagtgtcctcgggagaccgggatcaggctcatgtagaacacgctgtaatgcagcttgtgggcgattgacgctccgccgagcatcgtccgggtcggctggtgcatgaaatcgacaacatcgttcacagtggagttccggtaggggcactggtcggtcgggattatatagattttcttgtcctccttatgagacaaggcgaaacgcaggaggttaacggagctgacgtagccggtgtagccgtcccgcagcaccggagcgcagcggttgacacgcataatctcgtcccacatcctgctgctcaacggcttatagacggcgattacattatttacgttcatcaccgattgttcccggtttggacggtagtcgtaattcaggcagcctccggtcagttcccagttgccgaaatggctgttgagcacgacaactccgggactttccgcaagcgcggcctcagcggcttcgatgttagtatattccaccagacgtttcctgtgcagcctttccggattgcggcatccgccgaaccagatcgtctctgctatcacctcgccgaaatgcttgtagaacgcattggagatttgcttcagctccttgtatttcttgtcagggaaagcgcgggagaggttgatcatcacgacatcacgccgatagtgcatcacatcacgcagcagccaggcaaagaagcccgcccacgcgtaatggaatcccagcggaagcgccgagatcaccctcagaagtccttgcatcagtttcgtcaaaatcttcatctttctacaatctgtcgcacatcaggcaaatataatgaaagaggaggtcaatatgaaatttaattgaggtcaggacccatcatatttccaaccattccacctcgccgccccagattgacaggaaacgcaagaagtccgcgcctgagatcacgacgctggccgtgttctcgcaagggtggaaacttatcttgtccgccgtgcgtaatgcactgtcaatgtaatatttgaccctatgtccgttcgggaatagttccttgggatccgcatcctttggattgatgtcgttgatgagtccgaaggccgacaccgaccccggatgcagatcaaggcatcgaaccatcctttcctccgacgcgaaagacagctttccctgcttcagcatatgctccatactatgaatgtcgagcgtcttgtggcattccatgctgacaaggtagtgccggtttcccttatggttccgaaagaaaaggttcttgcaatgcgtcgcctcggggatattcccccaatacgtcaggcactcctccaccgtgcacaatgccggatgctcgtacaactcataatcaatatcattggccttaaggaagttcagcactttgctcctcagccggccacgttccaattcatcgatttccatctgcgtttctgttttgggtgtaaatttaggcaatttttcggttatgggaacgagaactcagaatcggcgtacctagattcctcgtatttccgaatctttcgcctgactgacaccttggggatatgactgtcagataaatgataatttacgtgctagctgagcacagattagggacaaggcctatcggcatgagttcggaagaatagacaaaataaccgccatttcttgccgttatcggcaagaaatcctatatttgtatcggcatatgctattttccgtgccgtagattatggattacgtctcaactaaagaatatgcagcggcacacggtgtcgccgaacgcacagtgaggaactactgtgttcaaggtaaaattgccggagcacagcttgtcggcaaaacgtggagtgtgccagccgaggctccactccctcagcgcaagaatgcaaaaaacaggatatctccccttttgaagacattgtgcgagcaaaaagactccggaatcaaaggcggaatatatcaccgcactcaaattgacctgacatataattcaaaccatatcgaaggtagccggttaacaaaagagcagactcgatacatattcgagactaacacgattggaatcacg

SEQ ID NO: 1133 - DNA, 24524 bp, synthetic construct
  source 1..24524: mol_type = other DNA
  misc_feature 1..24524: note = Synthetic
attgctatgactaatctggtgttccctacatcaccatatgacagacttcgtttctactcacaaaaaggtaatgctgaagtaaagaatatgaatatacataaacttggcctttaatattgaaaatatgagaatgaaaaatatttttagattcttggctgttctgtttatggttgtttcatcacctgtactttctaaggaaaataagattatacgtatttctacggataatattgacctgatacttcaggtggctgaaaacggaagattgtatcaaagttattttggagcaaagcttcttaatgaagaagatctgaataatctgggctggatggtatatccggcctcagatgccagtgtaagtcctagaggatgggaagtttatagtggttctggaaatgaagacttcttcgaacccgcaattggaattactcataacgacggaaattcatcaacatggctttattttgaatctagttcttctcgtaaggttgaaggtggaactcagactgatatagttttacgcgacgacaagtatcctgttgaggtgactttgcattacattgcttacgcaaaagaaaatgtaataaaaacatggaccgatataaagcataaggaacgtaaagccatttctctttcggcttatgcctctactatgctttattttggaaggagcaattattatcttattcagtttagcagtgattgggcaagagaagcacaggtaagtaccgaaaaattacagttcgggaaaaaggttctggatacaaaactcggaagccgtgctgcgatgcatactcatccgttttttattatgggacttgaccagcctgccggtgaaatgcagggtgaggtcttgatgggtactctggcatggactggtaatttccgttttgtattcgaggtggataatgtcgggaaccttcgtgtgatacctggtataaacccttatgcttcgatttatagtctggaacctgataacgtatttactactccggaatttatttttacattgagtgataaaggtataggtgagggaagccgtaatcttcacgattgggcaagaaattatcagttaaaggacggtaaaggttcacgtatgactctgttgaacaactgggagaatacagcattcgatttcaatcaggagatattgtcggacttgatgaaggaggcaaaggatctgggtgttgatatgtttctgcttgacgacggttggtttggcaacaagtatccacgtgatgatgaccgtgcaggattgggtgactgggaagccaaggaaagaacattgccgggaggtatcggtgccttgacagcagctgccaaggaagctggtgtgaagttcggactatggattgagcctgaaatggtaaatccaaagagcgaactgttcgaaaagcatcctgaatgggctatacattaccctaatcgtgatacttattattataggaatcagttggttcttgacttgagcaatcctaaggtacaggagtatgtatatggaataatcgagaaattgttgaaagataaccctgaaatagcttatttcaagtgggattgcaacagtcctattacaaatatttattcgccatatttgaaaaaggaacagggaagactatatatagaccatgttcgtggcgtatataatgtaatgaaacgtgttgccgacaattatccggacattcctatgatgttatgttcgggtggtggtgccagatgcgattacgaagctttaaaatactttaccgaattctggtgcagcgataatacagatcctgtagaaagaatatatatacagtggggattttcacagttcttcccagccaagtcaatgtgtgcccatgttacaggatggaacaaatcagcatcagtaaagttccgtacagatgttgcatcaatgtgtaagttaggttttgacatagatttgaaggatatgaacagtgaagaactggattattgtcgtaatgctgtctctaactggaaacgcctgcagtctgtaatacttgacggtagtcagtatcgtctggtttcgccatacgaaacaaaccatatggccgtaaactatgtgagcccagataagagtaaatcagttctgttcgtatatgatgtacatccacgtttcaaggaaaaacttcttcctgtaaaactgcagggacttaatccatacagtcgttataagatagaagaaataaaccttatgccaaatgtaaaatcttcgcttgccgaagatggaaaggtattttcgggtgattatcttatgaaaataggacttgaagctttttctgcaaatacaatgagcagtagggttatagaaataacagaattgcattaataattttaaaatataccgtttataatatgacagtcaataaacaaataaaatatagtaaacttgttcctgtgatgctatgcttctttgccatgggatttgtagacctggttgggatagcatctaattatgtgaaagcagatttggggctgacagattctcaggccaatatctttccttcattggtattcttctggttcctgatattttcagttccaacaggaatgctgatgaaccgtataggacgaaagaaaacagtacttttaagtttgatagtgacatttgcatcactgcttctgccaatatttggtgacggatatgcactgatgctttgctctttctcacttttgggtataggaaatgccctgatgcagacatctctgaatccgttgttgagtaatatcatcagtggagataaacttgccagttcgcttactttcggacaattcgtaaaggctatagcatcattccttgcaccatatatagcaatgtggggagctactcaggctatgcctacattcggactgggatggagagttcttttccctatctacatggtgattgccattatagcaatactatggcttagtgcaactccaatagaagaagaacagccagacaaagcttccggttttgtagactgtcttaaactgttggtttcaccttttattttactttgttttattggcataatgtgtcatgtaggtattgatgtaggtacaaatactactgctccaaagattttgatggagagacttggtatgactctcgatgaggcttcttttgcaacaagtctgtattttatattcagaacaataggatgtttttctgggtcaataatacttagtaaagtatcatcccgtcttttcttcctgataagtgttttgtgtatgcttgcagctatggctggtttgctggtttcggatgcagaagcagttatttatgtttcaatagcacttataggtttcggaaattccaatgttttctctattatattctcgcaggctctgctatctttgccggaaaagaagaatgaaatatccggtcttatgattatgggacttttcggaggaacagtattcccgctgtttatgggatttgcatccgatgctgccggtcaggacggtgcagtagcagtaatggctattggagtgatttatttgttgatatataccatgaaactaaaaaaataacacattatgaacgatttagtagtaggaatgggagaagcactgtgggacgtgcttcctgaaggaaagaaacttggtggtgcccctgcaaattttgcatatcatatatcacagtttggacttaacagtcgtgttgtaagtgctgttggagatgataaactgggaaatgagataattgaaagctttcgtgagaagaaactttatggaatagtagaaaaggttccttatccaacaggtactgtacaagtggaacttgatgaagaaggtatcccttgttatgacataaaggaaggtgtggcatgggacaatattccatttactccaggactggaagacttggcaaaacatacacgtgctgtttgctttggctcattggcacaaagaagtgttgtatcacgagagacaataaaccgtttcttagatgctatgccacaaaacgatgatgtattgaaaatttttgatataaatcttcgccagggattctatacaaaggaaattctttgcaattcattcaggaaatgtaatatattgaagattaatgatgaagaacttgtcactgtgagccgtatgttcggctatccgggcatagaccttcaggataaatgctggatcctgctagctaagtataacctgaaaatgcttatacttacctgcggtgtgaacggaagttatgtatttactccgggcaatgtctcatttgttgaaactcctaaggtggtggttgcagatacagtaggagcaggtgactcgtttactgctacatttgtagcttctatattgaagggtaagtctgtaagcgaagctcatgaactcgctgtaaaggtttcggcatacgtatgtacacagaacggtgccatgccggtaatacctgaaatatatcttgactgacagattcccgataaacggtgtataaagatacgttaaacggtcggtgaacagattctaagcactgttcaccgaccgttattttttatttattgttttttctttaaaacatctgtcgggctttcaccgaagaaatccttatagcatttagtgaagtacgaaggagacgagaatcccactccgtatgcaatttcagagatgcttttctccttagaggtcataattaatgctttagctttgtttaaccttgctattctaagcagttcgtttggggtatatccggttagtgcttttgcttttctgtatagctgtactctgctgaatcctatcttttcacccatgtcttcaacactgaagtcggcattgccaagattttcatctatcagttcacggagtttttctacaaatcctttgtcagtgtctgccagtggtgcagtacttgtcatagatttatcactgaaaaagtctttcagtctgttatgattctctataagattatgcagtcgggccaaaagcagttcagaactgaacggcttggatatataagaatcggcaccacattcgtatccctttattttctgttcgtccatagaatatgctgtgagcataataacaggaatatgcgaagtgcgtggctcggctttcagtcttttgcaacattccattccgtccataacaggcatcataacatcgcaaattattatatcaggaatgtttgctatagctgttttaagtccttcatttccatttgcagcctcaagtacagtatattcccctttaagaagagattttacgtaatctcttacatcctgattgtcatctattactaatactacagacttggacctgttattttcggcttcataagaattttctgcagatatactttcctggtctgccatcactacagcaccttccttaagattattgagtacagcttttctgtcgataccataacatatctgtccctcctgtctggcaggaatactgatagagaattctgtaccattaccctctgtactttcaacagatatatttccattgtgcatttctacaaacgcctttacaagtgccagacctatgccggaacctgcatgatgaacatcaatctggtaaaaactttcgaaaatatgtttcacgtgttctgccggcatacctacaccagtatctgtaaacttaagtgatatttcatcttcagatgtcttgcatagagtaatagttatactgccgtattcgggagtgaatttgaatgcattcgaaagcagattgtatgttattctttccagcatttctgcatctgccgtaacattgaaatcatcgtcggtagcattgaatttaaactgtatatgttttctgaatgccagtgttctgaaggcttctatccattccttcatacaatccttcaggttgaactcactaagatgcatttccagttttccgttctcgaatttcctgaaatccattatctgatttatcagccttaacaatactgttacattcttgtttatgatatttagcaggaacttttcgctttcgttcatgttatcactgctcataagtcttttcaccggatcggctatgagagtaagcggagtacggaaatcatgcgaaacatttgtgaagaaagatagttttgctttggttgcatcttccagtttttgtgacaggtctataagctggtctctctgttcctcaagctgctttttctgtcgtgacagttctgcattcagtcttatctttgtccagtaggctcttacaataaatagaagaagtatggcaagaagaaatactattacgatacatgcatatagcagcattttctgtgtagaatatctcatgagaaaagtatccagtttttcattaaggacttctattttttctcccaatgtattgatatgcgatgtctgcatcagcattattctggcattacctgcatttaccaatgctgatgatagaatattttctcttgaatatgttttgttttccagtatattcatggcaacctggataactttgtctcccccggtaggatagatgaaggttgcatcaagtatactgtcagccaccagttccacaccaagattttctccagcaagagcatctacccccacaaaaagcatgtctttctctcttccatgcttttgtgcagctttaaatgcccccgaagccataggatcgttttgtgctatgaccagatcaatgtttttatgcagataaagaatagagtcgaatttgctttctgctttatctttcagccaggctccgtcagcagtggctataagttttatatccggataattcttcagtatttcttctatacctctgtgacgttctgcagcagaagaagaaccttttagtccggtaatttccactatattacctttgccgttcattcggtttgcaatgtatgttccgattcgctttccgagttcataattgtctccaccaacgaaagctgtatatttttcagaaagtatttttctgtctaccaaaactactggaatcccagaattgtatgccttttctataatcggagttatagcattagcctcatttggtgaaaccacaataagatttacattggactttataaatgattctatatcagctatctgcttgttgttattatcaaatgctgtctttatatctactttcagatcagggtagaaaagtttttcacgaagaatttcttcgttcattctgtttctccattcatcatcgctgcactgtgatacaccaattacaaagcttttgttctgattcttacaggaataaagagtaagaaaagacagtattataatcagtttatataaaaaagtagttttgtttttatgcataaatgtaatatcataaattagttttaaacaaggtctatttttattatacaaaaatagtgatttctattgttgtaatatttacttatatctttattttatgatatgtaacaaaaaagaacagctaaataagaataaaactgtcttatatagctgttctttaaaaaataatagtatatatcttttttagatattgtcacctctcacaatatcgtcgaatgccgataatgcagcctttgcaccttcacccattgatataataatctgtttgtacgaaacattcgatacatcgcctgcagcataaacacctttaatcattgtacggcaattattgtcggttgtaattatttcgcctatcctgttagtctcaagcatatcggcaaaaggcttactgttggccgacagacctatctgtacaaagactccatccaatgtcagattaaatacttcttcagtattacggttcttcagttttatggacttcatcttttcagaatctccctctatggcaagagtctgtaccgatgtcatcacctctatattgggcagagaatatagtttttcctgaagaaccttatctgctttcagagtatccataaattcaaggactgtcaccttcgagcatattcctgcaagatctattgctgcctctataccggagttcccgcctcctataacagctacactctttcctttatagaaaggtccgtcgcagtgaggacagaatgcaactcctttaccgatatactggctttcgcccggtacattgagctttcgccacgaagccccggtagcaataatgagtgagggagcagagaatacttcacctcctcttgccttaagtttctttaccccatcctctatatagaaactttctattgttcgttccggataaacagagatattaggatattcctttatatgtgagccaagatttgtagagagttcctttccggttgtatatggaacagatataagattctctatacctacagtttcatttacctgtcctccaatacgtcctgctacaagtcctactttaagtccttttctggcagaatatattgcagccgaagttcctgctggaccggctcctaccaccagaatatcaaactctttttctgcaaaactttctccctcagcagatgtattacttccaagttcggcttccagtttttctacgagttcgcccagtgtgcttcttcctacatggataagcttctttcctatatataccgacggaactgcctgaatattcagttcggaaacttccttttcgtgtagcgcaccgtctattactacgtgcctgatcccgttgttgtataaagaaatcagattcagagcctgtactacgtccggacagttggtgcatgtaagcgacatgtatgtccttacttcatcattgcattgcctgattcttttaattctttctgctattgcttcgtcgggatggttctttccctttccgtcggcattaagaaccgccaaaataagcgaactgaactcatgtccgtttggtatagccttgaaagttattccggtttcattcccgtttttcagaattctgaaaagaaaatcatctccgtcatttaccttgacgctgattttttcagaacaggatgccgtatcttccagaaattctataagttcatttcggtttgggtgctgaggatagactgttatgtcgaatacataatcagcatccagacccgaaaaaatctgtttcagttgttcttttaaagatgtatccaacataaaagccctcctttcttatcagattttacctacaaggtctatacttggtttaagtgtttcggaacccttctgccatttagcaggacacacctctccgtcgtgtgaagcaacaaactgagcagcttcgacttttcttagaagttcgtctgcattacgtcctatactgttgtcctgtatctctacaagcttgatgaggccttcggggtttaccacaaaagtacctctgtatgccataccgtcttcctctatcatcactccgaatgcacgcgaaagcgcacctgtagggtcggcaagcataggatattggattttgcggatactttcagaagcatcgtgccaagctttgtgtacgaaatgcgagtctgtacttacagaatatacttctactcccatagccttgaactgttcatatttctctgccatgtctactagctctgtaggacaaacgaaagtgaaatcggccggatagaagaaaaagattgcccatttacctttgatatcttcgtttgttacagttacgaattttccgttgtgaaaagcctgtaccttgaattctggtactcttgaattgataattgtattcattttcttataaatttaatgtttgattgactgtttttaaatttgtaatgattacatttgcaaaggtataggctttgtgatgttgtggcaatacctaattgttggtatttttcattgttgtatgatttcttcttatttgtttttggcttcccactatagtgtgatatgtgtaatactatagtgtgatagcttacctactgaagtgtgaaatgcttcacacttcagtgtgaaactaaagatgattagataaaaaaaagcgaccttataacaagaccgctttaaatgttttcacaacggaataatccttattgtgatttgcttcattttagttttgcaaatataatgatttatcacaaaaaacatttagtttattataatattttttatacttttgaaaaaatgagaaataaaagataattagaacaactatgaaaaaaatattaggcttagatttaggaaccaatagtataggttgggcagtaattgatgctgtaaatgatgaatccggtaaagaagaattaaagaatatatcctgtagtggaagtcgtattattccgatggatgctgctacattaggagattttgataaaggtaattccaaatctcagacagcagaacgtacacgtttacgtggtgtacgtcgtttgttggagcgttctttgcttaggagggaacgtttactccgagtactgtctgtaatgaatttcttgccggagcatttttcttcacaaataaaccgttatggcaagtttgtagaaaattcagagcctaaaattgcatggaaagttaatgaagaggggaagtatatatttttgtttcaagaatcatttcgtgaaatgcttgaagagttccgttcttgtaatcccggattacttgagaatggaaagatgataccatatgactggacaatatattacctgagaaaaaaggcattaacccgaaaaatagcgaaggaagagctggcctggattcttttgaacttcaatcaaaaaagaggatattatcagttacgtggagaggaagaacaggaagatgataagaaactagtaaaatattatgcattgaaggtagtatcggttgaggattctggtgaccgtaagggtaaagacatatggtacaacgtacatcttgagaatggatgggtatatcgtagagccagcagtatacctctcgattgggaaggtaaagtcagagagtttgtagtaactacagaacttgatgaaaacggtaatcctaaaacagataagaatggtgaagtaaaacgctcattccgttcccctaaagaagatgattggacacttttgaaaaccaagacacaggattctatagaagaaagcggaaagactgtaggtgcttatatttatgatgagctgctcgttaatccttcacaaaagataaggggaaagctggtacgaactatcgacagaaagtattataaagacgaacttcgttgtatattggatgcacagaaagagtttcataatgaattgcgggataataatttgtatctttcgtgtgtagaagagctgtatccttccaatgaaattcacaggaatatattgttgaacaaggattttacttatttgtttcttgaagatatactgttttatcagcgcccgttgaaaagcaaaaaatcactcattgatgactgtccatacgaagagagagtatacaaacagaaagatggttcattatgtcacgtcccattaaagtgtacatcgaaatctcatccatgttttcaggaattccgtttgtggcagttcctgtcgaatctacgtatataccaaagagagaaacaggtagatggcagtcttaggacagatgtagatgttacttcagagtttctcaaaaatgaagatgattatgtagctttgtttgattggttgaatgacagaaaggatattgaccaaaaagtatttttgacttataaacctttcaatctgaccaaaaagaaccagtctgcctacaggtggaattatgtagaagataaatcatacccttgtaacgagactcgtgccttgatattgaagtttttgaataaagccggagtttcatctagttttctttccaaagagaaagaagaatctttatggcatttgctgtactccatttctgacaaaaaagaactggatacagctttgtatacttttgcaggcaagaatggcttgggacaagaatttgtatctgctttttcaaaaatccctccatttgatagtagttatgcgtcttattctttaaaggcaatatgtagattgcttccacttatgcgcatgggaaaatattggagcgaagaaaatatagatttttctacccatactcgtatggagaaaattattaatggtgagtacgatgatagtatacgtagcagggttcgtgaaaagtcgttacatctctcggatatttcttcattcagaggcttgcctttgtggcttgcatgctatatagtgtatgaccgtcattctgaagtaaaagatatagtgaaatggaatagtccggatgaaatagacaattatttgaacaagttcaaacaacattcattgcgcaaccctatcgtagaacaggttgtgacagaaacactgcgtgtggtgagggatatatggaaacatgaaggacacttagatgaaattcatgtagaacttggtcgggaaatgaaagcgacagcccaggaacgtgccagaagaacaatacaagtcctggaaaacgagtatgccaatcttcgaataaaagcattgttatcagagttccagtatcctgagttcggtatagagaatgtacgtccatattctcctagccaacaggaaatattacgtatatatgaggatggggttctttccagtatctcagaaaaagaaatgccggaagatatatcttctattttgaaaaaattcaatgaaggagatgtgaagaaacgtcctacacgttcagaagttcttcgttacaaattatggctggaacaaaattatcattctccttatacgggagagccaattccattaggaaaactctttacttctgcatacgagatagaacatattatccctcaatcacgttattttgatgattcgttgagtaataaggtgatttgtgaatcggctgcaaataagctgaaaggcaattctttggggtatgagtttatcaagaaacaccatggagaggttgtagatttgggtaacgggaaaactgccagaatatttactgtaggtgaatatgaagaatttgtaaagaggacttatggcagtaattctcagaaaatgaaaaagcttcttcttgaggatattcctgacggttttatagaaagacagttgaatgatagccgttatatcagcaaattgataaaaggtctgctttctaatatagtgcgtaatgaagatgaggatgaggctatatctaagaatgtaatagtatgtaccggtggaataacagataggttgaagaaggactggggtatacaggatgtgtggaatagaattatcctgccacgttttgttcgtttgaatgagatagaaggctctgatgtgtttactactgtcagttcatccgggcatcttattccatcaatgccgttacatttgcagaaaggattcaataaaaagcgaatagatcatcgccatcatgctatggatgcaatagtcatagcatgtgctaaccgtaatatagtaaattatcttaacaatacttcggcaagaaaaggagctgaaacatcaaggtatgatttgcgcaacttattgtgtgagaaagataaaactgatggaaatggtaattataaatggatgttgcgcaaaccttgggagtcttttacacaagatgtatattctgcattacagaatatagtagtaagcttcaagcagaatctccgtgttataaacagcactaccaatttttatcagcattatgatgatgaaggaaagaagaagatgataaaacagataaaaggagatagttgggctatccgtaagccgatgcataaagacactgtatatggtgagataaatctgaggtgtgtaaagactgtttctcttaaagaagcaatgaataatatacaaagaattgttgataagccgttcaagaataagctagtggaactggtaggactagggtatgatgtgaaatgtataaacaaatattttgagtccagaagtgatgaatggaatgaattagaccttaaaaagataaaagtctattattttactaaagaaaccaacaaccgtttctttgcaactcgtaagccattggatacttcttttagtcaaaagaaaattgatggtgaggtcgctgatacggcaatacaaaagattttgacaaatcatttgctaaagaacggtaacaatccggagctagccttttcacctgatggtatagaacggatgaatcagaatatagtatcattgaataatggaaaagagcatcagcctatttataaggtaaggatttatgaaaaagctgataagtttgccgtaggcgaaaaagggaataagaaatctaaattcgtggaagcggcaaaggggactaatttgttttttgccatttatgaatcaataaaagaaaacaatgaaacaggagaagttatacgaaaacgcacatataattcaataccgctgaatgttgttatagaaagattgaaaaaaggtctttctcctgctcctgaagatgatgagggaagattgccttcgtttgttctgtctcctaatgatttggtatatttacctaccgaggaagaacgaaaaacaggtaaagtatcagagcctttgaataaggataggatttataagatggtatcctcttctggtaatcaatgctttttcataaaagcatctatttctagtatgattgttgataaaaaagaatattctccattaaataaaatggaaagagctgttactggagagatgataaaagaaatttgtttacctataaatgttgataggttaggtaaaattaagatcaagcattgacttttgaagtaaagttttatgattaaaaaaacactttattttgggaatccggcttatttgtcattacaaaatggtcaaatggtcataaaactaccggaggtagagagtaactcctctcttccggatagttttaaaaagcagtctgtagtaacaaaaccgatagaagatataggtctggtagtattggacaataggcaaataaccataacttccggactgttggaagctcttttagaaaataagagtagtgttgttacttgtgacagcaagagtatgcctgtagggcttatgctgcctttatatggaaatacggttcagaatgaaaggttcagagaacaattggatgcttcattgcctttaaaaaaacaattatggcaacagaccatacgggcaaaaatattaaatcagaatgcagttttagagacttgtctcaaagagaaattcaagtgtatgcaagtttgggctgatgatgtaagaagtggtgattctgaaaacatggaagctagggctgctgcattttattggaaaactcttttcggacatatttctggttttacgcgtgatagagacggtatttatccaaacaacatgttgaattatggatatgctatactccgtgctgttatagctcgtgcattagtttcgagcggattactgcctacattgggaatccatcatcataataggtataatgcatattgtcttgccgatgatattatggaaccatatcgtccttatgtagatgaacttgtctttagattgatgaagcaatacaatgattctgaggaacttactaaagaattgaaacgtgaacttcttatgattcctacaattgatgttgtaataaatggtaaaagaagtcctcttatgattgctgcatcacaaacaacagcttcattatataaatgttttagtggtgaacttcgcaagataatatatccagagaaataattttttatggaacgtttcagtgaatatcgcattatgtgggttttagtgtttttcgatttaccaacagaaaccaaaaaggatagaaaggcgcatgctcttttccgtaagaatctccagcatgatggatttactatgtttcagttttcaatgtatatacgtcattgtgcaagtgtagagaatgccaatgtacacataaagagggttaaatctttcttgccggagtatggtcaagttggtatattgtgtataaccgataagcaatttggacaaatagagatgttttatggtaaaaagcctcaggaattaaagtctccaggagtacaattggaattattctaaaccaaaaaaaccgttcataatgaacggttttttgttggaaacagtttcttttttattttctaatattgttgttaattgcttgattgttagaaggaaatgactatcgtgctgtttcctatctatgcaaatgtactaaaatgaaagcaaatcacaaccaactgatacatttcattcgtttgtgccgagctgtttcctatctatgcaaatgtactaaaatgaaagcaaatcacaactgtacttacttcgctaggcatatttatgtgctgtttcctatctatgcaaatgtactaaaatgaaagcaaatcacaacgagtccgatcataatcgtaggttaagttctgctgtttcctatctatgcaaatgtactaaaatgaaagcaaatcacaacatagtgattattatttataactgaatagcgctgtttcctatctatgcaaatgtactaaaatgaaagcaaatcacaactttatatcaacaaaataaatacgcaattatgctgtttcctatctatgcaaatgtactaaaatgaaagcaaatcacaactgtagaaaggaacacgtttcaggtcctttggctgtttcctatctatgcaaatgtactaaaatgaaagcaaatcacaacgtttgtcgctcataatgataattgaataaagctgtttcctatctatgcaaatgtactaaaatgaaagcaaatcacaactccgaaagtatttataaacaagttatcaacgctgtttcctatctatgcaaatgtactaaaatgaaagcaaatcacaacgacattaactgtgctcctttcattgataacgctgtttcctatctatgcaaatgtactaaaatgaaagcaaatcacaacatccgcgatcgaattaaattctgtcctgtcgctgtttcctatctatgcaaatgtactaaaatgaaagcaaatcacaacaaacgcgtccggattcagatcctggccgtgctgtttcctatctatgcaaatgtactaaaatgaaagcaaatcacaacacagacgaagaattgttggcagaattaaagctgtttcctatctatgcaaatgtactaaaatgaaagcaaatcacaacgtcaactccatatgtaagcagatgcatagtgctgtttcctatctatgcaaatgtactaaaatgaaagcaaatcacaacgaaaaatcactgactgacggtgcggcctagctgtttcctatctatgcaaatgtactaaaatgaaagcaaatcacaaccaatggaattgaagagctatctcattttgagctgtttcctatctatgcaaatgtactaaaatgaaagcaaatcacaacgttttcgtctttcactatcccccttttgttgctgtttcctatctatgcaaatgtactaaaatgaaagcaaatcacaactaatctaaacaccgaagacttggcagactggctgtttcctatctatgcaaatgtactaaaatgaaagcaaatcacaactgaaatctctgtaataccatttttgaaacagctgtttcctatctatgcaaatgtactaaaatgaaagcaaatcacaacaagaccggagcgaatgccgggaaaccaaagctgtttcctatctatgcaaatgtactaaaatgaaagcaaatcacaacatacagagacgatgaaggcagactattggcgctgtttcctatctatgcaaatgtactaaaatgaaagcaaatcacaacatccgcgatcgaattaaattctgtcctgtcgctgtttcctatctatgcaaatgtactaaaatgaaagcaaatcacaacaataccagcatttgataaaatggtacaaacgctgtttcctatctatgcaaatgtactaaaatgaaagcaaatcacaacgataaaataccattaagtgaccttgatgacgctgtttcctatctatgcaaatgtactaaaatgaaagcaaatcacaacagaatgttaaaataagctttcttccttatcgctgtttcctatctatgcaaatgtactaaaatgaaagcaaatcacaactcagtccgtcttcacccaattctacccattgctgtttcctatctatgcaaatgtactaaaatgaaagcaaatcacaacattatgaagcacaaaaaattcagtattatagctgtttcctatctatgcaaatgtactaaaatgaaagcaaatcataacaagaaaagcattttttgagttattattgctctttttatctttttgagttaattttgttacaaataatagaattatgttgaggaaactttttaaaaatataatagttgctatcttgatgttgggaactataacttcttgttatacgttgcagtctactaataattatgaaggatgggaattggtttggcatgatgaatttgacaaggatggaaagattgatacttcttcgtggagttttgaacaggggtttgttcgtaataatgaactacagtggtatcagaaagataatgtgtattgtaaagatggtcttcttgtaattgaaggtagaaaagaaaagattaaaaaccctaaatacaaacctgaaagtaaatcttggagagagaaccgtgagtatgctgaatatacttcatcttctataatgacaaaaggtaaaagagaattcaagtatggtaggtttgaggtgcgagcaaagattcctgtaacttcaggttcttggcctgcaatctggactcttggtacttctcaggaatggccttcgtgtggcgaaattgatatgatggagtattataagataggtgatgatcctcatatccttgctaatacagcatggggtagcaagaatgcctatagtccgaaatgggatagttcgaagattccttttggcaaatttcttgaaaaggattctgcttgggctagtaaattccatgtctggagaatggactgggaccaagagtttatacgtctgtatctggatgatgaacttctgaatgaaatacttctttcggctactgtgaacagtgaacttggagggtatattaatccgtttaagcagcctcattatattatactgaatctggctatgggggctaatggtggtaaaatagatgattctgttttaccaattgagtttgaaaataatattcctgttattaaatggcaggatgaatggaaaatagcggaataatattataattctttcctgttttgttggaccagttcaacaaactctttgtgatgtgaacagctgaatatatatttatttttacttgtacgtataagtatcagctcgttcaagtttgttgcatacatagtgtatttgccaaatctaggatttctgaatattcctaaatatccaaacataccgccacttccgaatagtcttatggaagaccttatatctgagcttgggattgtttttatctctataatgtcttttataggaatattaatagaaccataaaacttgtgtagggttatgctgtctttttggatagttaaccgcgtaggcatataacacagtccgcccattatagtaacagctagggtaattatgaggagatatttgagccaaagcatggaagaaggaaaatctttattacctataatatataatgatactattaaaataatcactgttatagtggttattgctatgactccaatgctccatgagcatcgaaaagatgtagtattagtattcataaggattttgtatttaatatctatgttgttatatttttattttacaatttgttacagttttcaatatatgcgaatatacaaaattctttaattattatcctctgaatatagcttaaaatgttttgcaaaagctttgaaaaaagatgttaacatcattattccatttcaagaaaaattcgtatatttgcacgcaataataatcaaaaaagcataaagcctatgtcatttattgcagataaagttgttatggacggattgacttacgatgatgttttgttaatcccagcctattctgaagttcttcctaaagcagtcgatctctcgactaagttttcacgcaacattgagttgaaaataccttttgtaactgctgccatggacactgttacagaatcacagatggccattgccattgcacgtgaaggaggtatcggtgttattcacaaaaatatgtctatcgccgaccaggctcgtcatgtagctgctgtgaaacgtgcagaaaacggtatgatttcaaatcctgtaactatcaacagtgatgctaaggtgaaggatgctctgaacattatggcagagtataaaattggcggtattcctgtggtagatgcagaaaacaatcttgtgggtatcgttacaaaccgtgacttgcgtttcgaaaaagatatggaaaagttcatcaaggatgtgatgacttctgaaaatatcattactacaagtcaggctactgatatggaaactgctgctcagattcttcaggaaaacaaaatcgagaaacttcctgtagtagatgataaaggtaaacttatcggtcttattacttataaggatattactaaggctaaggataaacctatggcttgcaaggacgctcagggacgcttgcgtgttgctgctggtgtgggtgtaactgctgatacgcttgaacgtatggaggctttggtaaacgccggtgctgatgctattgttattgatacagctcacggacattctaaatatgtaatagaaaagcttaaggaagctaagctccgtttcccaaatgttgatattgttgtaggtaacgtggctacaggtgaggctgccaaggctcttgttgaggctggtgctgatgctgtgaaggtaggtatcggtccgggttctatatgtacaactcgtgtagttgccggtgttggtgttcctcagctttctgctgtatacgatgttgctaaagctcttgaaggaactggtgtacctttgattgccgatggtggtcttcgttattcaggtgacgtagttaaggctcttgctgccggtggatacagcgtgatgattggttctcttgttgcaggtacagaagaatctcctggtgatactattatcttcaacggtcgtaagttcaagtcatatcgtggtatgggttcgcttgaagctatggaaaacggatctaaagaccgttatttccagggtggaactactgacgttaagaagcttgttccagaaggtatcgctgcacgtgttccttataagggttctttgtacgaagtgatttatcagcttactggtggcttgcgtgccggtatgggatattgtggcgctcacaatataaaagaactccacaatgctaagtttacacgcatcactaatgcgggtgtattggaaagccatcctcatgatgtagctattactagtgaggctcctaattacagccgtcctcagtaattgtctgattattggataatattacagcatgaatcgtgtatataggatgaatgttcttatatatgtggttcatgctttttagtttgtatatgcttgtgaaaaaatctttttggatatgccttctatggcttggcagtctgttttctttgagttcgaaaaccgagttgcttattaaagtggacggggtggaaacatctctgtcggaatttatgtatcattatgatagggtcaagtgcttcagaaattgtagtcctgaagattactttaagtattttttgagatacaaaatgaaggctgccgatgcaagaaacagagggcttgtttctggtaatgattatttagaggaaaaggaactgataggacattacttgaaaggaaaatccgataatgtaaatatttccggaggtagagtaaaacttgcaatacttacttacagattatcgcagaggtcttctgatgcttattatcgtaatgctgagaagataatgaatggcatatacgggaaacttatatcgggtacatctcttgattatgtagtcagtgagtttaaggattcttgcattgtattgctggatagcggaaacaaatggatggacagagtgtttcttcccgatgaaataaatactgtaatagacaagatgaatataggaggtatttcggctcctttgtattcccccgaaggaattcatatattacaactgaaagatatagtgtatcctggcttgacatcggatgatggtagcacaggttatgaagattttatattgaagcaggcagaggaagcgcttttagtatctgcatgggacaaaaatactcgtctgggatatagtgaatgtactgaagaatccctggagcgttattttaagtctaacagaaagaaatataaatgggaatttccacattacaaggggattgtacttcactgtgaagacaagaaaactgcatcaagattgaaaagaaaactcagaaagcagccgtttgaaaactgggaagctgttataagtcagttttgcgatgaaaccggtgaaaagttgaaatatgatattggtctgttcgaaatagggaagaatccttatgttgataagattgcattcaagtgtggcgattttaaaaaagtcaacggactgccgtattctacactgataggtaagcgtcttgactatgagcctgagaactataaggatgtgtacagtaatgtagtgaatgattacataaaggaagccgaagaccgcttttttggtgatttggagaaaaaattaaaggtagaaaagcatactgacgttttaaaaaccgttaattgtagtggaagtaattgatttatactgtatcttcgttcactgattattgtatataatgcgttacggatatttttttagcttgattgcgatggttctgtcggttttgacaggatgttcggatataattgatcataaaggaaagacacctattgtacagataggaaagaattttctttacgaggaagatgtgttttctgtaattcctccggggatatcggttaaggatagtacagatatggcggacaagtatatcagaaactggatagatgatatacttctattggagaaggcagaaggtaatataccagacaatgacaggatagaagaacttgtagcttcttatagaaagagtcttgtaacacacacttatatggagcttataataaaccaggaagtgggtgaaaatattgatgaatcggaaatagaggattattataacagtaataaagatatttttctagcagaagaaccttatgtgaagggactttatattaaagttccgttgaatgcaaacggagtttcgaatgtaagaaaatggtttaaacagagttcggaaacagctttggataatttggaaaaatacagtttgaagaatgctgttgactacctgtatttttatgatacatggaaacctcttgatgagatattgctgaaatgtcctatcagtaaggatgctgagaaagaggacctgctgaaaaagaagagtgtggaagtgaaggatactgcctttcattactttattcatttggaagaagttgtaaataaaggcgaaacactgcctttggaatatgccaacagtgaaataaaggaaattcttattaatgccaaaagaatggattttgtttccagaatgaagaacgacttgtataataatgctatagataacaacgaaataaaatacttaaatagataagatgaacagatatggttttataaagatgtgcttatgcatgattctgggattttcaggattgggcgcaaatgcacaggataatgtgatagacgaagtggtttgggtagttggtgatgaggctatcctgaaatcggatgttgaaaacgagcgtcttaatgcacagtatgaaggcagacgttttgacggtgatccgtattgcgtgattcctgaagaactggcagttcagaaactgtttttgcatcaggcagaaatagacagtgttactgtttctgaccaggaagtaatacagaaagtggaacagcagactgcatggcttatagatcagattggttcaaaagaaaagatggaggagtattacaataaaacttcaacacagattcgtgagatgcttcgcgagaatataaggaacggtcttatagtacagcagatgcagaaagaactggttggtgatatcaaacttactcctgctgaagtaagaaactatttcaagaatcttccagacgacagtattccaaatattcctactcaggtggaagttcagattataaccagagaacctaaggttaaggaagaagaaatagaacgcgtaaaaaagactttgcgtgagttcaccgataagataaacaagggagaatcttcattttctgtgttggctatgtattattctgaagacccgggctctgcacgaagaggtggtgaatacggatttacaggtcgtggggaacttacaccggagtttgcgaatgttatattcaacatgaccgaccctaagaaaatctcgaaggtgtttgaaacagaatatggatatcatattgcacagcttattgagaagagaggagaccgtgtgagctatcgtcatattcttatgaagcctaaagtagatgaggctgaaataaatgaggctcttaataaacttgacactttggcaaatgatataagaaaaggaaaagtaacttttgatgaagctgctacatgggtttctcaagataaggatacaagaaacaatcatggtcttattgcaaatcctgtatcgggaacttcaagattcgaaatgcagcatctggccggatatgtttctcaggaacttgccaaagtggtagagggtatgcagattggcgaaatctcaaagccgtttacaatgatta

SEQ ID NO: 1134 - DNA, 24524 bp, synthetic construct
  misc_feature 1..24524: note = Synthetic
  source 1..24524: mol_type = other DNA
cacgacttattgtattatttcccctataaatatgtagaccgtagccgtatctattatatccatgagatagacggtacgatgccttatatccagttgaaaggcgaaatcctgggctttgagacgattggagaaggtaggcagcgccgtctgattgcccatttctcggatggtacggggattgtggatttagtctggtttcagggaattaaatttctcgtcggtaagtataaggtacatcaggaatatattgtatttggtaaacccagcgtcttcaacggacggatcaatattgctcatccggatatcgataatgcttcggaactgaagctctcgacaatgggattgcaaccttattataatacaacggagaaaatgaaacggagttccctcaattctcatgcaattgagaagatgatgagcgccgtagtgcagcaactccgcgaaccgctgcccgaaacgctttctcctgctatattaacaaaacatcatttgatgccactgacggaagctttggtgaatattcattttccggcaaatccggaattgcttcgtaaagcgcaatatcgcttgaagtttgaagaacttttttatgtacagttgaatattctccgctatgccaaagacaggcaacggaaataccgtggatatgtatttgaaacggtaggagagatattcaatactttctatgccaagaatctgcctttcgaactgacaggtgcccagaagcgtgtactgaaagaaatacgccgggatgtggggagcggtaagcaaatgaaccgtctgttgcaaggggatgtaggtagtggaaaaacgttggtggcactgatgagtatgctgatagcgttggataacggttaccaggcttgtatgatggcgcctaccgagattctggctaaccagcattttgaaacaatccgcgagttgttgtacggaatggatatacgtgtggaattgctaaccggttctgtgaaaggaaaaaagcgggaagccattctcaccggtctgttgacaggagatgtacgaatactgatcggtacgcatgccgtgatagaggataccgtgaatttctcttcactggggctggtcgtgatagatgaacagcaccgtttcggtgtggcacaacgcgcacgtttatggactaagaatgcacagcccccccatgtgctagtcatgacagctacccctattccgcgtacgctggccatgacattatacggtgatctcgatgtttccgtcattgatgaactgccgccgggacgtaaacctattgtgaccattcataaatatgatgcgcaccgtgtaagcttgtaccaatccgtccataggcagattgcagagggcagacaggtatatattgtatatcctttgattaaggaaagtgagaaaatcgacttgaagaacctggaagaaggctaccttcatatttgtgaggaatttccggattgtaaagtctgcaaagtacatggcaagatgaaagcggctgagaaggatgcgcagatgcagctttttgtttcgggcgaagcacagataatggtagcgactactgtgattgaggtaggcgtaaatgtaccgaatgcttccgtgatgattattgagaatgcagagcgcttcggtttgtcacagctccatcagttgcgtggtcgtgtaggtcgtggagcagaacagtcttattgtattttagtgaccggatataagttggtcgaggaaacccgcaagcgcctggaaattatggtacggacaaatgacggctttgaaatagctgaagccgatctgaagctacgaggtcccggtgatttggaaggcacacagcaaagtggtattgccttcgacctgaaaattgccgatatagcacgtgacggacagctactgcaatatgtgcgcaatgttgctgaagaagtggtggatgctgatcctaccggtattcgtccggagaatgaaatcctgtggcgccagctaaaggcacttcggaaaactaacgttaactgggcttccattagttgaataacggttaaacatacactttatttgcatttttatgttgtaaaacatataagtccttatcttgccgatatacagggagttaggaggtgatttgatatgtaccttttagtcccttaccgaaaaaatagttaagaacagccttttcatttagagaagaaatactacctttgggagaattttttaaaagaatgacgaaacggaatgaatttcaattgcattaaaacgatcctaatagctgcgacggcaatggtcagcctgaattctttttctcaggatttgattgcccgacaagcccccatcgacaggaaactaaagagcgttgactcgttggctttacagaaacagatacgtgctgaacaatctgcttatccaggtctaagtctatatccgacttggaacaatgagtatgtacaagcttatggcgatgctatcgttcctgaaagctataaagtggacctgacaggtttctgtatgcctaccacgcatacgaagattaccgatgtatttggctatcgtcccagaagacgcagaatgcactatggcttggatgttaaagtattcatcggtgatacgattcgagctgctttcgatggtaaagtacgcgtagtaaagaatcagggacgccgtggctatggtaagtatatcgttattcgtcatgacaatggactggaaactgtttacggacacttgtccaaacagatcgtggaaattaatcaattggttaaagccggagaacctatcgctttaggtggcaatacgggacgttctaccggttcgcatcttcactttgaaacccgtttcctgggaattcctatcgaccccgctttaatgtttgactttgaaaagcaagacgttgttgctgatcattatacttttactaagaccaagacttcaaaaggaactgctcgcagcatggcttccggtgaaggtttgttctataaagtgaagagtggcgatacattgtctaagattgcatcccgtcagggagtatctattgacaagctctgtcagttgaatcgcattacacggaaaacaatcttacgtccgggacaggtattacgttgttcgtaagatatcaataaacccataaagaagagggcactttaatataatttagagtgccctcttttcttttttctttaattattcctacctttgcaaccaatttgtaaggaaatgaaagataccaaacaacaatttgagcatgtcattgccatctgtcgtgatttgttctccaagaaactacatgattacggtccggcatggcgtattctccgtccggcttccgtgactgaccagatattcattaaagccaatcgtatcaggagtattgaaaccaaaggagtgacgttggtggacgaaggaatacgttccgagttcattgcgatagtcaactatggtattgtcggattgatacagttggaactgggatatgcggaatcagccgatatcacgaatgaagaagcaatggcgttgtatgacaaatatgctaaaacttcattggatctgatgcttgctaagaatcatgattacgatgaggcatggcgcagcatgcgtgtcagttcatacactgatctgatattgatgaaaatctaccgtacgaaacagattgaaagcctgtcaggacagactttggtttcggaaggagtggatgctaattatatggacatgattaattattccgtattcggtttgattaagattgaatttggagactaagcagaaacatataatctggaagagctgggtgaatgtttgccgctttttactggcggtggtatttatcttttccggctttgtgaaggctgtcgatccgttaggctctttttataagattcaggattatctgacggctttcggaatggccgcgtggtttcctacatatttgcaactactgtttgccatcgtattgtcggcgttggaattctccgtgggagtattcttgttcttcggtatacggcggcggtttgctacgactctagcattgttgctgatgatcgtgatgacaccgctgacactgtatctggcattagcgaatccggtgtccgattgtggttgtttcggtgatgcatgggtgttgacaaattgggaaacgttcggcaagaatgtggtattgtttattgcagccgtatctgtcttcaaaggtggaaaacaaatcatccgctttattacggcgaaaatggcatggatggtttccatgtatacgttcttttttgtgtttgtgctttcgttctattgcttggataatctgcctattctggatttccgtccttacaagatcggaaagaatatcaaagaaggcatggaaatacccgaaggagcaaaacccagtgtgtttgagagcaagttcattctggagaaagatggaaaaaagcaggaatttacactggataattacccggatagcacatggacgtttgttgaaacacgtacggtgttgaaggaaaaaggatacgagcctccgattcacgacttctctattgtaagtctggaaaccggagaggatctgaccgatagtattttatcagataagggatatacattcctgttagtagctcatcgtattgaaaatgctgacgatagcaatatagaccttattaacgagatctatgattatagtgtggagcatgggtacggcttttatgccctgacttcttcgccggaggaacaaatagagttgtggcgtgacaagaccggtgcagaatatcctttctgccagatggacgacatcactttgaagaccattattcgttccaatcccggactgatgctgataaaggatggtgtcattctgaataagtggagtgataacagcttgccggatgaatacgtgttgacggatagtctggataaactggaactcggtcagcagaaacaagaaagtgatttgcgcacgattggttacgttcttttgtggtttattattccgttgctgatggttatcggcgtggacatcctggttgtgaagcgcagggaaaggaagagagcgaaaaataaagtgattagcgatggagtgatgagtgataagcaagagcttcctcagccataaaccacaaattataaatcaaaaatacattaacccttttaataaataaaaaacaaaatgagaaaaaacattgttgcaggaaactggaaaatgaacaaaacccttcaggagggtattgctcttgcaaaagaactgaatgaagtattggctaacgaaaagcctaactgtgatgtaatcatctgtactccttttattcacctggcatcggttactccgttggtagaccccgctaagattggcgtaggtgctgaaaactgtgctgataaagaatcaggtgcttacactggtgaagtttcagctgctatggttgcttctacaggcgctaaatatgtaatcctgggtcactcagaacgtcgtgcttactacggcgaaacagttgccatcctggaagaaaaagtaaaattggctttggctaacggcctgactccgatcttctgtatcggtgaagtgctggaagagcgcgaagctaacaagcagaatgaagtagttgctgctcagttggcttctgtattctctctgtctgctgaagatttctctaagatcgtattggcttacgaaccggtttgggctatcggtacaggtaaaaccgctactcccgaccaggctcaggaaatccatgctttcatccgttcattagttgctgacaagtacggtaaggaagttgctgacaactgttctatcctttacggtggtagcgctaaaccgtctaacgctaaggaattgttcgctaatcctgacgttgatggtggcttgatcggtggtgcagctctgaaggtagcagacttcaaaggtatcattgatgcttttaattaatagataatggaagactgataattgataaccggtgaagtgccggttgtcggttatcagtctctataatcatattatcaaccgtctattattatattattcattatgaagaagcttggtttacttttaattgcatgctttgctttcgccgcttttgcttcggcgcagaataacattgtgaagagtttggaacgcaatgtgccgggacagggtaaggtaaccatccatcaggatgcccgcatcgaggccttgataggtcaggaatatatccccaacggaacggagaacagagtgcttaaaagtcagggttttcgtgtacaggtgtatgccggaaacaataccagtagagccaagaacgaagctcacgctgtgggctcacgaatcaaagaatatttcccggaactttctgtttatacctctttcaactctccccgctggctgtgccgtgtaggagacttccgcagtattgaagaagcagatgccatgatgcgccagttgcgtgctacaggcgtattcaaagaagtttctattgtgaaagagcagataaacatccccttataaaaacttactcatgttaggaaaagaagaaatcgtatctcctgcactggatgaactgaaagaacactatcagcgtattataactttattgggcgaagatgccgaacgcgaaggactactgaaaacccccgaacgtgtagcaaaggctatgctgagtttgacaaaaggctatttcatggacccgcatgaagtgctccgctctgccaagtttaaggaagaatacagccagatggtgattgtgaaagacattgatttcttctcactttgcgaacaccacatgcttccgttctacggaaaagcacacgtggcttatatccccaacggttacattacagggctgagcaaaattgcccgtgtagtggatatcttttcccatcgccttcaggtgcaggaacgcatgacgctccagattaaagaatgcatccaggaaacactgaatcctctgggtgtaatggtggttgtggaagccaagcacatgtgtatgcagatgcgtggggttgaaaagcaaaattccataacgaccacttccgattttacaggtgctttcaatcaggcaaagactcgtgaagagtttatgaacctcattcgccagaattcattcacataacaattccgtacgttatttcatgaaaggaaactacagttccatgaaggaaaactgttgttcccattaaaggaaacgcgcgttccctttaggagaaaccgtcgttctcattaggggaaactgtcgtttctgcatggggaaattatcgttctcattaagagtaaggtgatttaaccgagtacaactctgtctcccaaccgtttggccataatacttttgatctcacgcagttctgagtagcgtttcatgatagaggtgcattgttcttcatcattggctacggcaggatcttgcaaggcatacatcatgtgtttcatttcttcactgatgatggcgaacttgaaattaatcatgagcgtaggtaccaattcgaataggcgttcctcatcggtcaccaacctttgggctttggaatgatacttactcagttggtagcggtcggcaatcaactctgtacttagcttactgataattgggtcgggatgtgccaggaaataccgttctgcggtgaacccttcattatgtatatgctctgccgcttctatcaacatttgcctgtgcagcgggttgtggaaagccagttcatcctcctttaagtcattgactatgtattccgttaccgtgatgggaatttctttcccttcctcatcgggaacgttgcacaatattttctctccgtagcgtactaccatttgcaggataaggcgctcgtatttgtagaattcctgtccttcttttccctcctgtgggatataagatacgtattcggcagcttccggtggaagcggtgcaccaccgtcaggcatttctccatccatgggataaggaggcatgtcttcagggtagggtggttgcattccgtcgggaagcggtgcttgtgcagcgtcgcgggctgcattattctttcttgtttcccggtttctttgttccgcctgcttctcagcctgcgtttcgcgtcgtttggcaacttccgaaaccagcagtttgtcttctatacgaagcagctggctacattctttaatatatacatcgcggacaattgcttcaggaataatagatatactttgtacaagattgccgattaactcagcacgcttgatgggatcttttccggcatcttccagtaaaagatttgttttgaagcgtataaagtcagtttcattatcttgtatgaatttctggaattctgtagcgttgtgcttgcgtgcgaaggagtccggatcttccccatcgggaagtaggcaaaccttgatattcattccttcttccagcagcatgtcgataccacggagagaagccttgatacctgccacgtcaccgtcatagagtaccgtaatgttattggtgaagcggtgaatgagcttaatttgtcccggagtcagtgccgtacccgaagaagctaccacattctccacacctgactggtgcatggaaataacgtccgtgtatccttccaccaggaagcaacggtcttgtttcacaatagcctgtttggcaaaataaatgccatacaactcactactcttatgatagatttccgattcgggagagttgacatatttaactttgactcccttcgtcgcactgctaagcacgcgcccgccgaaagcgaccaccttaccggaaagtgtgtgcaccggaaaaatgacacgtccccaaaagcggtcacgcaggcggtgatcgtccgtttcgtaacaaagccctgtcttgacaagatattctttcttgaatcccttctttatggcttcctgagccatggcatcgtgactttcggtgcaatagcctaactggaacttttcgatgatatcatcccggaaaccacgattgcggaagtatgccataccaatgctacgtccgtccacatggtttttaagtatattttggaagtaatcacgtgcaaagttattcacaatgaacaaactttcacgttcgctctgcatcagcttctcttcactagacagttcgcgctccttgatttcgataccgtatttctttgccagatatttcagagcttcagggtagctcatctgctcgtgctccattatgaagtgcaccgcattgccacccttaccgcaggaaaagcatttgcacaaccctttggaaggcgatacataaaatgatggcgtcttgtcatcatggaacggacacaagcctacataattcacacctcgcttgcgcaacgtaacgaagtccgatacaatgtctacaatctgtgcggcatccagaattctgtctatggtaggttggtctatcattggataattgtttttgcgaatgcaaagataaaaaaaatcccccgttgaggacgagggaacctaatgttttcacaacggaatggtccttattgtgatttgcttcattggatgaatagcttagtagtggtaatgagatctttcctttcttctacctaaattgctgtttgtcagctttattattatattcacactaagtattaaaataattatctatcgttgttacgtctaaaattgctaaattctaagtaaagtactggtatcatattctatagtgagctgtgattcgcttcaaataagtattttaatatggaatttagcttttctatttccttaatgatatatatttatcactattagaatatacatcaatgaaggttgcatttttgccaaaatataaatcaaataatttcatatactatgaatttcttcgaatttcttcgaatttaaaggttttagaattagaatagatataaagctgtcagatataaaagtttcactattaggcggaatgaaaaataaaagaaagagactaaactaagaatctatgataataaaaaagcccccgtaaaaggacgagggcaacctaagtgttttcacaacggaataatccttattgtgattcgcttcaaatagtatgctacaaatatagacaatattttgataaatcgtggttttatattctttttttattaactttgtgagaatgcataataaaataatgataaaatgaaaaaaatactgggattagatttaggtacaaatagtatcggttgggcagtggtgacttctgtaggtgaaggacagaatgaaaataggttaatagaactgtctggtagtcgtattataccaatggatgctgcaacattaggtgactttgataaaggagtaactaaatctcaaacttctgaaagaacaacattcagaggcatacgccgacttcgtgaacgtggcttgttgcgacgcgaaaggctgcataaagtgttgaaaatacttggattcctgcccgaacactatgcaaacgaaatagattttgatcatcatcctggtaaatttaagccggatgttgagcctaagcttccatggaagaagaatgaaatgggacaatgggtgttcctttttcagaattcgtttcaggccatgttagctgatttctctcactatcaaccagagtgggtagctgatagtaaaaaagttccctatgattggactatctattatttacgtaagaaagcgttaacagaaaaaatatcaaaggaggaattggcatggattcttttgaattttaatcagaaacgtggttattatcagttgcgtggcgaagatgaggaagagtcatctaataagttaaaggagtattgtgctttgcaggtagttcgagttgaagcgactgacgaaaaaaaaggaaaggaaacatggtataatgttcatttggagaatggttggatttaccgtagaacaagtgctgttcctcttaagtgggaaggaatggtgaaagaatttattgtaactacagatttgaatgaagatggtactccgaaattagggaaggatggaagtgtaaaacgctctttcagtatacctaaagaaggagattggacgttgataaagaaaaaaacggaagctgatattactaaaagtaacaaaacaatcggaacttatatttatgataccctgttgcacaatcctggtcagaaaataaagggacaactgatacggactgttgaacgtaaatattataaagaagaattgcgagctattctgttgaagcaaatatccttccattccgaacttcaggacaacgatatatttaaaagatgtgttgaggcactctatccgaataatgaagttcataaaagaaatattgctaatcgggatttcgtttacttatttatagatgatattttattttatcagcgtcctttaaagactaaaaaatcattgattgacaattgtccctatgaggagaatcaatatgtagataaggaaaccggagaaataaaacgagcttccattaaatgtattgctaagactcagccactttttcaagagtttcgcttatggcaattcattgataatatccgtatctataaaagagaaaaagaagtagatgggaggctacaaacagatgtagatgttactgtcgatttccttaaaacagaggccgattatgttgctttgtttgagtggttaaatgataaggggaaaatagatcagaagtcttttcttgctaatcctgcatttggtattaagaaagtagcagaacaatatcgttggaattatgtagaagataaatcttatccatgtaatgaaactcactctttaattttgtccctgctagaaaaatcagaaatatcaaccagttttttatcggaagagggaggaagagaagaggcgttgtggcatattctttattcagtcgaagataagcaagaaatcgttaaagcattgacaaagtttgcgactaaatataatttaccgaatcgttttgtagaagtcttctgtaaatgtccgccgtttaaaaaagagtatggagcctattcggcaaaagctatcaagaaacttttgccattaatgcgaagagggaagtattgggctgacacggctattgatgataagacggctgaacgcataaagaaaattataaatggggaatttgacgaatctatatgtaaacaagtcagagaaaaatgtgccaatctttcaacattgaatgatttcaggggacttccgttatggcttgcttgctatatagtatataacagacattcagaagcgaaagagactacaaaatgggaatctcccgaggatatagatatttatttgaggaattttaaacaacattcattgcgtaatccgatagtcgaacaggtggttttggagacattgcgtaccgttcgtgacatttggaaaaaggttgggcggattgacgagatacatgtggaactggggcgtgagataaaaaactcatcagagaaacgtaaacaaatctccgagcagatacaggcaaatgaaaatgccaacctgcgcattaaagctttgttgattgagtttatgaacccggaatttggagtggaaaatgtacgcccttattcacccagtcagcaggaattgttgcgtatatatgaggatggggtgttgaatagcgtggaagagttaccggatgatattgccgtttttttgaagaaatttgatgttatgaggcagccgactcgttcagagttcttacggtataaattatggttagaacagcgatatcgttcgccctatacaggaaatgtgattcctttgggacaattgtttacaccggcttatgagatagaacatattataccgcaagcacgttattttgacgattcatttagtaataaagtaatatgtgaatcggcagtgaataaactgaaagataatcttttaggatatgagttcataaaggagcatcacgggagaaaactttctgagcatattcaaatattttctgttgaggcttatgagacattcgttaaggaacattatgccaagtcgagaaataagatgaagaagttgctcatggatgaaattccagaaaagtttattgaacgccagttgaatgatagtcggtatatcagtaagttagtaaagaggctattatctaatattgttcgtgaaaaagataaggatggtgagtatgaacaggaagatatttccaaaaatatggttgtttgtacagggaccgttaccgataggctcaaaagagattggggtatgaatgatgtatggaatcagatagtgtatcctcgttttgaccgattgaaccatttgactgatagttgtcagtttggtgggtgggaagataaagcaggtaagagggttttccagacagcaatgccgcttgaataccaaaaaggttttaacaagaagcgtatcgaccatcgtcatcatgcaatggatgcaattataatagcttgcgctacacgaaatcacgtaaattatttgagtaatgagtcggcaagcaaaaattctaaagtctcccggacagatttacagcgacaattatgtgataaaaagaaaacgaatgataagggggattatatatggagtattaaaaagccatgggatacatttactcaggatgctcggaaatcattagagcatattattgtgggtttcaagcaaaatctgcgggttataaacaagtcgtccaatacttatcagtgtttcgatgaacatggaataaaggtattgaagaagcaggtgcatggagataatcttgcaatccgcaaacctatgcataaggatacagcctttggaagtgtcaacttgagaagagtaaaagaggctcgattgtcggttgcacttgatgctccatctatgattgtagataaaaagatgaaaaagaaggttctcgaactcatgtcatataaatatgataagaaaggtattgagagatattttaaggagaacatctatttgtggaagaatttgaatttatcgaaagttcctgtttattattttacagacaatacttccgaacctttggtggcagtgtgtaaacctttggatgctagctttaatatgaaaaaaatcaaagaagctgtgacagatactggtatacaaaaaatacttctgaagcatttgtctaataatgatgataatccagcattagcattttcaccggatggtatcagtgagatgaataaaaacttaactgttttgaatgatggcaagttacatcaacctatctatagagtacgcgtttatgaaccaaaaggcaataaattcaatgtaggtagtgtggctaataagcgttctaaatatgtagaagctgccaaaggaacgaacttattctttgctgtttaccagacatcttccggtgatcgggtctatgaaaccattccattgaatattgttatagaacgtctgaaaatgagatggactcccgtaccagagatgaatgctaagggagaccgattattgtttacgttatcacccaatgatttggtatatatacctacggtagaggagtgtgagtcaggtaacatatcccctgaaatagatagtagaagaatctataaaatggtttcttcgtccggtccacaatgcttttttgtacctcatacggtagctaatccgatcgtttcaactcttgaattaggagctaataataaagctgaaaaatcatgggatggggaaatgataaaatctatttgcgttccagtcaaggttgataagattggaaatataataagtataggtggaaggaaaaacttatgataaaaaaaactctttatttcgggaatccggtttatctctctttacgtaatgcacagctagtgattaagttgccagaagttgtgaagaatgagtctctacctagcgctttcaaagaacaaacggaagtgacaaaaccagtagaagatatcggagttgtggtattggataataaacaaataactattacttcaggagtcttggaagcgttgcttgaaaataattctgctgtgataacttgtgatagcaaaagcatgccggtgggattgatgcttcctttgtatggaaacacaactcagaatgagcgttttcgccagcagttggaggcatctcttccattaaaaaaacagctttggcagcagactatccgtgcaaaaatagagaatcaagctactgctttgcggaagtgtataggtgaagaaatgaaatgcatgcgtatatgggctgcagatgtaaagagtggagattctgataatttggaagctcgtgcagcagctttctattggaaaaacttgttttccaatattgatggatttacaagagagcgtgagggaattccgcctaataatctgttaaattatggatatgctattttgcgtgcagttgttgcaagagctttggttacaagtggacttttgccgactttaggtattcatcaccataatcgttataatgcttactgtctggcagatgatataatggaaccttatcgtccttatgtagatgaattggtttttggtatagtgagaagtgggatgaggtatgaggaattgacaaaagagttgaaaatacaattattgggtattcctactttggaagttaggattgatggtaagaggagccctttaatggttgctgtatctcaaacaactgcttcactttataaatgttttagtggagaggtgcgtcgtattgcctatcctgagatgtgatggatcgttttagtgaatatcgtattatgtggctattggtttttttcgatttgcctactgaaacaaagaaagagaaaaaggcgtatattgattttaggaaaaatcttcagaaagatggtttcacaatgttccagttttcgatttatgtgcgtcattgtggtagtagtgaaaatgcggaagtacatatgaagcgggttaggtcatttttaccggaacttggaaaagtgggaattatgtgtataactgataagcagtttggtgctatcgaactcttttatggtaagaaagtgcaggaaataaatactccagggcaacaacttgaattattttagaattaaaaaatcccgctattaaacgggattttctattacaacagcatctgttttttatattcgagtttctactgtaaatgcttgtagtacagtctactgctggtgatgagctgttgcttatcctacaaagatactattttgaaagcgaatcacagctagcggcaaccttgtagaacgccatttccgctgttgcttatcctacaaagatactattttgaaagcgaatcacagcggaaaatgttctgaacgtcttcacgggttagctgttgcttatcctacaaagatactattttgaaagcgaatcacagcggggatagggatcggagaactccaagagcgctgttgcttatcctacaaagatactattttgaaagcgaatcacagcgaacttctctacgatagcaacgcaattatgctgttgcttatcctacaaagatactattttgaaagcgaatcacagcaataacctaatgaagaaataaaaatgggaagctgttgcttatcctacaaagatactattttgaaagcgaatcacagcaaagaaccgagacgggaaatcagcctcacgctgttgcttatcctacaaagatactattttgaaagcgaatcacagctgggagaactgaatagctggttttatcttcgctgttgcttatcctacaaagatactattttgaaagcgaatcacagcagcgcagcttacttcccctgacctcaataagctgttgcttatcctacaaagatactattttgaaagcgaatcacagcgtcagagaagatggttttcactttagtgacgctgttgcttatcctacaaagatactattttgaaagcgaatcacagcatctcggcatgtatattggaaatcctgaaggctgttgcttatcctacaaagatactattttgaaagcgaatcacagcgagggtgtaagtgatgatatcactaatagagctgttgcttatcctacaaagatactattttgaaagcgaatcacagcttctgaaatcgtcattgatagtatatatcgctgttgcttatcctacaaagatactattttgaaagcgaatcacagcatcctgtggactctaactcttttaatttttgctgttgcttatcctacaaagatactattttgaaagcgaatcacagcaaccttattaggacctaggaaagtatcaatgctgttgcttatcctacaaagatactattttgaaagcgaatcacagcagagatggctatggatgcattaataggtatgctgttgcttatcctacaaagatactattttgaaagcgaatcacagcggctttacgtattaatatcatgtcaagtaggctgttgcttatcctacaaagatactattttgaaagcgaatcacagcatatgagcaaaggaaaagaagtgagtgtacgctgttgcttatcctacaaagatactattttgaaagcgaatcacagctggaaagatagagcttattagccggatcgtgctgttgcttatcctacaaagatactattttgaaagcgaatcacagctgctgcttaacgatggcgcgtaaataagtgctgttgcttatcctacaaagatactattttgaaagcgaatcacagctgtagcagttgcggccgatgaagcatcaaagctgttgcttatcctacaaagatactattttgaaagcgaatcacagctgattatcccggtaatattccagttcttccgctgttgcttatcctacaaagatactattttgaaagcgaatcacagcgaatttgtgagcaaacataacgctaaacaggctgttgcttatcctacaaagatactattttgaaagcgaatcacagcgaaatgaaattcccccatggcataaagattgctgttgcttatcctacaaagatactattttgaaagcgaatcacagccaggtaaaccaagtatgcattcccataattgctgttgcttatcctacaaagatactattttgaaagcgaatcacagcttcatcaggaacaactaatgcattgggtcagctgttgcttatcctacaaagatactattttgaaagcgaatcacagcagaatatgggtgtcaactatgtagataatggctgttgcttatcctacaaagatactattttgaaagcgaatcacagcaagcttttgaaattattgttgctaatgcagctgttgcttatcctacaaagatactattttgaaagcgaatcacagcttcgttacgcatttccagaacgtccagaacgctgttgcttatcctacaaagatactattttgaaagcgaatcacagccttgacattatccctcgtccagttgttaagctgttgcttatcctacaaagatactattttgaaagcgaatcacagcctgaaacagagttggcaggctttattcaaggctgttgcttatcctacaaagatactattttgaaagcgaatcacagcatccgtttattggcaatccggatttatcgggctgttgcttatcctacaaagatactattttgaaagcgaatcacagcaccaagaggattgaggaactgtaatcccggcgctgttgcttatcctacaaagatactattttgaaagcgaatcacagcaggaagaatgttataagcaatcaacttcttgctgttgcttatcctacaaagatactattttgaaagcgaatcacagcataattcagtagatgaatattgggataggtgctgttgcttatcctacaaagatactattttgaaagcgaatcacagcataagctcattagggtcatttattaactcgctgttgcttatcctacaaagatactattttgaaagcgaatcacagcgtacaagaggtaacattagaacaacctcctgctgttgcttatcctacaaagatactattttgaaagcgaatcacagcaagggtgatgcaaataattcccgtaaccgtgctgttgcttatcctacaaagatactattttgaaagcgaatcacagcaccattacaccctcgtattcaccagttccggctgttgcttatcctacaaagatactattttgaaagcgaatcacagcaatatcaaatgtggattcgcttcagattcggctgttgcttatcctacaaagatactattttgaaagcgaatcacagcagataaccgagtaaatccaattctgtaacgctgttgcttatcctacaaagatactattttgaaagcgaatcacagccagtaacatgcaaagtgcccttacctcactgctgttgcttatcctacaaagatactattttgaaagcgaatcacagccattttttttcattatattatacttagctagctgttgcttatcctacaaagatactattttgaaagcgaatcacagcctataaagccacaaacctccgattatccccgctgttgcttatcctacaaagatactattttgaaagcgaatcacagccggtacgcctataaatcccatcggctactgctgttgcttatcctacaaagatactattttgaaagcgaatcacagctttaaagcctctgcaaacttcggaagtacagctgttgcttatcctacaaagatactattttgaaagcgaatcacagcatgtaatccactgtgcgaactatgcttgaagctgttgcttatcctacaaagatactattttgaaagcgaatcacagctgacatgcttctccaaccgaaaggtagagggctgttgcttatcctacaaagatactattttgaaagcgaatcacagccaaagaaataattgaagtaaagccaatgtgctgttgcttatcctacaaagatactattttgaaagcgaatcacagccaaagaaataattgaagtaaagccaatgtgctgttgcttatcctacaaagatactattttgaaagcgaatcacagccaaagaaataattgaagtaaagccaatgtgctgttgcttatcctacaaagatactattttgaaagcgaatcacagctagaggaattaggtgattgcacatcagtaagctgttgcttatcctacaaagatactattttgaaagcgaatcacagccaaatgagtatgatacaggaataacaattagctgttgcttatcctacaaagatactattttgaaagcgaatcacagcacattctacaagaattatatgacgcaatcgctgttgcttatcctacaaagatactattttgaaagcgaatcacagcctcactatgtcggcggttcgagtccgcccagctgttgcttatcctacaaagatactattttgaaagcgaatcacagcctattgtcaatagtgtactgatagccacttgctgttgcttatcctacaaagatactattttgaaagcgaatcacagcaacagaaagccgcagcggcagaaaacaatggctgttgcttatcctacaaagatactattttgaaagcgaatcacagcacgttcatattccagtaatgtttcaagaaagctgttgcttatcctacaaagatactattttgaaagcgaatcacagcggtaatacaggaggtatcgttttgaatgatgctgttgcttatcctacaaagatactattttgaaagcgaatcacagcacgctaattcataaattctaattcacaaaagctgttgcttatcctacaaagatactattttgaaagcgaatcacagcgagaatatatgttgagcgaaattaaagtaagctgttgcttatcctacaaagatactattttgaaagcgaatcacagcgtaatcaataaactccagtactgacatcgagctgttgcttatcctacaaagatactattttgaaagcgaatcacagcaagatcaagaatggatcgaagaaggcgattgctgttgcttatcctacaaagatactattttgaaagcgaatcacagcacagccgccaccgctatgcgtctacgttgcgctgttgcttatcctacaaagatactattttgaaagcgaatcacagcaacttgatgaagtttagtactaaagctagcgctgttgcttatcctacaaagatactattttgaaagcgaatcacagcatggtgtattagtacctatacctacttgtgctgttgcttatcctacaaagatactattttgaaagcgaatcacagcaaggtggcgtaggaatgagttgctatgattgctgttgcttatcctacaaagatactattttgaaagcgaatcacagcatgatataatagatgccgaggtagtcgaagctgttgcttatcctacaaagatactattttgaaagcgaatcacagcacaggcgttgtacattgtacaggatttaacgctgttgcttatcctacaaagatactattttgaaagcgaatcacagcttaaaaacgaacaagcattcattgattcactgctgttgcttatcctacaaagatactattttgaaagcgaatcacagcggtatctcgcaggtgaaaacaaagttttacgctgttgcttatcctacaaagatactattttgaaagcgaatcacagcgagaaaaagccgcaggtattaaacacttgcgctgttgcttatcctacaaagatactattttgaaagcgaatcacagcatagaccctgtaatgtgttaatgtgttgatgctgttgcttatcctacaacgatactattttgaaagcgaatcacagctaacccatatatgctatttcacccagaatagctgttgcttatcctacaaagatactatttttttaagtgaatcataaccatatccggctttagctgatattttgcatctactattatttatcctacattacaagcatatccctacctaatcctaaatatcatcccctctctttattaacgaattgaagagagaagccccacttccttttccgtacccctcctctcttcaatcccttaatctcacctatctattttatcttctccctaatcttcgtcagatactgcttcatcccttccgcatctttcgtactgataatttccagcaaattctttagctccagacgaatattttccacttgcgagggagtgcgcggattaaagagaatttcctgaagcaagtaatcatcctcactcagcaaacccttggcaatagccatatgcttcttgaacgtagtacccggagcctcctggtgcttcatcaccgctgcaaaaacaaacgtagagacgaaaggaatagacagagaataagctaccgtctcatcatgctcgtcgaaagtatattcgaagatattgaggcggagcgtctggtaaaggtccttgaagaaaatttttcccaggtggtcaccttcactgatgatgatagcattctcgctgctcagattgctgaggctggcaaacgtagggccaaacatcggatgcgacgatacataacggaaaccactttcctcatagaatttcttcaatcccgtcttcaccgaggcgatatcactgatgatacaatccttgggcagcacaggcagcaccttgcggaatgcgtccagcgtatatctcaccgtggcggcattgattaccaactccggttcgaagtcctttatctcttccaacgtggtgaaacgatacgtgttgtagacaaaacgcaactggtgcggattcacgtcgaacactgccgtttcatgttggaaacttagaatatctgtaaagaaagagcccatcttgccggctccgagtattaaaatacgcataaatttagtgtttaggtattaatgattagtgataagtgaaagatagcgtagccattaatcacttatcaccagtcgctaatcacttgtttataatttccatttgttgcctcacactctcctcgtgtatcagctcgaataccttcttgataaattccgaatccacgcccagaagcacaccttgagaaccgcgtttgtccagaatttcattgtaacgtcccgtttgcagaatcgtcatatcgtgttctttcttgaacgtaccgatttcacgtgccacacgcatacgcttggcaagttcctgcatcaggttgttgtcgcactcgtcaatctgcttacgcagttcactgagattttccgtggtctgtgtctctttacggatgacgagtaagttcaggatgtaatccagtacatccggagtcacttgctgcgaagcatcactccatgcacagtcggggttgcagtggctttcgataatcagaccgttgaaaccgaggtccatagcctgctggcaaagcggtgcgatgagttcgcgcttaccaccgatatggctgggatcgcagatgatcggcaggttcgggatgcgacgacgcaactcgatggggatatgccattgcggcagattgcggtacaacttcttgtcgtaactgctgaaaccgcggtggatggctgccagacgtttcagaccggcattgttgatacgttccagggcaccgatccagagttccagatccgggtttaccggattcttcacaaacacaggaatatccacccccttcagtgcatcggcaatttcctgcatggcaaacgggttggcagtggtgcgtgcgccaatccaaaggatatcgatacctgctttcagacactcgtatacatgcttcgaagtggctacttcggtagaaacgtacattccggtttcttttttcacctctttcagccatgccagaccgtctacgcctacaccttcgaaaccacccggtttggtacgcggtttccagattccggcacggaatatcttcattcctttttcggccagttgcttggcggtgcacattacttgttcttctgtctcggcgctgcaaggacctgcaattaccatgggacgtttgtcctcaacgcccggcagcaaaatcgattctaattcaagttccatattcttttatttttgttcaattatatttttattgtatagatatttctcagtgtcttctgaaccctctgtaacccccgtcgataaagcctttcgaacgtgttaataaatacaggcctcgttttttaaaacggtgagtgacttgtgctacaggacttcttttttgtaaatatattacttcatctccctgatgcgcttcaatgcctcttccaatttatgatctttgcagcaaagcgagatgcggatataccgttttccgttacttccgaagataaatcccggtgtgatgaacacgcgtgcgttgtgcaacaccttttcagtcagttcttcaacgtcggcacagctatcgggaatttttccccagaggaacatacctacctgtttttcatcgtatgtacatcccagtgcgtgcatgatttcccctgccagatggcggcggttgcggtagttcttgttatttccgtcgtaccattcctgttcggcttccagagcgttggcggctgccagttgcatggcgcggaacataccactgtcgatgttgctcttcactttcaggatccattgcacaaagtcggcgttgcttgccagcataccgatacgccagcccggcatattgtggctcttgctcatggagttgaactcgatgcaacactctttggcgcccggtacattgaggatgctgagggggcggtcgttcaggatgaagctgtacgggttatcgtttacaatcacgatgtccttgcggcgtgcaaagtccaccagttttgcataaagttccggggtggcgttagttccggtcggcatgttcggatagttggtccacatcagctttacgcggctcatgtccatcttttccagttcgtcgaagtcgggcatccagccgttttc

SEQ ID NO: 1135 - DNA, 24524 bp, synthetic construct
  source 1..24524: mol_type = other DNA
  misc_feature 1..24524: note = Synthetic
ggcagccccttgtgcaatcagttcggtattggagttatgcttgtctcctgtcacaccgtcggccaccgtagcggacagcaacgattcgatcgctcctaacatcgcgatggtaaatgcggaaggaagcaaaaggttgatcgtttccatattgaagttgatcgtttccgggcagggaagggaagcattgatcgtaaaacggtctccgatcgtttcgatccccgtgattcctaaatgatagcgcatgacatagacaacaactgtcatcagaataatggcaatcagcgaacccggaatctttttagaaaatttcggtgtgacggcgataatcacgatactggcaagcccgatcagcaacgaccagagatttatcgtgtcgaaatgttcgaaataggcgatccatttagaaatgaaatccgcagggaccttatccattgtcagcccgaaaaggtctttcatttgcgtggtaaaaatagtgagagcgataccactggtgaaaccgacgacgatcgggtaaggaatgaacttgataaccgtccctaacttcaacgcacccatgatcaccaggataataccagcgactactgtggcgatagccagtccttcgatcccgaaattctggataatgccgtatacgattacgataaacgcacctgttggcccgccgatctgcacattgcatcctcctaacaacgatacgaaaaatccgccgagaatagcggtgatcaaccctttttccgggcttactcccgaagcgataccgaaagcgatagcgagtggcaatgccacgatcccgacaataataccggccatcaggtcggtcataaatttctccttagagtagtttttcagcgtcgatactaacttgggctgaaaatcaaacttgttcttcatctttctgcctgattgattaaaagtgctgcaaagttacaaaaaaaagtgaatatgtttttagcttttttataggtttatatgaatctgttgttgcggtggaactttctgcctcttgccaagcaatctgcgattagatgcttaagtaatttattttcgacgttgtcaataatgttttcgacgttgtcgtatatatactcgacaatgtcgtgtatatatacgacaacgtcgaaaacagattagacttgcgtgaaattaaaaagtatatactgcatcttcgtgtttccgtacaaccgcaccggatatcaaagtcctgcgtacatcaaccctgtcgtgcattttttctcgttttttacgaacgctaaaatagggataattttggtgcggttgctctataaatttatttgttttatatatgtttcctatgggaaaatcaataaagtttttacctttgcatattatcaacttatggttgataataggagtaaaataaagattatcagttataaagaatgatgataactttgttgatagactgtaaatagcggtttatgctcattagcgattattgaattttacaatcatttaatacaggtaactatgttgacaaaccaatcgatcggatatatgaacgcacccattccaaaggggttggacttgaaggaagaaataaataggatgcgtaaagaaaaaaacgccgttatccttgctcattattatcagactggtgatatccaagatatagcagattttgtaggagacagtttggctttggcgcagcaggcagccaagacaacggccgatatcattgttttctgtggtgttcattttatgggggaaacggcgaaggtgttgtgcccggacaagaaggtgttggtcccggacctgaatgccggttgctcattggcagatagctgtccggctaccgattttgcagaatttgtcaaacagcatcccgatcatgtggttatttcgtatgtaaatacaactgctgctgtaaaggccgtgacggatgttgtggtgacgtctaccaatgcacgccagatcgttgaaagttttccggaagatacgaagattatctttggtccggaccggaacttaggtaattacataaacggtattactggacgtaggatgctactttgggatggtgcctgccatgtgcatgaacagttttcactggaaaagatattggaattaaaaaaacaatatcctgatgcggaagtcattactcatccggagtgcaagcagcccgttgtacaagtctcggacttcgtaggatcgactgcggctcttttgaagcatactgtcaagtcggataaaaaacaattcattgtagcgacggaaagcggcgttattcacgaaatgcggaaacaaagtcccggtaaagagtttatcccggcccctcctgccgatagtacatgtgcctgcaacgaatgtaattttatgcgcctgaacacgatggagaaactttacaactgtttaaaatacgaacttcctgaaatctttgtcgacgaacaagtacaggagaaagccatccgtccgatcaagaaaatgttggagatatcggagaggttgggattgtaagattgtttggtaaacaaaactcaataaaatgggagaggggataaaattgtcttgttcccgtgccaaacgcaggaacaaggcaatttaacataccactctcttttatttaataactgcaattttagtaactacgctttcttttgaatcttcggtagcagaaagtactaaatatatacctgaagcaacacggacacctttggtattctggcagttccaaataacctgtccacctaaagatttagtctgatagactaggttgccattcagatcggtgatttttacgatcgagttatccatcaatcccgtgatggttactttgtccctgtattcaggtcgtacgggattcggatatgcatacacatctgaatagtcatctttaccttttgtcgcttctcctttgtaggaaaccaagcctttgtcggaaccgatgaacacttcgccagtgttttcattaatttctatggaatatattttgtcagatagtagcggactgttggatgtattgaactgatggacaatttcctgattgtcttcgctcaatacataaacaccgttgccatccgttccgatccattttcgatttccgttgtctactttaatggtcgttattatcgtattatcgagaaaataataaggagttccttcttcattgattagttttatacgtgtgcaacgtatagattggttgttttctgtcgttgccaacttaggatttgttaagtatatagctcctttattggttcctatccatatatatccgtttttgtcctctgccatacaagtataattattgggagaaaagtcattaccatctgtatcaatgaagtttttaaattcatatgacgttgcttcatctaaagagctgctgttggttacgactgttagacaggcttggttggcaggacgggaaatattaatccatttatcgttattcgaagtgacgagtatgtcatttattgtgtatttcccgtttaacgattcgacagacaggctgtgccattttccttctttatccaatatcttgatagctttgctgacttctgaattagtcatccataggttttcttccttatcaaaagcaagtccgtctacacgacaataaaaaccttcattaccatgtgcattttcaagcgggctgtttgttttgttgtaaacgatagaaggctctctgtcaatgaattgaaaaacaccataaccaaaagaagatacgtaaataatctctttttcagcatcatttgtgacgacaatgctggtatagtctttaggccatgtattgagtttattctgaacgtcggaaggttctaatacactccatttttcatagtcgtatatcatgattgagccggctttgttaaaggaattatccccagtcagattttttccaccaggtataatatatattttatcgttttttgatacgatatcataagaactgttggagtacgggccatccaaagttatggcttcatttacagcttcgaattggttggctccttttcttttgatagaacgtagacctttgcttccttcggctatccaatatttatcagtctgataagtgctgatatctttgatggataggttgttgatttggtcaaaagtgtttgtatctgtgaaaatataaacttgggatgtagctatgcaagccagtttttctcctataattttcatattgtttatttgtgcattgctgaccaaaggaactgtagttccatttgattcatagtagatacctttatttttagacaggtagaatagcttattcttaaataaggatattttgtctatggagttttcagatgggaatcccggaatcgaatatgttttccagtttgatccgtctaacagattatcattcaaagatgcatatatgactgtagacttttgatcttcttttgtagaagcatatatattattgtcggaaatagcacaggatgttatattcttagataagttataggtatcggttatttccttcttatccatgttgacaactactatgccagactgtatggataaataggcatattcgttataaatcataacggaattaagtgatttatctcttaaagaagttgtcgtgtacagataaggtatgttttttactgaaccttcttccagaatgtctatattgcagtttttataaacaatcaacagtgatcttgtttgtttgttgtaggaaatagactggatatctgtgtcactcagtccatttcctttgtaatattgtttgatgctgttatcttccttcccatatatgtataaagcaccttctgctatgacaaatacttggtcagcggattcttccacacaattggtattattgtaggaaaggtatgttttccatccaagcatgttgtcattatcattaactgataaagcagagaatgataataagaaaagtaagatgacagttaatatatttctcatattaattgcaatattaaaatgtgtaatctgataaaaaagcagtcaattttttgacagcctcggcacgatggctgatctggttttttatatcattgcccatttcagcaaatgtttcagaataggtatcgggaacaaatatgggatcatatccaaaaccacttccacctcttttttcatttatgatcgtaccgttgacaacaccttcaaacaaatattcttttccattcaaaataagggcgattaccgtacggaaacgggctttccggttttctttgttttccatttcatggagaagtttgttcatattggcttccgaatcatgtccagggccggcgtaacgtgccgaatatactccgggagcgttgtctagagcttctacttcaagtccggtgtcgtcagcaaaacagtcatatccgaaatgttcttttatgtaacgggctttttgcaaggcattgccttctaatgtgtctgctgtttcgggtatatcctcatggcagtcaatatctgagaggctaattatttcggtatatccagatataattttccggacttcatccagcttatgccggttgtttgttgcgaatacaagtttcatgtttgttgagtatgaataaaaaagcacttctatacgatattatatataacgtatggaagtgctttaaattgtttggatgattgttttatgtttttatctggtcaaacccttccccgtatactcctctgacgatgctttgggagatgaaggcctggtggtcgatttgttttaccaggcggaagatggagacggattctgattttttggccagcaatacaacaaccttgatcggtttgcgggaatatcctcctacgccgtcgaggatggtgcaaccacggcctaaatcattgatgatgtgttcggctatttcgtcatatttttgggaaaaaatcaggaattggacggattggcggtttccgttcaggacgacgtcaattatataattgcttacaaacatttcaacgaaaccgaagacgattttttctacatcgtggaacaggaaaaatgaagaaccgatgatgataaaatcgcagaacagcaaggctcgcccgatcgatatattcttgtatttgtttacaatagctccaacgatatccgttcctcccgtactaccgtttgccgagaagacaagtccgagaccggatccgcaaaggaatgcgccgatgatgatggacataaacggttgatcatgtaagagtggctctcctttcagaagccattcgaaaaatgataaagaagccgacaaggagaacactccgaaaatcgtttttatcaggaatttgaatcctaaaattttcagtgccgctaacagcaatacgatgtttatgacaaagtaagaaactgaaacagggattaattcattgctggcaaaaaagatcaaggcacaaataccactgactccaccggtgataatttcattcgacagaatgaaagcgttgaagccgaagccgtacaagagagtacctaacaggatcatcaggtaatcttgtacagcaaaatagactttgttgtttataagcttcatataaataaatttagattacgatgtttacaatctttccgggaacaacgataatctttttcggagtcttgccttccatccacttagcagaattttcatgggcaagagcggctttttctatctcttcgcggggcatatcggccggaagttccatactgaaacgggctttgccgttgaaggagatagcataagtgagcgagttttctttcaaatattcttcgttgtagacaggccattcggcatcgcatacggtggtatcgtgaccgcaggtatgccataattcttcagcagtatgaggagcgaatggagcgagcagaacgattaactgttccaggattgtccgtttgttgcatttcaggctgctgagttcgtttacacagatcataaaggcactgatggaagtgttgtacgagaaatgttcaatatcgtatgtcactttcttgatcagtttatgtaatgatttcaattcatcggctgtcggttctgcatccgtgatctgcaaggtgtccgtattgccgaagaacagtccccagagctttttcaagaagcggtgtacgccgtcgataccattcgtatcccacggtttggactgttccaacggacctaagaacatttcatacaagcgaagcgtgtcggcgccatatttctcgacaatcatatctgggttgaccacgttgaacatggatttcgacatcttttcaacagcccatccgcagatgtatttgccatcttccaatacgaattctgcatcgttatattccggacgccagtttttgaaggcttcgatatccaatatatcgtttgatacgatgtttacgtctacatggataggagtgacctcatactggtctttcaggttcagggatacgaatttgttggtgccgttgatacggtatacgaaattggaacgcccttggatcataccctgattgatcagtttcttgaacggttcctcttcacaaacgacacctaagtcaaacagaaatttattccaaaaacggctgtagatcaggtgtccggtagcatgttcggtaccaccgatatacaggtctacgttgcgccagtattcgtctacgtctttagcaactaaagcctggtcgttgcgcgggtccatgtagcgcaggtaataggcggatgaaccggcgaatcccggcatcgtacaaagttccaatgggaagatagtttcgttgtctattttggaaacttccgtaacttcctgttttacggtgtcccatgcccattttacggcatgtcctaaaggaggttcgcctgtttcggtcggcaaaaatttgtctacttcaggcaattccagcggcaacttgtctaccggcaacatctgaggcataccatctgcatcatagtagacagggaacggttcaccccaataacgctggcggctgaaaatagcgtcgcgtaaacgatagttcacttttacgcgtcctaatttatgttctgccacatatttcttagtggcggcaattgcttcttttacggtcaggccgttcaatgacaggtcgcaataaggcgctacatccggtcttggtgagttgcagacgattccttcttttgcatcgaaactttcttcgcttacgtcacagccttcgatcaatgggacaaccggcagattgaaatgtttggcaaacgcatagtcacggctgtcgtgtgcgggaacggccatgatagcgccggttccgtagccagccaatacatagtcgctgatccagacgggcacagcgtcaccggtgaacgggttgattgcatatgaaccgctgaatacaccggtgacagaacggtcggcaatacgttcgcgttccgtacgtttttttgtacggtccagataagcatcgacttcttgcttttgttggggagtcgtcaattgtgcgaccagttcgctttcgggagccagaaccataaaagtaacaccgaacatggtatcagcgcgggttgtaaagatggtaaactcaaggtcgctgtcttttactttgaactggatctcggcaccttcgctacgaccgatccagttgcgctgtgtttcttttaacgaatctgtccagtcaattgtgtccagtccgtccagaagccgttgtgcataagcggatacgcgtagacaccactgacgcatgatcttttgttccaccggatagccaccacgttcggaaaccccgttcactacttcgtcgttggccaatacggtgcccagtgcagcgcaccagtttaccattgtttctccccggtaagcaatccggtagttaagcaggatttcctgtttttctttttcgcttttggctttccattcattggcggtgaaatgcaattcttcgctgcaagcgacattcaagtcttccgttccggactgttcgaaagctgcaaccaattcactgataggacgtgcctgttttttgttgttgcagtaataactgttgaacatctggataaatgcccattgcgtccatttataatattcgggatcacaagtacggatttcgcggctccagtcatagctgaaacctattttgtccatctgttcccgataacgggcaatgtttttcttagtcgttacttctggatgctgtccggtctggatggcatattgttctgccggcagtccgtaggcatcgtagcccatcggatgtaaaacattgaaaccctgcaagcgtttgtaacgggaataaatatcagaagcgatgtaaccgagtgggtggcctacgtgcagtcctgctcctgacggataagggaacatgtccaaaacgtaatactttggtttgtcggtatttttttcgactttataaaccttattggcaatccagtattcgtgccactttttctcaatttctctgaaattgtactccatgatcgtttatcgtttattttatcgttttctatttaaagccacaaagttagtgaattttgtaatacatagaggtttgaagcagcaaattgcaagaatgagggtgtgtcaatttgatatcactggacgcagatgacgcagaatacacagacggacgcagatttattttgctgataattaataatatctgcgttaatctgcgctcgtctgcgttgtctgcgtcccatgaataccgatattcggcacaccctcattgtagatacccatctggaaattacaatatctccctttagatctaaaagatacaataaattgttggtttatagcaaaatgataaaaatgtctgtttcttaaaaaatattaccctataaggaaatttgaattagatggggtagaaaatcgaattagatgaggtagtagtttcgatttggacgaatggctttttacggaataatacaataagggggaaggaggatgaaaaatttgttggatagaatagacctgaaagtgtagagtgacttacaaaaaaatcccccgcagaagggcgagggaacctaatgttttcacaacggaataatccttattgtgatttgcttcattttagtttggcaaatgtaagaaataatggtttataagccaagttttttgaaaatgaaatttgtatatttgggaaaaatcaaaaaaatataccatgaaaagaatattagggttggatttgggtccaaatagcgttggatgggcgttggtgaattctattgtcaaagaacaaacagaacgtatttggatagaaatggctggaagtagaattatacctatggatgctgctgtattaggggattttgaaaaaggaaattccatatcacaaaccgcagaaagaactcgtatcagaggaatgcgtcggttacgtgaacgacaattattgcgtcgtgagcgtttacacaaagtattgaatatattaggttttttacctaagcattatcgagatgaaatagattttaataaacatcccggtaaattccttgcaaatacagaacctaaattaccgtgggttaagaatgaacaaggaaaatatacttttttatttctaaattcatttgaagaaatgttgcaagacttcaaagagcatcaaccttctatcgtatctgataagaagaaagtgccatacgactggacaatctattatcttcgaaaaaaagccttaacgcaaaaaatcagcaaagaagaattagcatggattcttttaaactttaatcagaaacgagggtattatcaattgagaggagaagatgaagaagaaaatacaggaaaacaagtgggatattacgccctgaaagttgtgtcagtagaagctacggatgaaaagaaggggaaagatatttggtataatgttcacttggagaacggatgggtgtatcgtagaagtagcaatgtacctttggactgggaaggtcaagtaaaggaatttattgttaccacaagcatcaatccagacggaactccccaattggacaaatcaggagaaataaagcgttcttttagagcacccaaagaagaagattggatgttgataaaaaagcgtactgagatggatattgaaaattcccaaaagacggtaggatgctatatttatgataccttactacaaaatccacaacaaaagattatcggcaaacttgtaaaaacaatagagcgtaaatactataaagaagagttgcgtcaaattttacagaaacaatgtattttacattgtgaattgcaagacaaaaatttgtataagcaatgtgtggaagccttgtatccatccaatgaagcataccgaacgaatattgttaatcgcgatttcgtatatttgttaatggaagacattctattttaccaacgtcctctgaaaagcaaaaagtcattgattgacaattgcccatacgaagagtatgaatatgttgtggacaaacacacaggggaagtaaagaaagctcatttaaagtgtatagctaaatcacatccgctttatcaagaattcagattatggcagttcttgtataatcttcggatatatcaaaaagaaaaagaaatcaatggaacgattcatactgatgttgatgtgacatccgaattcttgaaaatagaggatgattatgttactctgtttgattggctgaaccgccgagaaaagatagagcagaaaaccctcttgaaatatccagctttcaatattaaaaaagatgtggataatttccgatggaattatgtagaagataagacttatccttgcaatgaaacaagaagtcttattttgtcatgtttgaataaagctaatttgtcagaggactttctttcttatcaaaaggaagaagctttgtggcatatcttgtattcggtaaatgacaagcaggaaatagtaaaggccttacaaacatttgcccgaaaaaatggcttagacggtacttttgtggacgcatttaagaaaatacgtccgtttaacaaagaatatggagcctattctgctaaggccatcaagaaactattgcctttaatgcgaacaggtaaacattggaacgtggaatcgatagacggaaagactaaagaacggattgataaaatcatcaccggagaatatgatgaaaaaatcagtaatcgagttagagaaaaggcaatttatttgtctgacatttcttgtttcaaggggcttccgctttggttggcctgttatgttgtatatggacgacattccgaacaaaaagaaattacaaaatgggaaacacctgatgatattgacgcttatttgtcaacctttaagcagcattcattacgcaaccctatagtagaacagattattatggaaaccttgagagtggttcgcgatatttggaaaaaagcaggaagcatagatgagattcatatagaattaggtcgtgaaatgaagaatccagccgataaacgaaaacggatgactgctcaaatattggagaacgaaaatgcaaatttacgcataaaagccttgcttactgagtttatgaaccctgagtacgagattgaggatgtgcgtccttactctcctaaccagcaagagaaattaaggatttatgaagatggagcattgaacgctgcggaacaagtgccggaagatatagaaacaatactaaaaaaattcaaggaaaacaagcagcctactcgatcggagtttttacgttataaattatggttggaacagaaatatcgttcaccttatacaggagaacttatacctttaggaaaattatttaccgaagcctatcaaatagagcatatcattccgcaaaaacgatattttgatgactcgttttccaataaagtgatatgtgagtctgccgtgaattccttaaaaggggcacaattaggatacgagtttataaaagaacatcatggtgagaaggtagaaactggatttggcaaggtagtcaccatcttctccgttactgcctatgaacaattcatcaaggaacattacgctaaatccaaagcaaaaatgaagaaattactgatggatgacatacctgaacaattcatagaacgccaattgaatgatagccgatatattagtaaggttatcaaggggttgttgtctaacattgttcgtgaaaaagacgaatccggggagtatgaacaggaagctatttccaagaatgtcttggtttgcaatggaagtgtgacggacagattgaaaaaggattggggaatgaatgatgtgtggaataacattgtctatcctcgttttgaacgcttgaatacattgattggaaaagaatgtttcgggcattgggaaaataaaaacggaaagaggatattccaaactgaagttccactggaatatcaaaagggattcagtaaaaaacgcatagatcatcgtcatcatgctatggatgccattgtgattgcttgtgccactcgcaaccatataaactacttgaataatgcctcggcaagcaagaatgcccaaatttcgcgctatgacttgcaacatttgctttgcgataagacaaaaacggatgataaaggcaattataaatgggttatcaagaaaccttgggatacatttactcaagatacaaaaggaatacttgataacattattgtaagtataaaacagaatttgcgtgtcatcaataagacaacaaatatttatcagcactttgatacagatgggaaacgtactttttataaacagacaaaaggagacagttgggctatccgaaaaccgatgcacaaggacacagtatttggaattgtaaacctaagaaaaaccaaagaagttcgtttatccattgctttagatatcccctatttaattgtggataaaaaggtaaaaaagaaagttttccaactattgaaatataaatatgagaaaaaaagaatagagaaatattttaaagagaatgcttgtctatggaaagagctgaatgtggcaaaagttcctgtttattatttcactgaatcgtcttcagaacgaatggttgcagtacgaaagactattgatacaagttttaatgcgaagaagatacaggagtctgttacagacacaggtatccaaaaaattcttttaaaacatttggaacaaaaagatgataaggctgatttagctttttcagcagaaggaatagaagagatgaatcgcaacatcatagctttaaacgatggcaagaagcatcaactcatatacaaggtaagagtgtatgaaccacttggaaacaaatttaatgtaggcacaacaggaaacaaaggaaagaaatttgtagaagctgccaaaggaactaatttattttttgccatttaccggacagaagatgggaaacgcatatatgataccattccactgaatattgtcatcgaacgggaaaaacaagggcttcttcctgttcctgacaaagatgaaaaaggaaatactttgcttttctggctttctcccaatgatttggtatatcttccaacggaagaagagcgagaatttgacagaataaatgagccgatagataaaaagcggatttataagatggtttcctcatcaggtaatcaatgtttttttattcctgttaatattgcaaatgctattgttccaattttagaattgggagcaaataataaagcagaaaaatcatgggaaggtaacatgattaaaagtatttgtattcctattaaagttgaccgattagggaatatcataaaaataaaaaaagtataatgatatgagcaatatcaaacttttccaaaataaaaagattcgttctgtatggaatgaagaagaacagcaatggtacttttcagtagtagatgttgttggagcacttacagatagtgtgaatccaactgactacctgaaaaagatgcgtaaacgagatgaagcactggctaactacctggggacaatttgtccccaggtagaaatgatgacggaaacaggtaaaaaaagaaggacattggctgctaatgtgcaagctttgtttcgtatcatccaatctattccttcccctaaagcagaaccattcaagttgtggttagcacaagtcggttatgaacgtgtgcaggaaattgaaaatccggaactggctcaagaacgtatgaaagaactttacgaacagaaaggttatcctaaggattggatagacaaacgtttgaggggaatcgctatccggcaaaacttgacggatgaatggaaagagagagggattacggagcagagtgattatgcaatcttgacagctgaaatttccaaagcaacgtttggtatggctccttccgattataaaatgtataagggattgacaaaaaagaatcagaacttacgcgaccacatgactgatttggaactaatcttcaccatgcttggcgaacgagtcactacagaaatatctcaaaaagaaaaacctgatacatttcagaaaagcaagcaggtcgcgaagcggggaggaaatgtggctggtgtggcgcgtgaacaagccgaaaaagaattaggaaggagtattgttactccggataaattaggagaaaaaggtaatgatcttcaacaattcccttttgaaggaaatgatgagtaattaattaaaatcaaatagcttatgatcaagaaaacgctctatttcggaaatccggtttatctgtctttaaaaaatgcccagttggtgataaagctgccggaagtggttaaaaatgatacgttgcccgaaagctttaaacgtacgtcggaagtgacaaaacctattgaggatattggagtagtcgtgttggaccataagcaaattaccattacgtcaggtgcgttggaggctttgcttgaaaataattgtgccatcataacctgtgatagtaaaagtatgccgataggcttgatgcttcctctatatggaaacacgacacaaaatgaaagattccgtcaacagttggatgcttccttgccgttgatgaaacaactttggcagcagacaataaaagcaaagattgaaaaccaagcagtggtattgaaagaatactccgatgttgaaacaaaatgtatgaacgtgtgggcagccgatgtgaaaagtggagattcgaacaacttggaggcccgtgctgctgcctattattggaaaaatctgtttcaaatagaaggtttcacaagagatcgggatggtattccacctaacaatctgttgaattatgggtatgccattttacgagcagttgtggctcgcgggttggtggtgagcggacttttgcctacgttggggattcatcatcataatcgttataatgcttattgtttggctgatgacgtgatggagccttatcgtccgtatgtggatcgattggtttgtggcatgatcaaacaaggtgtagattatacggaattgactaaagagttgaaagcacagttactaacaattcctgtattagaaactcatattgccggaaagcgtagtccgttgatggtggctgtggggcaaacgacagcttccttgtataagtgctttagtggagagttgcgcaaaatttcttatccggaaatgtagttatggaccgatttagcgaatatcgtgttatgtgggtacttgtattatttgatttgcctactgaaacgaagaaggagaaaaaggcatatgctgatttcagaaagaatctgcaaagggatggatttacaatgtttcagttttctatctatgtccgtcattgtgccagtagcgagaatgcaactgtgcatataaaaaaggttaaatcgtttattccagagcatggaagtgtcggaattatgtgtattacggataaacagtttggaaatatcgaactgttttatggtaaaaagacaatggaggtgagtattccagggcagcagttagaactgttttaaaaagaaaaatcccgcttaatagtgggattttttctttgaaacaacatccattttttattctaatttgctgtgtaatttgttgattaacaattgataatgataaatcagttgtttccaatggttcaaagatactaaaatgaaagcaaatcacaacaatagtttataattcaaatgtttcctgtagttgtttccaatggttcaaagatactaaaatgaaagcaaatcacaactatatgttatgtatgtgtttttatgtctttgttgtttccaatggttcaaagatactaaaatgaaagcaaatcacaacacaaaaatgtagttattgtggaacaactgagttgtttccaatggttcaaagatactaaaatgaaagcaaatcacaacggcgtgtctctttaaatccactaaagactgttgtttccaatggttcaaagatactaaaatgaaagcaaatcacaaccttatgatacaagaagttattcttggtatcgttgtttccaatggttcaaagatactaaaatgaaagcaaatcacaaccgcataacgcatacattgatattatgttaagttgtttccaatggttcaaagatactaaaatgaaagcaaatcacaacgggtttcatgcaggtcataaagtaaccaaagttgtttccaatggttcaaagatactaaaatgaaagcaaatcacaacaccgtattcaagcgagaatattggcgttacgttgtttccaatggttcaaagatactaaaatgaaagcaaatcacaaccagaaacagaaagtatctatcgaattgaagttgtttccaatggttcaaagatactaaaatgaaagcaaatcacaactattgaattccgaggaagcgcgcgaagaaggttgtttccaatggttcaaagatactaaaatgaaagcaaatcacaacctcgaagaaggtaaaatctataatttcgagttgtttccaatggttcaaagatactaaaatgaaagcaaatcacaacatcaaagaaaagaactaataataacaactagttgtttccaatggttcaaagatactaaaatgaaagcaaatcacaacaagtaacaaacagaacaaagaaaaatcatcgttgtttccaatggttcaaagatactaaaatgaaagcaaatcacaacggagccgacaggaacggaaacaatgtaactgttgtttccaatggttcaaagatactaaaatgaaagcaaatcacaacctttttatgagaaggaatttctgaatcctagttgtttccaatggttcaaagatactaaaatgaaagcaaatcacaacgacacaaaaataggtaaatgacttattgtagttgtttccaatggttcaaagatactaaaatgaaagcaaatcacaactttggagatgtagatgcaaagtatataatactctacaaatatgaatatgtttataattagccatattatgaaattttttctataccaacatatacttaaggactatgattcctaagatcccaaccattaattctaatatcagatactttaagattttttgttcatagtattttactatatactaagatctgatatgttgtctcttgcctacttatcgagtaaatagtaatctactcgttaagcaggaagaggtcatttttgttattggaaacaaactttttgggaggttatttttcactcggtaatagcggccagtttgggtccgatctgtgttcacgaaccatgatatctttcagttccgctactttttcaggatactgatccagtatattatgccgttccgatggatcggaagctaagttatacaattcataatagggcttgtcaccacggatattcatgtggaccaatttccacggtcctttgcgtacagcttggcgaccgttcagttcctggaattcaaaatacaggaattcatgttctttctgtcccttccggttttccaggaggggaagcatgctgacaccatccatctccttctgtttggctttcggatggatgatttcttcgaaggtcggtaatacatcccagaaagaacacataaagtcggtttccgtattcggttggacatgtcccggccaggaaatgatcattggaacgcgaatgccaccttcgtacaaatcccgtttatatccacggtaaatgccgttgctgttgaagaagtcgggatcggcacccccttccatatgcggtccgttgtcgctcgcaaagataatgattgtattatcatataagcctttatcttttaacttttggatgatctgcccgacatagacgtccagacggtaaaccatagcggcaaaagtggcatggggatggaactgcgaacagtaacctcctttgcggaaggcgggactgcccggttcggcccctttgtaaggtttttccggatacataccgcgaaatttctgtatgatactgtcttccggcacgatcaattccgcatgcggaatgatggtcggataccacatgaagaacggttcgcccggattcatattgtccagatattccagagcctttccatgaataaggtcttgcgagtaagtaccttttccgtactgtacattcagattgttgtcttcgagttccacccgtttgtcgttatcccaaagatggtcgggataataactgtgtgccagcaactggcaattatatccgtagaaagtgtcgcaaccctgatttttaggatcgccggtcgaaccgatataacccagtccccatttgccgaaagcggatgtcttatatcctgcatctttcataacctcgaagatggtacgggcatctgcgggaagtggaaactgtccttccggatcgagttcgaggttaccgcggacaggtgtatgcccgctgtgcgtgcctgtcaacaagcaggagcgggaaggggcgctgacggttgtccctgaataacattgcgtaaaacgcattccactttgtgccagcttatcaatgttgggtgtttcgaacttttcctgtccgtaacaacttagatctccataacccaaatcgtccgcaaggataaaaacgacattcggttttttatccttattcttctctgcatggatggaaggagcagctagcaaaaggccggtcgaaattagaattgcttgtttcatatttttcgatgatatatatatgttttactatttacaaatgtatggctttttagaaattaatgtttggcaaatagaaaataaatagaaaataaatagaaaattttgcaaagcacacatatacaaaagaggtataaacggacatttatgttatgataaattttaaaattattgtcgcaattgttttattgttttttttgcaagtcgaaaaaacgattgctcaacaagagatagatcttgcgggtagttggggctttgagacagatgttatggattttcgccgttccggtgtggagatacgtggcgatggggagttgcatgatacaattattttgcccggtattacggatcaatatcatatagggaaccgtacgacttacaaatattatgaccgtttgacgcgcaagtatgaatatatggcaccggcttggtatcgtaagcagatacaaatccccgaatcatggagtggtaaacgtatacatctctatttggaacgcgctcattggctgactgccatttatagtggaaggacggaggtgaacaggaatgactatatcagtgtacctcatatacatgatcttaccggctatctgaagcctggacaggaaaatattattgatttaatgatcgacaatcgttatcagtataatacgcataaatgggatcatgcccataccgaatttacacagattaattggaatggtgtgattggggatatgaaacttgttgctttggatccggtttatatggatgatctacagctctatcccgatgtgcagcgacagcaggtcacggtttgtctcagtcttgtgaatacaaccggaaagccttttacgggtaaagccttgctggaagtgactggacatgggctggaggtgaagaaagaggtggaagttgcttcggccgattctatcattagtttggaaacaacattggtattgggcaaaaaggtgaaattgtgggatgaattttcgcctgacctgtatcaattgcagtgttctttgctctcttccggaagtgaagaagtgaaacaacagaagcagctctctttcggtatgagggaggtaaaagctgtaggagatgatattttgcttaatgggcatcgtttgcatttgcgtggtacggtaaacaatgccgagttcccgcttacaggtcatgttcctatggatgatgcttcatgggaacacatttttaacatactcaaatcgtatggaatgaaccacatgcgtttccattcatggtgtccgcctgccgcttgtttccgtatggccgacaagatgggggtctatttggaagtggagatgccaatgtggggagctgatgccaagcccggagatgaggcacgtaatgatttcttccgccgtgaactcaaagctatacttaaagaatatgggaatcatccttctttcttgttgtattgtaatggaaatgagctggagggtgactttgattttttgaacgaactgaccgaatacggacgtagtcatgataaccgccgtctatttagtggatctactgctcgcaagcatgttaaggcagaacagttttatgtgtcccatcgttccgataaaggaagtgtgactatttacgaaggtcgtccgatgactgactgggatattaatgccggacatggtaccggacagcctattatcagtcatgaaacggggcagcgttgtgtatatcctgattttagtgagatttcggcttatacaggccctgtggaagcacgtaacctggaacgttatcgtgattcactggctgctcatggaatggagaatcttgccgcagactttttccgagtgtcgggacaacagacccgaattgaatataaagatgtgatcgaggggcagctgcgcagttcgctttcatcgggatttcagttgttgagcttgattgactttcctggacaaggttatgctccggtaggaattctcaatgccttttggaagagtaagggaatcattacaccagaaaaatttcgggaattttgtgctcccagcgtagctttactacgttttcagaagcgtgcttttttcaatgatgaaatctttagtggcaaagccgagttgtacaattattctccttcccgtttccgccgtcctgatgtccgctggcatgtgacggacagtcgtggaactacgctttatagtggccggatcagttgtaaggagatctccaattatggcgtttatcctctcggtgagtttgagtttccgttgaaccggattacaagtaacgaaaagttgactgtacatctttgtgtggacaaaaagattaccaacagttgggatatatgggtttatcctcggaagcaagtcaaagaaattctgaagtctgacaatcaggtgctttttacgacctcctatacggcagaagcccgacgttatctgcaagctggcaaaagtgtggttctgttgcctcgtccggaggctgtgaaagggcggaagtcaaatttccataatcatttttggaatccgatcatgtttaagtggcaacctcttacgttggggtgtctgattcataaagaacagccaatgtttgccgatttcgtaacagatgagtttgtggactggcaatggtgggatattttgtgccatgcaaaagtgattgaaatgaatacagctcccaatgccttgcttccttttatccaaagcattgacacttatcagcacaaccataaactcggaatcggattcgaggccaagttgcatggaggcaagttgcttgtactggcaatagatacggaaaataagatcgatcaacgtcctgcttctcttcaattgttgcaaagcatcagtaactatgtccggagtgaggcgttccggccggtggtggatattgatgaagcgtttgtcgcttctttccttactccacaacttgacaatgaaataaaagaggctgtgcaggatgaatttcttaattctttccagaacaagtgataatctgtttgctctctgcctgcctgtttttgtcagtgatggttagggtctggaattttaagttgttttcgatattgggaatgtggggtcgagggataatccttgcgggtatttgtaaatgaaaaagcaatccgtgaattttttgaaagatgaaaaatcgtacctttgtacggttaacagataaaaagaaaagaacagtggcaaagatagtggaaacacccttgatgaagcagtatttcgatataaaggcgaaacatcctgatgcaatcctgctattccgtgtcggcgacttttacgaaatgtatggtgaagacgctgtgaccggagctgaaatactgggtatcgtacagacgaaaaaagcgaacggaccggggcaaacgatcgagatggccggtttccctcaccatgcactggacagttatctgcctaaactggtgcgtgccggcaagcgcgtagccatctgcgaccagctggaagatccgaagcttacgaaaaaactggtgaaacgcggcatcaccgaattggtgactccgggtgtctctatcaatgacaatatcctcaaccataaagaaaacaacttccttgccgccatccattttggaaaggatgtttgtggaatcgcgtttctcgatatctctaccggcgagttcttgacggccgagggatctatcgattatgtggataaactgctgaacaacttttctccgaaagaagtcttggtcgaacgaggcagccgtaaacgttttgaagaggctttcggtccccggttctttattttcgaactggatgattgggtgtttactttggaagctgctaatgaccgcctgttgaaacatttcgaaacgaagaatttgaaaggtttcggtgtccaacacttgaaattaggaatcgtagcctcgggtgccatcctgtattatttggatcagacgcaacacacccatatttctcatatcacttccctttcccgtattgaagaagaccgttatgtgcgcctcgataagtttacggtacgcagcctggagttggtcagtacgatgaacgaggaggggacgagtttgctggatgtgttggacaagaccgtttctccgatgggatcacgtatgttacgccgttggatcttgttccccttgaaggatgtgaaaccgattcatgagcgtcaggacgtagtggaatatttttttcggcatcctgaagtgaaagaactgttggaagaaaaactcgaacagatcggcgatttggaacgtattatttctaaagtagcggtcggtcgcgtctctccccgcgaagtggtgcagttgaaagttgcccttcgtgccatcgagccgatcaaggaggcttgtatggcaagcgatgagccgagtctttgccgtatcggcgaacagttgaatgcctgtgccctgatccgtgaccggatagaaaaggagatcaataacgatccgccttctttgttgaaccggggcggtgtgattgcgacaggcgtgaacgctgagctcgacgaattgcgtgcaatcgcttattcgggaaaagattatctcttgaaggtacaagcacgggaaatagagctgacaggcatatcgagccttaaaatcggtttcaataacgtcttcgggtattatatcgaggtgcgtaatgcctataaggacaaagttcctgccgaatggatacgcaaacagaccttggtgaatgccgagcgttatattaccgaggaattgaaagaatacgaagaaaagatattaggggcggaagagaagatactttcgctggaagcccgtctctttaacgaactggtactttgtctttccgaatatat

SEQ ID NO: 1136 - DNA, 24521 bp, synthetic construct
  source 1..24521: mol_type = other DNA
  misc_feature 1..24521: note = Synthetic
tggaaacaatagctgttttctgattataaaccaattttatttcatcaggcgtgacaacaaatatgattaattttgacaaatccgttccatagtgttgcccgagaaatattaaaatcttggtggatgcagataggtctgcttccatatagtatccattcgctgaatattgattgaaaggatatgcgtagtggttttcagggttgctccatttgacaattccgtctgcatctttataggtaaaaattaattgattgtttttgtagaattggatgacatcgaaatctcccggttcgttatcccagtttttgaatcgtccggttttgatggaataggtggtgtcgcttatcgatgtgtaaccgatgctatctgtcgagaacggtaatgagatcgagtcttcagagatgaatcgtttattggggataattaccccgtttttatttatggtaaatatgggtgtgctttcttgaggaggcaatggatagttggaagaaagtaatttctggatagttgtggcggatttcccgcttttagcggataaatccccggcgaaaaggcagaggagcaggagggtgtagatgattgttttcatgttgttttgagtttggtttagtgagtgagtagtaagccaacctgaccacggacgaaatcaggctggctttgattggtttacttttcttcgacaggtgcctcatccccttcccacagattcttgcttctgtctgtgaggtagattttgggataaagttgaggtttgtactttatttctttgatgagttcgaatttaccgttgtcatctattttgtagtgcatgtcgattcgttgggcgtttatgcttttgaaatcgctgaaggctgatatgggaggagtgctttgcactttcagccaggttatgacaatttcctcattggaagcgatgcgccattgctttatgaaaaccatcttttcattccaccaggcaacttcggattcgatgtagtcgataaatttcccgtcgcggtaggtgactaagacttttttggtggattctgcaatgtccatgtttattgccaccaaagtgtactctttgcgttgcagttcgaatttccggaatatcgcgtaattgatactggggactgctgctttttgtgtcagtcctaaatcatcatacacttccaaagagaaatgctgatctgttccataggagaatccgaaagccggtttgaaataatcaatgcttttcacacaatcaaaagggattgatgtggaaggaacttcttccaggcgatttttcatgtcttcatctgcaaatgcgatgaggtgaagaatcaggcataaaggtaataagtaatgtttcatgattttatgttttggtttagtgagcgagtagtggagccagcctgacatggacgaaatcaggctggcttgggtattttcttattcttctattgtgttataaggtccctcaaattttaaaattcctttgtccaacagaatcttgaaaaattttggtgtataacatggcgtatcaacatcaaggtattcaacgggataatcttgcaggttcatgacaaaggagaggtttgctttgtcgtattttatgctgcgaatcatgatttctttgttgaaaaccaacgtggcttctcctttgtttagaatgacaatggtcagcagttcgggttggctgttgtagggatagccgacgaatacgagggctgtcgaactgtcggtaaggggaagggctaaaaaatagtcattggaagccaatggtctgacgtgtttttgcagtttgtcccatccatcggattgtttaagacttagaatgtttttgtttttgtattccacatcgatgcttcggtaatatcctccgtcgccttctgtcccttggtagtttgatagtttgacggagtaagaatgttcattgttttttgagaaaatggtaaaactttcaacggggtagcttttgacgtcctggtattcgaaatagaatggattgatatattccggttttgtgacaatttcaccgttgtcgtacttgaatattgcttcgttggtctgggtaggcagcttacaggcgaataggcaaaggagcaggagagtgtagatgattgttttcatgttgttttgagtttggtttagtgagtgagtagtaagccaacctgaccacggacgaaatcaggctggctttgattggtttacttttcttcgacaggtgcctcatccccttcccacagattcttgcttctgtctgtgaggtagattttgggataaagttgaggtttgtactttatttctttgatgagttcgaatttaccgttgtcatctattttgtagtgcatgtcgattcgttgggcgtttatgcttttgaaatcgctgaaggctgatatgggaggagtgctttgcactttcagccaggttatgacaatttcctcattggaagcgatgcgccattgctttatgaaaaccatcttttcattccaccaggcaacttcggattcgatgtagtcgataaatttcccgtcgcggtaggtgactaagacttttttggtggattctgcaatgtccatgtttattgccaccaaagtgtactctttgcgttgcagttcgaatttccggaatatcgcgtaattgatactggggactgctgctttttgtgtcagtcctaaatcatcatacacttccaaagagaaatgctgatctgttccataggagaatccgaaagccggtttgaaataatcaatgcttttcacacaatcaaaagggattgatgtggaaggaacttcttccaggcgatttttcatgtcttcatctgcaaatgcgatgaggtgaagaatcaggcataaaggtaataagtaatgtttcataatatgttttgttttaaaattaattgtactatcatggaatgggttgtggtatagtttcgtgtaaatttttattatcgttagggcggacttgactaacgtcatatactttgttgttggctccagccttaggatctcttaatgtgtaatttgaagaatcataataaagacgattttcgatgatatcacagcctacagaagcttgatttcttcctgtgtcgatatatgtaaaataatattgtttcttggttatatcatagcctcttcctgcgataattatccaatggtcggttgtatgctcattaattggtcgccccaaagtatgatttactcctacaataattggacggtttgcatctaaatggcgattgatacaagcaatagcattatcatatatgattctgtaattttttgtatcaaaatattctaaagagccatttctttcaaacagtaattgatacacatttgcagaactacctgttggaataccatagtttttcatgattgcaatagctgttctcatgcaatcatgtgtatgattatacgggacaaagtattcttcgttagttaagtttacgttaggtagaactccttgtccaccattccctcctcctgtactgcttccgccagtgcctccgccgccggtgcctccgccgggataggggtttgggtccggatccggatagtagtaacacgtgcattcctgtatcttttggtaacatcgtgtacacctgggacaggtgcattgatgttcccggttaaaacagtagaaacacttgctacagatacatccaccttgcatgtggcaatacgggcaagcggtcacgataacttcgtccaggcaatgcggacaatctttttcattcatgccatgcgggcatttgttgcctcctccgccaatccatccttcgtcgaaggtataggtggatgcagaggttttcacggcttcgctgaaactgacggtggtatattcctgcgcccagctttcttcgccgtgttcttgcaattgcctctttttcatgactgccaaggttccgttcatttgtccatcggtgtatccgaacgcttttacaaactcaccttccaaagtggagcaaaatactttgcctgtaaaatcgccgccaccaagatagcgaaaattttccacacttttcatcacatttcttccgccgacaattgtggggatgatagttgccacgaacatttccgtttctcccgtgttccgtctggctacaatcaggcggcgggtgatggggaaaagtttgcggaatacgacttttccattcctgatgaatttttccgatgtttggaggatgctgttggactggatgggcacctcaatcaggctgactcctttatgcccgctttgcatggctttgtcccattccggcgtcaattcgagatgcgacagaagttccgactggcttttggtttccggagagagccgcagtggtgccaggttgtcggcattctgttcaaagtagtgccgtgcatcggtaatgccgaaattggctaatgtttccgcttccgatggatgcggaagttccagttcataactgcaaccggatagtaaaaaggacaggaaagcccctaaaatcaatagttttcgtttcatttcttcattttttagtaattaaataatgattttcgagaagttcatttcatagtcacacctcctttctttgttgtgcgttttcaccagaatcgcatctggtcgtccgtgtatgtaaaaatgcgttcttcttttcctgcggtgaggtctctcaaccagagcagggcgttgccggggacgtcgtcgaaatcgacgaatcgctgccgggcttcccggatgcccagggagcaccagccggtgccgtcgtggtagaggagttcgtaccagtgtccgctccacacggcgtttccgtcgtttcgcaacaggcattcgactttacccaaagcgacctgacgtcccatgtcgaagttccatgtgccttggctgtccgagtgggcgtaagagatggggtcgtcatcaaaggcggttgtctgctccctgccggtgtcggggcggacgacgtcgccctcgggggtgtacaggaggcattccccgaaactgaacgcccgggaggcgcggatgcgccagtagcggtattttttgccggtgagaacttctgccgtgctccattgttcttctgaaatttcctgaaatattccgacttgaacgggatggcggaagtcagatgtgcgggaggctttcagcacggcttggcggaatgattggttgagcccgccgatggtgattttctgggggtatttgcgtgtgagcctcaatggttgcgaccggagggagtctggttgcaggaaatggggaggcgtaccatgttccaagatgaaaggaggggcgatggggagtgcctcttcattccggtagatgaccggcaggtagacggactggcatcccatatctttgaagacgaatttcccgttgtggcattccgcgcaggcaaccggtgtccattgcatctggttgaagacgcagaggtaggcatggggcgaagcggtggaggttgtcggggtgatttcgacgtcctgcacccgggtgtagagggcggtgacgtcccggtggaacgggtctttgaacagtgggggtatgtattctcctttggcggctgtcggacggggatggcgggaataggtccggcggtacactttccccatggcataggcatttatgcctttggagaggttttcggatatcgtgtcagggatgaggattgtccagcagtgggctccgtcccggttggagaacgcggggttgaagtccatggctgcggggtagagcagcaggcgggagcgccagaggcgtgccgtgttccagggatggcagcctgcgatttcatatcggatttctttgcctttgtaaaagagtgggacgctttgttctccatagtagggtggggagagtttgaatagggatggggaggcggatcgggttaaggcatgcttagtgcccaatccgtgtgtgatttgttcgaagagggaatcctgcaagccgaagagcaggcgtggccgttcatctccgactcggtagggcagcaggtgttcgcacacttgttcgaaagagaattttttcagccaggggcgttgggcgatgcgactgaaagtcgagtcgatgtgtgcgatcagaaagcagctgtcgaggtttttaatgtcttcatgccaaatcagcccgtcggtgccgtccggttgtctgaagaaggcgtcgtgtaaggtggcgcggagcgcatattcccaacctgcatacacggaatccacccaatggcggtaggcgtccagttccgttccttcataccagccgtgtccgggcatgttttcgatgaggaagcacgccgcccggtatttcaggctgtctgccggatggcgggagtagtggtgcagcacttgttccaggtggggacggttggtgccgctgaggcgcaacgcctcttctatgggagtgcggggagcgcaggcgcttcccagcagtatggatagtccgaggatgaaatgtttgttcatgtgcgtaaagtttatggtgtggatgaatgtcggtttaaaaagagtcttgcctgatggcgatagcggaggacggaggaattgactactttgacgggcatgtcgagcatgcgggttgcctcttccgcggctttttccgtggctccgctgtcccggaagagacagaacaggcggtagcgggggagtattcgggcgggcagcatggaggcggcaagccggtatgcctgttctgccgccgggaggtcgccgcgttgccggtggcagtcgcccaggtcgcaccatagccgggaggagggtttgaggcgggatgcctgcgacaggacggggagggcgtcgtcgtagtgtcggcggttgtagagcatttttccgtaggtgagcatgaagtcggggttgccccgtaggcggcgggtatggcgtgccgcttcgggtgcttcgagaagggcggggcggcgggaggcttccgccaggaagcggtcagcgcttttggcggtggcatatccggtggcggcgtatgccgcgaaagcgatgccgatgcaggcgagaatacgacggagcggaatgcccgtttgccggtcgatggtgaatagcgggtggcggtctttgaccatgactgccagcgaaagggtggctgttgccgttatggaagcggaagagagggggtagccgaagcatccgaagcagaggattgccagcaggatgttgcctgcgtggcgggatgtccggcgggcatgggaggatttgaggaatgccgcgaccagtgtgccggcgaagagcgccagtccgataaccccggattcgaaagccacccgcaggaattcgttgaaggcgtaaacgttttcaccggcaagcagggacgccgggctgccgggatgtgccgcgaaccatgccgcttgcatgggcatgtattgcgcctgcaaggctccgtggccgcatagaggggcgtcgggaagtcttccggcgatgacctgccagatgaggaaccgtccctgtacggagtcggggcggagggcatagagcccataggcggtagccccgacggcggatgccgccgtgatgcaaaggaggattcggatgccggggcggaaagtgcggacgttgagccgtgcccgtatgtttttgcctgccttgcttgtccatcctgcccggcagattcccgccgcgagtgccacccatgccgcccgggagccggaaaggaggatggcggcgagcagtagtgccatgcctgccgcccacaggatgtggagggggcgtgtccgggaggcgttatgcaagggaatgcccgccagcagcctgcacacgcagaatatgccccacagggcgggattgaaaaagcctccggtggagggaaaggaggggtggtaggagggcaggagtccctgccactggcatacgccccatgccgcctgccagatgccggcgaggaagagcaggcggaacagggaggtttcggcacggatattccgcgcgcagaaatagacgcacaggcatcccgccgcctgtatcggtgtccaggcattcgggcaggaaactgacagtataagccgtccgctgtgccagagcacgaatgcggcaaacgaccgtccgccgcttgaaagcggaaagcatcccgccgcgtgacgcatccgatggcgtacaggaccgcggcggtaatggcgatgaattctacggttatgccggataaggcgaaatcaaaagggtagatacgttccattccatagtcgtatgtgattagtgattttttcgttcgccataaatttatggaatatgcgaatatttacttaattgtattgcatattaattccatgcaataataaagaattttttctgtaataatttgcgacaatccgaaaaaaggcatacatttggcatcggatttgttgaaagaattatacgtctaacaatagaaattattacagaatgaaagtaacagtcgtaggtgcaggaaatgtgggcgcaacgtgtgccaactgcattgcagaaaaagacatcgtgaacgaagtggtcctcctggacatcaaagagggtgtgtcggagggaaaatccctcgatatgtggcagaccgctccgattaatttgtatgacacccgcatcaagggagtgacgaacgattattcggcaactgccggttccgaggtggtggtgattacctccgggctgccgcgtaagccggggatgagccgcgatgatttgatttccacgaatgcgggaatcgtgaagtccgtgacggagaatgtggtgaaatactctccggatgcgaagattatcatcgtttccaacccgttggatgtgatgtgctattgtgcatacctggctgccaaggtggactcttccaaggtgttcggtatggcaggggtgttggatacggcacgctaccgggctttcctggcggaggaactgaatgtgtcaccgaaggatatccaggcgttgctgatgggcggacacggagatacgatggtgccgctgccccgttatacctcggtgggtggtattcccgttaccgagttgattgataccgataagctgcatgccatcatcgaacgcacgaaagtgggcggcggtgagttggtgaagctgatgggtacttccgcatggtatgccccgggggctgctgccgcacagatggtggaagccatcatccgcgaccagcgccgtgtgttccccgtgtgcgcgctgttgagaggcgagtatggcatgaaggatatctatctgggcgttcccgtggtgttgggcaagaacggtatcgagaagattatcgaagtgaagctcgacaacgaggagaaagagttgctggcagcctctgccaaagccgttcgctcggtgatggatgtgctggacaacatgaagatgttttgatgagagtcccctgttttagggtgaaaataggaaaaccgtcccgattattcgggacggttttcatatatttgcaccggcacatgggtgccggcagacgaatcggacagcaatatgagaatgaaaaagcacaggaaggcatgccactttgccctgcggcagggagggtttgcatctccgtggaaccggacggttcccttggagttggtggaactggaagacagcagtttccacctgttggtcaaggtggtggcggacggcatggagggagagatgattatcgacacgggggcatcagtgacagtgttggatcgtaagctcttcgcggcgaaggcggtggacgaaggggaagaggaggttcggatgcagtcggggagcgttaccggacagattgaggatgtgcagttgatacaccttgacaccttgcgcatcgggggacggaagttgaagaacgtcaagatggcgggtatcgacctggattatgtgaacgaaatgtaccgcaagcacctttcccggcaggtcatcggactgctgggaagcgatttttgtgtgcggtatggggtctgcatcgattatcgtaggcgggagttgaggatggggagataaaaaagagaaagggcaaggaaatgttcctgacccctgccctgaatgttttcacaacggaataatccttattgtgatttgctacaattagttttgcaaaactaagaaaaataaatgagagttcataggatttcttaaaaaatatttgtagttttgagaaaaaatcaaatcatagggttatggaaaagaaaatattggggctggacttggggacgaatagtatcggttgggcggtcatcaaggctgatgtggatgaaaaaggcaaggagcaattggagggaatagaggctgctgggagccggattatcccgatggatgcagctctgttggggaattttgataaaggtaattctgtgtcgcaaaccagtgagaggactgcatttcgagggatgcgtcgtttgagggagaggcatttgttgaggagggagcgtttgcatcgtgtgttggatgtattgggatttctgcctgaacactatgccaacagtttgaatcgttatggaaaattttctgcaaatgaggagtgcaaacttccttgggcaaggcaggaagatggaacgtatgaatttctgtttcaagattcttttcatgagatgctggctgactttgcccatcgtgctcccgaagttgtggcagaggggaaaaaggtgccttatgattggacgttgtattttttgcggaaaaaggctttgacccagccgattcgcaaggaggaattggcatggttgctgttgcatttcaatcaaaagcggggatattaccaacttcgcggagaagaggaggaaaaaccgtccaagcgggaagaattttgtgcgcttgaagtggtcagggtagaagattcaggagaaaagaaagggaaagagacatggtataatatttatttggaggatggaaggatatatcgccgtacattcaccactgctccggattgggtaggcaaagtgaaagagtttatcataactaccgatttggataaagacgggattcctaaaaaggataaagaggggaaaataaaagagagtttcagggttccgaaggaagatgattggatacttgtgaagaagaaaaccgaagcggatattgacaaaagcggagagactgtgggtgaatatatttatgatgctttgttgcggaatcctgtccaaaaaatccgcgggaagttggtggctaccattgaaaggaaatattatcgggatgaacttcggcgaattttggaaactcagattggatttcatccggagttgcaggatgaagggtgttatcaggcttgcatacaagagctttatccgaataatgaggtccatcgcaataacgttggcggacgtggttttgttcatttgtttgtggatgacattattttttatcagcgtccgttgaagagtaagaagtctcttatagccgattgtccgtatgaggagaatacctatgtcaatcaagaaacgggagaggtaaagagcgcccctatcaagtgcatccccaaatcccatcccttgtttcaggaattccgtttgtggcagtttatttccaatctcaggatttatcaaaaggacggggaacgcccgggaagcgacaaggagataaccgggcaattgttgcagacctcggaggattatgcctgtttgtttgcatggctgaacgatagaatgaagattgagcaaaagagtttgttgaagtatcctgcatttcatcttgatgcaaagaagaatggttacagatggaactatgtcgaggacaagagttatccttgtaacgagacccgtgcccaaatgttgagttttttggggaaagcgcatgtccctgccgatttcctgacgcgcgaaaaagaagaggcgttgtggcacatattgtattcggtggaagacaagcgggaaatagaaagggctcttcagaggtttgcccgtaaaaatggtttaggaagtgaatttgcggaagcattgaagaaatttcctccttttgagaaagattacggtgcttattcagccaaagcaataaagaagttgctccctttgatgcgggcaggtaagtattggaatgaagcggaaatagatgcagagacccggatgcggatggagagaatgatttccggagagtatgatgagggtgttaatgaacggtttcgggaacaggcgatgcgattgaggtcggttgaagatttccattcgttgcctgtctggttggcatgttatatcgtttatggacgacattcggaagcgaagtcgatagacaaatgggagatgcccggggatatcgattattatttgaaagcgttcagacaacattctttgcataatccgattgtggagcaggtgattatggaaactttgcgtacggttcgggacatttggaaacaggtggggcgtatcgatgaaatccatgtggagcttgggcggaagatgaagaatcccaaagagcagcgtgctgcaatgactcggcagattttggagaatgagaatacgaatatacggattaaggccttgcttacggagttcatgaatccggagtttggggttgagaatgttcgaccggggtctcccagccagcaggagattttgcgcatttatgaagaaggggtattgaacaatgtgactgaattgccgatagagattgcctctattttagaaaagtttcggcagggcgatataaagaggcatccttctcgggctgaagtattgaaatataggttgtggctggaacaaaaatatatttctccatatacgggagagatgattcccttgggtaaattgtttactcccgcttatgaaatagagcatgttattccgcagtcgcgttattttgacgactcattcagcaacaaggtgatatgtgaatcggaagtgaataagttgaaaagcaattgcttggggtatgagtttatcaaaaagcatcagggggaaaaagtggagctcggttttgggaagacggttgagattttttccattgaatcttatgaacgttttgtgaaggagcattacggcaagacaaaagagaaaatgaggaaactgctcatggaagatattcccgaaaaattcactgcccggcaatcgaatgacagccgttatatcagtagggttgttactgctctgctttcgaatgtcgttcgggaggagggggaagcggagagcgtgtctaagcatgtggttgtctgtacaggagggattacggaccgtttgaagaaagattggggactccatgatgtttggaacaaaattattctgcctcgttttattcgtttgaataaaatgaaaggtgattcccagtttacggctgtcagtgccaatgggcatgacattcctacggtgcctttggatttgcagcggggtttttctaaaaaacgaatagaccatcgtcaccatgcgatggatgcgattgtgattgcttgtgtcaatcgtagtattgtgaattatttgaataatttgtcggcaaacgaacaggtaggaatatcccgtcgggatttacaagcactgctttgtgtgaagagtaaaacagatcataatgggaattacgaatggttggtgaaaaagccctgggaaactttcacgcaagatgctttggtggtgcttcaaaatatcattgtcagttttaagcaaaatctgcgtgtgattaataaaacaacgaatcgttacacgcattatgaacaggaaaagaaagtctctgcccttcaaacaaaaggaactagttgggcgattcgcaaaccgatgcacaaggatacggtttttggtgaagtgaatttgcgtagaataaaatatattcctctcaaagaagcctttaagcgtccccaagatgtggttgaaaaggatttgaagaaagaattgtgtgcgatggtggaacgagggtggagtatagagcaggcaaagaagcattttgaggaaaaccgagacgtttggcaggatgtcaatttctcaaaaattgcgatttattattttaccaaggagacaaaagaacggtattttgcaactcgcaagctattggatacgacatacaataggaagaaaatcgaggaagaaatcacagatacaggtattcaaaaaattctgctccgccatttggaagcgaatggtgatgatccggaattggcattctctcccgatgggattgaggcgatgaactggaatataaaggaattgaacggagggaaaaaccatcagcctatttatagagtgagatggtatgagaaaggggacaagtttgctgtcgggcaaacggggaataaaggagctaaatttgtggaagcagcccagggaaccaatctgttttttgccatttatgaaacgtcagatgaggattcaacgaataagattgcagcaaaaaggacttacgcgacgatacccttggcaacggttattgaacgacagaaaaaaggattgcctgtcgctcccgaaaatgaaaacggggagactgcgaaatatatactttcgccgaatgatttagtgtatttgcctacctcagaggaggtgagcgatgggaaggtttatttcccgatagacagggggcggatatataaaatggtgtcagctaatgggtcgcaatgtttctttgtaaaatctgaagttgctaaaagcatagaagataaattcgaattttcttctttaaacaaaatggagcgtgcagtcacaaaagaaatgataaaagaaacctgcctcccaatcaaaatagaccgtttgggaaatttgatacaagtaggggattttaaaccggagaattgaagtctgaagcaactgttgcaaaaaatgcaatcattcagagggaaggattcgaaagtggaatgaaaaataaacattggtacgatgattaagaagactctttattttggaaatcctgtttacctttctttgaagaacgggcaattggtgattaaattgcctgaggtagaaaagaatgatacattacttgaagcatttaagaaacaagctgaagtaaccagagcgattgaagacattggcgttgtgattttggacaataagcaaattacgattacttcggggacgatagaggcattgttggcaaataattgtgcagtcattacttgtgacagtaaaagcctccctgtcggtctattgttacctttgtgtggaaatacaacacaaaatgaacgcttccgtgagcagttggatgcctccttgcctttgaaaaaacagctttggcaacaaaccgttcaagctaaaataaataatcaggcaacagttttaaatagttgtacacatgaggagataaagtgtatgcgtgtttgggcaaatgatgtacgcagcggtgacccggataatttggaagcacgggcggcagcatattattggaaatgtttgtttgggcatatcgatggattcacgcgaaagagggacggtgtgccgcctaataatttgttgaattacggttatgcaatcttacgtgccattgtggcaaggggattggttacaagtgggttattgccgactttaggaattcatcatcataatcgttacaatgcttattgtttggcggatgatattatggaaccctatcgtccctatgtggacgagcttgtatttcagttggcaagtacacaggaaattccgcaagatttgacgaaagagctgaaggcttctttgctttcgattccgactttggatgttgttatgaatggtcggcgcagcccgttgatggtggcagtcggacaaacaacggcttctctttacaaatgcttttgtggcgaaagccgcaagatagtttatcctgaacgctgatgataatatggatcgtttaagtgaatatcgaataatgtggatacttgttttttttgatttgccgacagataccaagaaatacaagaaagcctatgccgattttcgcaagaacttacaacgggacggcttttccatgtttcaattttctctctatatccggcattgtgcaagcatggagaacgcagaagtacatattaaaagggtaaaatcttttttacctgaatttggaaaggtcggaattatgtgtgttacggataaacaatttagtagcattgaattgttttatggtcaaaagccacaacaacccaatactccgggttttcaattggaattgttttgaaataacaaatcccgcttttaggcgggatttgttatagaatctttgtcctttttttcttttctatctattgctgtaaatctctatatttcagtttgtaatacagattgagttgttgtcaataggtcaaagatactaatttgtaagcaaatcacaaccgcctggtgcacgcccgcgcgctcgccatgcgttgttgtcaataggtcaaagatactaatttgtaagcaaatcacaactaactaatgtaccaggtaatttaaatattggttgttgtcaataggtcaaagatactaatttgtaagcaaatcacaacgcttcaacggtttatcagaactcccagacgttgttgtcaataggtcaaagatactaatttgtaagcaaatcacaacggatttcctcagcactccacttaattccagttgttgtcaataggtcaaagatactaatttgtaagcaaatcacaacagtagtcgtgcccaatagagttattattacgttgttgtcaataggtcaaagatactaatttgtaagcaaatcacaacgtatcccgttataaattccctctctatcctgttgttgtcaataggtcaaagatactaatttgtaagcaaatcacaactggaagtagtcaatcatgcgctgccggcttgttgttgtcaataggtcaaagatatcaatttgtaagcaaatcacaaccaacctcaaactgattaatagcattatcgacaatggagaatattttagtcgtctgtatcttcatgggctacgtcctcccttttgtcaataatctcaatgtcgattttggggattaagtctttcccgtcctttccggttatctctgtcgtgtttggaatctttccaaatatgcgctctgtaatatcgttcaacgtctttacctctccacgtcctgaatccttgtagagtgcccgccatacattcacaatccaaataggcgtattgtcgtcttctgcgatgctgtttatctctttcttggtgcattgcatcagataggcgatgacgtctttgtactcctcatgtgagatgttgtatttctttttggcgatagtgtatagcttgggcttcctgcctcggttggatggctggttgtcacttgtgaaaagtgtctgcttgccttttttatttcctttctcaaattttgccatttctcgccgttttcaataattattcttacctttgcgcttgtaggatgcacgggtcggagaaagggtggcccccgtctgatgatgttgtacgacattgctctccctgatggtacgctcggactaccgcgcgtactttttcttttctatctactatgtttatgcctatgtatattcccattgtctgaaacaattgtaattcgtttgactgataagaggttgcatcttcataaagatttttgccttattttactaatgtgctatacttaatttagcttgattgctgacatccatgcagttgcaatgtaggggatactctatcgtattacaaaatacatcttgtgccgtaaaaagtttaccatattaccctttcctctttgctatacgctcataagatggaatattgaataatacaccatcaagtattgtgtatcccttcaattcggcttcaacttcttccttgagttcttcgagttcagatgaagttaaatcactttctataaatccatattcctgaagtttctctttgattttcttttttacaactgatttatccatattgcaatattttagataaaaatagtgattatcttctgttgttgccaatatttatcgtgttctatatgttatgatagacgaaagataaccccataagcagagcatctgtcggaactacaatccgattctgttgcttataggattctatgatatggcaaaggtagaaaaatgtacattacgtttgaatggtttgaaagcaaaaatgtaaagttgttttccgataggtcatgttcccaactaatattttgcccttcccgctgttttttacaaaaaatattatacttttgcgcattaattgtgtacttagggatagaaagaaatttagtttatatcataatttattaaaaaatgcagaataaaggagcaattacattacttgccgtagcgttggcgttggtgagtctttaccagttgtcttttacctggaaaaccagtcgggtggaaaaagctgcgcaagagtatgcgcaaggggatccgaacaaagaaaaggcgtatctggattcgattgcaaaccaagagatttacagcctcgggtttgtgaagtacacttacaaagaatgtaaggagttggaactgaacttgggtttggacttgcggggtggtatgaacgtgactatggaggtcgatgtagcggacgtggtacgcagtctggcaaacaacacccaggaccccatattcaaccaggcggtgcaggaagccgtgcggatgcgcacgaccagcccgaaggacttcgtgaccctcttcggcgaggcattcgagaaattggcgcccaatgcccagttggcttctcccgactacttcggaaccgtggaactgaaagacaaaatcaaaatcggcgccaccaataaagaagtcctcgacgtcgtacgtgaggaggcggaaggcgccatcgacaacaccttcaacatcctgcgcacccgtatcgaccgtttcggcgtggcacagcccaacatccgcaaagcggatatctcgggacgcatagtcatcgagcttcccggcatcaaggatgcccagcgtgtgcgcaaactcctccagggaaccgctgccttggaattcttcgagaccttcgacaacggcgacttctaccaatacctcgcagctgccaacagcaaggctttcgacatcctcaaagccagcggcaaactcgctacggatgaaaaagaggcagccacaaccgccgggaaagagaacgcccagaaagcggaaggcaacagcctcatcgacaatatcgcctcccaggattccttgaaccaactgctcaactccgaatccgaattcaagaaaaacaaccccctctttgctgtcctctatcccaatgtggaccgcagcgggcaggtcattcccaacggatccatcgttggttacgcacgcgtggcggacaccagcgaagtcaataaaatactggctatgccgcaggtaaaagccgtattgccgcgcaacgcccggctcctgtgggagaccaaggcggacaagatgaacgggctggtacccctgcatgccatcaaaatcaccacccgcgacggcaaagcgccgatggacggcggggcggtcgtaagcgcacgccaggactacgaacacaacggcagccgtcccatcgtatccatgaccatgagccccgaaggagccaagacatgggcgcgcctcaccaaagaaaacgtgggccactgcatcgccatcgtactggacggatatatctgttcctctccgaacgtcatgaatgaaatccccaacgggcagtcccagatcaccggacaattcgacgtcaaagaggcactcgacctggcgaacatcctcgaatcgggtaaactgcccgctccggcacgcattatcgccgacgaaatcgtaggaccctccctcggtagcgaatccatccgttccggcatgtggtccttcgtcatcgcattcgcattggtgctcatttacatgcttttcttctacagtcgcggcgccggacttgctgccgacgtggcgctgctcaccaacctcttcttcctcttcggcgtgctcgcatccatcggtgccgtgctcaccttgccgggtatcgccggtatcgtcctcaccatgggtatgtccgtcgatgccaacgtactgatttatgaacgcatccaggaagaactccgcagcggcaaaggcttgcgcctcgccattaaggaaggctaccgccaggcatactctgccatcatcgacggacaggtgaccacattgctcaccggtttcatcctctactacttcggggaaggacccatcaaaggtttcgcgaccacattgatcatcggtatcttcacctccctcttcactgccatcttcatcacccgtctgatgcttgagcgggcagcccgcaagaacgaaaacgtgcgtttcaccactccgttcactgccaactggctgcgcgacatccacttccccttcctgcaacgccggaaagtgggctacatcgtatcgggcgtcatcacccttgtctgcatcgtatcccttttcaccaaaggactggacaaaggcatcgacttcgtcggcggtaggacctacaccgtcactttcgaccagcccgtccaggtggaagatatcgctgaaagcctcgccgccgtttacggcagcgcgcccgaagtcaaaaccttcggcggcgacaaccaggtgcgcatcaccaccaaataccgcatcgccgacgaaggcgtcgaagtcgatgacgaagtcgaggaactcctttacgaaggattgaagaaacacatccccgaagggacttccaaagaggtattcctcaccgactaccgccagatgtcccagaaagtcggtcccgccgtggcggaggacatcacccgtgccgccatctggtccgtggtctttgccctcatcgtcatcttcatgtacatcatggtgcgcttctccgaatggcaatacggtgccggagctgtgctgggactcgcccacaacaccatcgtcgtgctcgggctcttctccctcctctcgggatacctgcccttctcccttgaaatcgaccaggcattcattgccgccatcctcaccgttgtgggctactccatcaacgacaccgtggttgtcttcgaccgcatccgcgaataccatcgcctctatcccaagcgcgaagaccaggacaccaccaatgcggcgttgaactccaccttgcggcgcaccttcagcacctccctctccacgctgatcgtgctgcttgccatcttcatcttcggcggcacctccattaaaggcttcgtgttcgccctcttgatcggtgtgattgtgggaacctactcctcgctctttgtcgctacgcctctttcttacgacttccgccggaagttcgccaagaaaaaagccgtggtgaagaaataactacatgtttcaatgtttgaatttatgcccggtcgccaaaggcgaccgggcttttttgtgcggcaatgttttttaggaaatatattcctgtttaatcggcaggaaaaacctatctttgtcagagcaaacaattttgaagcatgaggataccatatacagcaaaaccctttatcaaatgggttggaggcaaagggcagttgttgcctgcgtttgctgctttgctgccggaacatcttgccagatgggagaacttcacttacattgaaccatttattggcggtggcgcgatgctctttttcatgttacagacttatcccaacatcggacgggctgtcatcaacgatttgaatccggatttgataaaggcataccgcattgtcaaggattctcctgaacgtcttattcaggcgttggctgccattcaaaaggaatatttgaacatcaccgaggaggagaaaagaaaagagttctatctggaggcgcgtaagcgtttcaaccatgggaatttgtccgatgtggacaatacgatgtacctgatatttttaaacaagacctgtttcaacggcttgtatcgggtcaattccaaaggagaattcaatgtccctttcgggaggtataagaaccccagaatctttgacgaagagataatttatgtcgatagcgaattgttgcagaaagtggaaatacttcatggcgacttcgagcagaccgaacgctatgtatcagagaatacgttcgtttatttcgacccaccctaccgtcctctggatgccacatccagttttaattcctatgccaaggagagtttcgacgaccgggagcagatacgtctgaaagaatatgccgaccgcttgtccgcgaagcgatgttggctgatgttgagcaattcggacggcagggggcgccatgcggaaaacactttctttgatgacttgtacaaggactacctcatcgaacgggtgtatgcctcccgttccgtgaatgtcaatcccgaaaagcggggacctttgacggaattattgatcagaaattacgataacacaagatatgcaccagccacacaccgaagaacactttcagacatttatctcccaattgacagagactaatgccaatctgggattttttaccgatttcgataagattactgcccgcgtagaatccatttccgtccgactcaatcaattgaactacttaatcgggaaagaagacctccctgcggcggtctacacactgtggcaggagaatcccaaggtgttcagtgtgttggacattcttatagccgtacgtacctgcgaaaagaaaaaagtaatagacaaaaacggacggattcgacttgtggaagatttttttaaaactcccgaaggcgtcatcgaatatatagaagagacaggactgcgggaagtacttcaaaataaacgggtgaccaatctcgttgattatgttttcggcgtagaaacgggcttggatacgaatgcccgcaaaaacaggagcgggcacattatggagcggcaaatcgcggaactctttcgagcagagggcatacctttccggcaagaggtctattctacggaatttgaggagatgaagtgcttgggggaagacttgaaacgtttcgattttgtggtcacgacacctctcaagacttatttggtggaggtcaatttctatagtggcggcggttccaaattgaatgaagttgcccgtgcctattcggaacttgctcccaaaatcaatcgtcatcccgcttacgagttcgtgtggataaccgacggggtcggttggaaatcggcacggggcaaattggaagaagcctactatatgatcccgagactctataacctcaccacggttcgggaatggataaacggattgaaagttgaactatgctgaccccgttttatagatcgggagatcgagactttacccttttgcacggggattgccgctggctgttgccgcaattcgatttcaagtttgacatgatatttgccgaccctccttatttcctttcaaacgggggcctctctctccaaagcggaaaaatcgtatgtgtggacaaaggtgattgggacaaaggcggaactgcggatcagatagacgcctttaatcgggaatggcttaaactatgccgcgacaaactgaaagagaacggcacaatatggattagcggcacccatcacaacatcttttccgtggcgaaccgattgacagaattgggctataaaatactgaatgtcattacctgggcaaagaccaatccgccccccaacatatcctgtcgttacttcaccttttccacggagttcgtgatttgggcaagaaaatcaccccaagttccccactgttacaactacgatctgatgaaacgaatcaatggtgagaaacagatgaccgatgtgtggcacctgccggcaattgcgcgttgggaaaaaacgtgtggcaaacaccccacccaaaaaccgctctctttactcgtccgcgccattttggcttcgacggagcagggggcttggatactcgaccccttcaccgggagcagcaccacgggcattgcagccaatctcctcgggcggcgcttcctggggatagacaaagaggaaacctacctgtccatgagtcgtgcgcgtaaaacggaactggaggatatttccatatttgccggatgtcgggaaaaaatcaaagaccttgcttgtctggataacctggactgttgccgattgcatgaaagaagcgcgagttacgacctgcctttttaaccttgttgtgttgtacatgcaaaaacaatcctcccccggtacccggaggaggataaactgtcctgcacctctcaccatcgcaccggttccgggaggataatcccgtcggaggcgtcggcgggggtgaaagtggcggcgcggtactgcacgcacagcatcaccagcggctcccgcccgttgttgcgcaccgaccgcttgccggcgggggcgacgcgcaccacgcttccttccgccacggggaacacctgtccgtccacctggaactccccgacgcccgcgaggaaaaaatacaactcttcatgctccttgtgcgtgtgcaggaagcccgtttcctgccccgggcggaacacctggaacgaaaactccccgcctgtcgcgcccacggcagcgccgccgaacaccttgcccgggatttttacttccggaccgagttccagcagatacccgcccagttcactcaacttgcccgcatccgcggcgctgaaattttccgctgccgccacttttttcatctctttcatgacatcttcgattttggtttatactcttgttgtcgtttcacgctgcaaagatacccctccgtcgcctctccgtcaagaacttaccttttcttcccatactaacctttccctcgcttttgcatgctgccagcgacttgtctgaatgttaaataatccaaaacttctcgctctgtcgctcatgctatacttttgttactaactttgtcttcgtaagtaacctctcatctggaacccatgctcaaaagcgaagaaaaatactccctcattgaaatctgccccatccgaaacgtcgtagcccgcttcggc

SEQ ID NO: 1137 - DNA, 24521 bp, synthetic construct
  misc_feature 1..24521: note = Synthetic
  variation 22201..22202: note = n is a, c, g, or t
  source 1..24521: mol_type = other DNA
  variation 6301..6533: note = n is a, c, g, or t
gtcaatatccgcaaagcggcatataatccccccggcttatccggcatgcgcaggcatacgacgtcggtaagaccaacggaaaaaccggcaccttccaatacatctttagccaaatcgggctttcccacaaccatacgcacaatgccatagtcagtggtttcggcgagactcaaggcagtaatattgatatcgttctccgccaatatccgcgtcaattcggtaagtcttcccgatctgtcttcgataaataccgataattgtttaataatcattgcgtttaacttttaaaggtttctattgtcaacaacacgtctcgctttcccctctgaacgttcaatgctgtgaggttcaactagtttgattacagcgctaatacccaatacactggtgatgctttggtcgatacgtcggcgaatattttccagttcacgaatactgtccgaccaaaaatgctcgttaatctcaacacgaatttccagtgtatcgagattattttcacgaccaacgataatctgataatggggcgatgtttccaccatttccatcagcacggcttccacttgcgaagggaatatattcactcccctgataatgagcatatcatctgatcgactcaagcatttttccattcgcaccaatgtacgaccgcatgcgcatttttcgggatacaaacgtgtcagatctcgtgtgcgatagcgaatcagcggcatagcctctttggtgatggtagtgaacaccagttcgcccaactcaccgtaaggcaacacctccaatgtttccggatcgatgacttcgggaatgaaatgatcttcgcaaacatgattgccgcagtggcattcgcattccatcgacacgcccggaccaataatttcgctcaatccataaatatcgtaagctttgatattcaacaatttctcaatctgcaggcgcatttcgttcgtccaaggctctgctccaaatacaccaatacgcagtgtagtatctttgggcgacaaacccgactgcaaaatactttcgcccaaatatgccgcatacgatggcgtacaggcaagtaccgtagcattgaaatcggtcatgaactgaatttgcttcttggtatttccggtagaaatagggataaccgtagcacctactttttccgcaccgtaatgcaatcccaatccaccggtaaaagccccatagccatacgctatttgaatggtatcgtctttgtcgatacccgccatggttaatccacgggcaaccacttccgcccagatttcgatatcgcgtcgggtgtatcccaccaccgtgggttttcctgtggttccactcgaagcatgaattcgtactacttcggtctgcggcacggtaaacaacccaaaaggataattgttgcgtagatcgattttagtcgtaaagggcaaatctttcagttgatccacactttgaatatcaccgggttcaatccctttttctttcaacttgttcctgtaaaaaggcacattttcgtagacccgttttacggtttctgccaagcgtttgctttgcaattcatgtaactgctgcctatcggcacattctatttcaggatagagtatcatataaatgattgattaattcgaattgttcgacaatcccaaacgaaaagcattcagattcatgttgactatcgactcgcctttcggtgaaaaatactgcgttatggcttgctccaactcccgaggatcgatatcgagatagggagctgcagctccgagcatcacaatgttgtacgtttttggactcccggcctgccgtgccaacaaagcggcatccaccaacacatgggtagccgttttttcgattgtctttaacaattccgtttcgtcgggatagttcggaatatttttgtagggttctttggcagtaacgataacaccttcgggagagagaaaagacaggtatcgcaacgcttccatcggctccaaagaaagaatgatatcggctttcccatgaggaataagatccgaaaaaatttcttccgatgatatccgcaaatgcgattccaccgctcccccccgctgactcataccatgcacttcggcctgctttacgtgaagcccgaggttcatggctgccaaatcgatgatggccgccatggtaagtattccttgtccgccaacacccgctataatgatatttttcttcataactaatcgagttgcgcttttttcttcttgcgttttactcctgtctgcacacattctcgttgcgatatgaccaccgacacgccttcgtaatcgaattcttccctcaatacggcgacgttgtattcccgattttttttcaacgggacaatggttcggatatgagcttcgtccactccgattcctttacagatatcgacatatttccccgtgccggcagaatcctgcccgccggtcatggcagtggtcgagttgtccgaaataataaacgtcaccggagaaccatcatttacggcatccaaaagtcccgtgattcccgagtgggtaaacgtcgaatcgccaataacggccacggccggacgcatacccgcatcggccgctccttttgccatcgtgatggcagcacccatatccacacacgtgctgagggtattgtatggcggcaatgcgcccaacgtataacaaccgatatcgccaaaaacatgtcgttgcggataaatctccaacgcacggttgatggcttcaaaaagatcgcggtgcccacatccgtcacaaagcatgggaggtcggccggccacaatcccgggaatatcccgcggtgcttcggcttccacacccagggccctagccaacgcatcaggcgaaagttcgcccatgcgaggaagcgcaccatccagtcgcccgcgaaatttgtcgttgccaaaataccctttcagcaactcttcataaacaggatacccttcttcggcaatcaggatatggtcgtatctttccacgaattgccgaacttttttttccggcaaaggatattgcgatattttcaaaacaggaatattcaaccgaaacgtcgtgacgacttccattacataattatatgcaatgccaaaagccattaccgccttattgccttctcccggtcgctccatattaaaattcgatgcatcggataaagcaatcagttgcggctgtttgtcgatcagtcgttgataattttttcgggcaattgccggtaaaagcacccacgcattactatcggcaacaggattcagcgaattttgacgtcttgtttccgaccgcctgatcacggatcgcgaatgcgacagacgggtaggaatgcgcaacaacacaggcagctgcatctcttccgaaaggtcgaaagcgtagcgcaccatatcgtaggcttcttgctgatgggaaggttccatcaccggaatcatggcaaatttgccatacaccctactatcctgctcgttttgcgacgagtgcatcgaagggtcatcggccgctaccaccaccaatccgccatgaacgcccgtaatggccgaattcatgaaagcatcggcagcaacattcagccccacatgcttcatgcaaaccatgctcctcttcccggcatacgacatacccaaagcagcctcgtaagccgttttctcgtttgtcgaccacgacgatcgcacacccgctttctttgcctgcggcgactgctgaatgtattcggtaatttcagtggaaggggtgcccggataagcatatactcccgatattcctgcatccaaagcagcttgtgctacggactcagcccctaaaagaagttgtttgtctgtcttattcattgataaaaaacaaaaaagtcaatgtatgaaggattgactttacaattcgactcgcgcaaaggtacaaaaaataataaaatgaaacgatttcaccccttaaaaacaaaaaaacgaatccttatgtatgggattcgctaaaaatatagaatgcaatactacattgcaagcctatttggtttttcgtcctgaatgttcacgttttggaggacgtggcagcaaagctttgcgcgaaagcctgaattttccggtcttttgatcgatatccaccagttttacgttgatcttatctccttctttgagacccgaatcttccatcttgtccagatgctcccagctcacttccgagatatgcagcaatccgtcttttccgggaagaaattcgcagaaagcgccatacaccatgatggaacgaacggtagcttcatacacttctccaacttcgggaacagccacaatgtttttaattttgcgcaaagccgcatcaattgcctctttattgtttgccgcaatttccacacgtcctttattgtcgacctcatcgatggcaatggtaacacccgtttcttcttgaattccctgaatgattttccctgaaggtccaatcacggctccgataaattcttttggaatttcgataacctcgatacgtggcgcattgggcttgagatcgggacgtggttcggaaatcgtttccagcattttattcagaataaattctctcccttctttcgcttgtgccaaagctttttcaagaatttcgtacgataagccctccatcttgatatccatctgggtagccgttattccgtctcgcgttccacacaccttgaagtccatgtcgccaagatgatcctcatcgccaagaatatcggaaagaacaacataattctgtcccttgttttccgaaatcaatcccattgcgatacccgaaaccggtttctttatttgtatcccggcatccatcaacgccaacgttccggcgcaaacggttgccatagacgaagaaccattggattccaaaatatccgaaacaacgcgaataacgtaaggataatctttcggaatcatccgtttcaatgcccttagggcaagatttccgtgacctatttcgcgccgcccggtaccacgctgcggtttggcttctcctgtggcaaaaggcgggaaattatagtgcaagagaaaacggtcttcaccttgaatcaatacttcgtcgatgattttctcgtcgagctttgtccccaacgtaacggtcgtgagcgattgcgtttcgccacgcgtaaaaatggcagaaccgtgtgttccgggcaaacaatccacttcgcaccagataggacgtatctcggtaaaagttcttccgtccaaccgtttgccttcgtccaatatacaacggcgcatcgcctctttttccacttcgaagtaatacctttttaccaaaggcgctttctcttcgcgttcatcttccggaatggactccaggaattcctccaggatggcttcaaaagcctccgtgcgctcatgcttattgggattttgcgaccgtgcaacgtcgtacgctttctgatagcatctatcccaaacggctttgcgcaattcctcatcgttttcttcgtgacagtactcccgctttacggtctttccacaacattcggacagctccataagaacccgacattgccttttgatttcctcgtgcgcaaatttaatggcttcaagcatttctgcttccgaaacctcgctcatttcgccttctaccatcaagatattgtcaacggtagctcccactataatatcgatatcggcattttctaactgtttgaacgtggggttgatcacaaattcaccatcgatacgtgccacacgcacttccgagatgggtccgttaaaaggaatatccgaaacggccaacgcagccgaagcagccaatcctgccaacgcatcgggcatgtcttcgccatcggaagagaaaagaatgatattcacaaaaacttcggcatgataatcgtccgggaacaaaggcctgagagcccgatcaaccaaacggctaatcaaaatttcataatcggaaggtcttccttctcgtttcaaaaatcctcccggaaaacgtccaaaagatgcaaacttttcacgatattctacctgcaaaggcataaaatcgactcccggcgtagcatctttggccgcacaaaccgttgccaacagaacggtattattcattcgaacggtaacggatccatcggcttgtttggccaatttccctgtttcgatcgtaattacgcgtccatccgacaactcaattttttttacaattggattcgtcataaataattcgattacttatttttacatctgaaaaatcgtacaaagttaatataaagttttgatttctccccgtttccattatataaataattgtatatagagtcaaccggcaagtgcgaatttaccccaacttcatttttgggcaaattacattccgatttgatcctcagttttcgatgtaacccggttttcaaatgtcgnnnnnnnnnnnnnnnnnnnnnnnnnnnnnnnnnnnnnnnnnnnnnnnnnnnnnnnnnnnnnnnnnnnnnnnnnnnnnnnnnnnnnnnnnnnnnnnnnnnnnnnnnnnnnnnnnnnnnnnnnnnnnnnnnnnnnnnnnnnnnnnnnnnnnnnnnnnnnnnnnnnnnnnnnnnnnnnnnnnnnnnnnnnnnnnnnnnnnnnnnnnnnnnnnnnnnnnnnnnnnnnnnnnnnnnnnatcaggacgaaacaatcgtattgtttttaccttttcaattaagaattttccgtttcttgaaaaaatagttaagtttgcaagccataaattgttttttgtatgaaacacattgcgtattcttttctcatcctgataatcacggcgatggggatactcccgggatgcaaatccgacaagaaaacgttcgaagtgatagggacattttcttctgttcaaaaagaagacacactttatctggaacacttgggattgggtggcatcgaaccaatcgattcggtaaaattaaatcaaaaaggaacattcaagtttaaagcaccggctcccaaaaaccccgaattttatcggcttcgacttggcaatcagatagcggtttttgcggtagattcaacagaaaagctccatgtgagcggcgatgccaacgatctgttcaatacgtttcgggtagaaaactcgccggtaaacgaccagatcagggaaatcaaccagcaataccggctaacagtaaaagaaatagaagaattggcggaaaagcataaagagaaatcgatcgatgacgtaacctatctcaaccggctcgattccgtggtgaacgaatacaaaacgtttgcctccaaaatcattctcgggaatccgggaagtgcagcagcctattatgccgttttccagaaaatcgacgattacctcatcttcgatccttacgacaaaaaagactatgtgatgtttggggcagtagccacttcatggcaacatttttatcccgaaacgccccgcaccaaacatttatacaactttaccatcaatgcaatgaaaatgcgcaaacaacaagaacagcaggcacaactgtgggaaaacattcccatcgtcaccgaatcttcgcttcccgatgtggttttgcccgatataaacaacaacgaagtagcgctatcgtcattgaaaggcaaagtggtgttgctggacttcacagtgtacaattccgatttttctcccgagcataacctgcatatcaatactatttaccgacgctataaaaatcgtggattcgaagtgtatcaaatttcgtttgactccgatgagcacatttggaaaaatgccgccatcaatgttccctggataacggtacgcgatccccaatcggtttactctccgcttctctcacagtataatgttcgcaaccttcccaccggctttatcgtcgatcgcgaaggagatattgtagcccgcatcgaagattacaccaaattggaaagcgaattgaataaagtatggtaaaaaaatatgaattggcttaaacttaccatcctaattaactttattgcttgattttctaaacactgtcggataaaaagcgttatgggttcaaaaaatcgtttttcgggatcagtgaaaaaaaattttactacctttgcggctcgattattataaacaactatacgtttcgaggaaatatccaaaattcaaaacattatattttgaaatttacagcagaggatacacgttttatcattacaataaaaattatcattatcgccggattaccactcaaaagcgtgtattaaaatcaacaaaatgacttttaaagaattaaatttgagagacgagcttcttttggccatcgaagagctcggttttgatcaacctatgcctattcaggcaagaaccattcctttcatccaaaatcaaaattccgacttggtggctttggctcaaaccggaacaggaaaaacagccgcatttggccttcctgttatgaacatgctggatgagaacgcaaaacaaacacaagccttgatattggcacctacccgtgaattgtgcattcaaattggcaacgacctgaaaagctatgccaaccatctgaaaggaattaaagtggtagcggtatatggcggagaagatatccgtatccaactgaaacaattggctacacctccacaaattattgtggctactcccggccgattgatggacctgatgaaacgcaaaaaagtggagacgtcggctatccgtttcgtggttctcgatgaagcggatgtaatgctcaacatgggattcagagacgatattgagtccattctgaaacaaatgcccgaaacccgacgcaccctgcttttttcggcaaccatgcccaaagaaatctccaacatcgtacatcgattcatgaagaattatgaagaaatcgtagagggaacgaaaaattcgggtgccgccaacgtggaacatatctattacttgactcccgaaaaacacaaatacgcggcactgaaacgcattgtcgacagcaatcccgacatctacggcatcgtattctgcagaacccgacaagaaaccaaagaagtggccgaaaaactcatgcaggacggctacgacgccgatgcgcttcacggagacctctcgcaagcccagcgagataccgtaatgcaaaaattcagaatccgaaacatccaattgctggttgcaaccgatgttgccgcccgtggtttggacgtagacgatcttacgcatgtcatcaattacaacctccccgacgatatcgaagcatatacccacagaagcggaagaaccggaagggtaaataaaaaaggaacgtctatagcgcttatccactccaaggaaaaacataaaatcaaagcgctggaaaagatgttgaaaaaaaatttcgttcaacaacaaattcccaacgagcaagaggttttcaaaaaacaactgcatcatttgatcgatcggatgatgaatgtggaagtaaataaggatcaaattcaaccttacatgaatcaaatcatgacacaactggaatatttgagcaaagaagagattttgaaacgatttgtttcgttggaatttaaccgttttgcaacttactacaacgatgcggaagacttgaacgaagtttgccgtcaggaagaaaaaacaacgcaaaagcgaaacaaaaaacgttcccaaaaaaccggaaaacgcattcgtttaaggctgaatattggcggacggcatggtatagatacccgaggttttttgggtatgttcaacgaaatggtcggcgacaaatccatccatatcggttcgattgaaattaccaaaagatttacctttttcgatgtatttgccgaccaaacagaaaaagtaatgaatgctttttcctcaaatccgggaatggaaatctgcaaagtaaaacgcgacaaacaatacaaacggttatttgcctgaaataaccgttcgcacataccggacaagcaaataagggctgttgatttttacacggctcaaaactattcctaaacccattcgatatttaataaaaaagccccgcagataggcgaggcgctaaatgttttcacaacggaataatccttattgtgaattgcttcaaaagttagaaacaaagataaaaactttttttcacaatccaaatctttggtttaaaaatataattttttaactttacggcaaagataaattaaaatcacattaaaatgaaaaaaatactcggattggatcttgggaccaatagcattggatgggcattaatcaacagcgatagcgaaaacaacaacaacaaaattcttggtatgggttccagaataatccccatgagccaggatatattgagcgattttacccaaggcaactccatatcgcaaacggctgaacgcactcaatatcgaagtacacgacgcttacgggaaaggcatctgcttcgacgtgaacgcctacatagggtgttgcacttaatgggattcctacccaaacactacgatgaaatgattgactttgaaaaccatccgggtaaattcctgccggagacagagcccaaaatagcatggtccaaaaatgacgaaagcaagtatgaattcattttcaaaaaatcatttgaagaaatgatggccgatttcaaggcaaatcaaccggaattgcttacggacggcaaaaaggttccatacgactggaccatttattatctgcgcaaaaaggcattgactcaaaaaatagaaaaagaagaattggcatggatactgctgaattttaatcaaaaaaggggatattatcaattgagaggcgaagaagaagatgaagaaaatccaaataaatcgatcgaatatcatgcattgaaagtcactcatgtggaagcagatgaagcagaaaaaaacaaatcagatatttggtacaccatttatctcgaaaatggttggatatatcgcagatcgagcaaaattcctctatttgattggattggggttaccaaggaattcattgttacaacagaattaaatgatgatggcacggtaaaaatcgacaaagaaggcaaagaaaagcgttcgttcaggattccatctgaagacgattggacactattaaagaaaaaaaccgaaaccgacatcgataaaagtaaaaaaacggttggaacctacatctatgatactctcctcaaaaaacccgatcaaaaaatccgaggaaaactgatacgaaccattgaacgtaaatattacaaaaaagaattaaagaaaatattgacgaaacaaaaagaatttcatcccgaactaaaagatagaaatttatatagatcctgcgttgttgaactctatccaaacaataaagcccaacaaaacaatatacgaaacaaggatttcacttatttattcatagaggacatcattttttaccaacgtcctttaaaaagcaaaaaatcgctgataagcaactgtaagttcgagtatcgcacctataaggataaagaagggaacatacgtaaagcaccacttaaatgcgtacccaaatcccatccgctttatcaggaatttcgcctatggaaatttgttcaagatttgagaatttatgaacgcgaaaaaaagataaatggcaagctctatatcgattatgatgttacaaacgaatttatcaaaacagaagaagacttggtaaaccttttcgattggctgaacaaacgatcggggattaaacaaaacacactactatcctcttattttaaagtcaaaaaaacaaacaaaacggacaaacaactcccttatcgttggaactacgttgaagacaaagaatatccctgcaacgaaacgcgtttctccattactaaccgtcttgaaaagataaacgacctcccgaacaatttcttaaccaatcggaaagaattcgaattgtggcatcttctatattccgtgatcgacaaaaacgaactcgaaaaagctttaaaaaagtttgctgcaaaaaacaatctcccaataaacgaatttgtcgatgcgtttgtaaagtttccgcctttcgaaagagattacggatcttattccgaaaaagctttaaaaaaattattgcctctaatgcgcatgggaaaatattggaattatgaggcgatcgatttaaatacccgtcaacgaatcgaaaaattattgacaggtgaagtcgatgaaaccattcacgacaaagtaagagaaaaaacatcgcatttaaccgatgaaaagcaattcaaaggtttacccgaatggcttgcagcatatgtagtatatggccgtcactccgaaatgagtgaatatacaaaatggaatacgtatcacgatttaaacaactatttacaggatttcaaacaacattctttgcgtaacccaatcgtcgaacaagtaatcatggaaactttacgtgttgttcgcgattgttgggaaaaatatggcaacatagatgagattcatgtggaattgggacgagaaataaagaaccctgccgagaaacgaaaaaagataaccaaaaccatcacccaaaacgaaaacaccaatttacggataaaagcattgctcatcgaattagccaacgacggcgttgaaaacgcccgtccttattctcccactcaagaagaaatactgaaaatctatgaagaaggtgtgcttaactctaccattgatattcccaacgatatcgaaaaaattgttcgcaaagccacaccaaccaaacaagaactcaatcgctacaaattatggctcgagcaaaaatatcggtcaccttatacgggagaaatcatcccgcttgccaaactattcacaccggcttatgaaatagaacacatcatacctcaatctctttattttgacgattcgttaagcaataaagtgatttgcgaatctgaagtcaacaaattaaaagggaatcaattggcatatgagtttatcaaaacccatcatggggaaaaagttgaactgaattttgggaagaccgttgaaatcatgtcgaaagaagcatatgaaaaattcgtcaacgaaaattaccgcaacaattttttcaaaagaaaaaaattactgatggacgatatccccgacgaatttatcgaacgacaaataaacgacacccgatatataaccaaagtagtcaaaagtctgttatcgaatatcgtacgagaggaagacgaacaagaaccaacctcaaaaaatgttattgtaaccacagggcaaattaccaacacattaaaaagggattggggtttaaatgatatctggaacgaaatcatctatcctcgattcgaaagattgaatcgattaaccaattccaccctctttggacaatgggtaaacgaaaacggaaaacgtttttttagaacacaagttcccctcgatttgcagaaagggttcagcaaaaagcgtatcgaccaccgtcaccacgccatggatgcattggtaatagcctgtaccacgaggaatcatgtcaattatttaaacaacgaatctgcaaaatcgtccaacagagaaacccggtacgatctaagaaacaagctctgtaaaaaagtaaaaacggacgataagggaaattacatttggcaattcattaaaccttgggaaacttttactcaagatgcaaaaatcgaactcgaaaatatagtagtcagtttcaaacaaaatttacgggtcatcaataaaaccaccaattattatcaacgctatgtaaatggcaaaaaagtaatcgataaacaaacaaaaggcgatcattgggctatacgaaaatcgttacataaagatacggtagccggtcaagtcaatttgcgattcaaaaagaaagtatctttatctgttgctatcgatcaacctgaaaatattgtcgataagcaactgaaaagagaaataaaaaacttgcaaaaagagaaattcgacaaaaaacaaatcttgaaatattttggcaatctcaattacagatggcaagggaaagaaataaaacaacccgaaatatactatttcagtaacgataaggtagaaatgacagcttctcgggttaatttagatacatcattcggaacaaagaaaatcgaatccataaccgatacaggcattcaaaaaatactcaaaaatcatttgtccaaattcgatgaaaatgtaaacggaacaattatcgagcaccccgaattggctttttctccggaaggaatcgaagaaatgaacaaaaacattcgcgaactgaatgacggaaaaccacataagcccataataaaaattcgcacatacgaaacaaaaggaaataaattcaatgttggaacaaaaggaaacaaaaaattaaaattcgttgaagcagacaaaggaacaaacctgttttttgccgtttatatcgatgatgacggaaaaagaaactttgaaaccataccattgaatatcattatagaaagactcaaacaaggatacgaagccgtacccgaaaaaaatgaaaaaggccatcgccttttattccacttgtcgcccaacgacttggtttatttgccaacagaagaggatattattaacgggaatgtttccataccgttagataataataggatatataaaatggtcagttgtacaggtaacgtggcagattttattccattttatgtggcaaatcctattgtaaaaacaactgaactagggagcaacaacaaagcacaacgggcatggacaggtgaaatgataaaagaaatttgtattcctcttgaagttgaccgcttaggaaatatagtgaaaataaaaacaacatgattaaacgcaccttgtattttgggaatcctgcctatctttcattgaggaaagaacaaatggtaattcaattgcccgaagtggaaaaaaatgagagcttacccgatacatttaaaaaggaagcaaccaccaccatccccatagaagatatcggagtagtgattttagataacaaacaaatcaccattacgcatggattgttggaaaaattgttggcaaacaattgcgccctgataacctgcgatagcaatagaatgccaacgggacttatgttgcctttggcagggaataccactcaaaccgaacgttttagcgatcaagtcaacgcttcggttcctttaaaaaagcagctttggcaacaaaccgtacaagcaaagattaaaaatcaggcctacgtattggaaaaaacaacgggagccgtggtaaaaaacatgttgatatgggcagaaaacgtgaaaagcggagatacagacaatcatgaagcacgtgcagccgtttactactggacaaacctttttccaaaaataccgactttctctcggaatagaaacggtattccgcctaataatttgcttaactacggatatgccgtattgcgtgcagtagtagcacgctcattagtggccagcggattactccccacgctgggcattcatcaccgcaacaaatacaacgcctattgtttggcagacgatattatggaaccctatcgcccttttgtggacaatttggttgttgacattgtaaacaaaaatgaaaacatctctgatattacaaaagatgtaaaaaccgaattattgcaaatccctgtcatcgacgttaagataaacgggcaaagaagtccgttgatgatcgccgtgagacaaacaacagcatcattgtataaatgtttttcgggtaaaactcgaaaaataaaatatcctgcttttgaataattttttttgctctatgcagcggtttagtgaatatagaattatgtggattctcgtattttttgatcttcccaccaaaacaaaaagagatcgcaaaaggtatacggattttagggataaattaataaaagacggctttaccatgttccaattttcaatttatctgcgacactgcgcaagcatggaaaacgcaaatgtacatataaaaagagtaaaaaactacctgcctccggccggcgatgtcggtattttgtgtattaccgacaaacaatttggaaatatggaattgttttccggaaaaaaagaaaaagaaataaaaactccttaccaacaattggaactgttttagtataaaaaaatcccgtagaatctacgggattttttattggaacaacttcattttttaattgtaaacactactataaaactctgacacatatcaggatacacatatcctgttgttccgaatatcaaagatatcaacttttgagagcaattcacaactatccataactatttgattttaagcgatttgttgttccgaatatcaaagatatcaacttttgagagcaattcacaactcatcagtccagataattccatgtaagtgggttgttccgaatatcaaagatatcaacttttgagagcaattcacaaccggaaatggggggtattacccccccattctgttgttccgaatatcaaagatatcaacttttgagagcaattcacaacaccacagcttcacaagttcagcagaggtgtgttgttccgaatatcaaagatatcaacttttgagagcaattcacaacaccgcctggtgcgattttgacccgaaaaaggttgttccgaatatcaaagatatcaacttttgagagcaattcacaacgaagttttcaatcttgttccattagagtaagttgttccgaatatcaaagatatcaacttttgagagcaattcacaactgtgattggaaataaatcaatggaagaatagttgttccgaatatcaaagatatcaacttttgagagcaattcacaactttaatttggttgtccccaatcaatttgtggttgttccgaatatcaaagatatcaacttttgagagcaattcacaacctgcagtaatgcgagaattttttctttcagttgttccgaatatcaaagatatcaacttttgagagcaattcacaactgtaatggaacatgtttttgtcgattcaccgttgttccgaatatcaaagatatcaacttttgagagcaattcacaacaaacattaaataaagattcggcatttcaggttgttccgaatatcaaagatatcaacttttgagagcaattcacaacaaatagttgtcagtcatataaccgatttcggttgttccgaatatcaaagatatcaacttttgagagcaattcacaactgtttatgggggctggccgtatatggatttgttgttccgaatatcaaagatatcaacttttgagagcaattcacaacacagatacaaagaatataactgcctatttgttgttccgaatatcaaagatatcaacttttgagagcaattcacaactgcttcattcacattttcaaatgtctggtcgttgttccgaatatcaaagatatcaacttttgagagcaattcacaacaagtctcttcctgtaaagtcgcatgcttcgttgttccgaatatcaaagatatcaacttttgagagcaattcacaactctctttgctgtctcgctccggagaagttcgttgttccgaatatcaaagatatcaacttttgagagcaattcacaacccgcaaacgaattaggttttttcaaattttgttgttccgaatatcaaagatatcaacttttgagagcaattcacaaccctcaccgattgcgattgaatttactattggttgttccgaatatcaaagatatcaacttttgagagcaattcacaacaagcacttctgcggaaagcgggagtcccagttgttccgaatatcaaagatatcaacttttgagagcaattcacaacccttccgccattctcaatcatcacgcgactgttgttccgaatatcaaagatatcaacttttgagagcaattcacaacatcttcccctggcattggtagaaattgcaagttgttccgaatatcaaagatatcaacttttgagagcaattcacaacgtcttcttgtgaagcttttcttgtaattgggttgttccgaatatcaaagatatcaacttttgagagcaattcacaactccttatgtctgggtctaatttaagcattcgttgttccgaatatcaaagatatcaacttttgagagcaattcacaaccgctttgtggatttggattagttgattcatgttgctccaatatttcacttttccgcccatcagaaaagaaaagctccacacgaatagaatcgccactaaaaacaagaaaagcagccattgcaaagagagacaaaaaagcgaaagaatttaattttttcatatctttttatattagtcacaggtacaaatgtacataaaagtttatgcatatactcagacctataaaattaggatttcacctcacttcacttcattttgttggggtacgtgaattgaaaaaggcacaactttctttatatttatcgcttcctttttcattctgaacacccggtttgctccatttaccttgcttgttccaattgccccaactgtctcgttcgttcctcaacagcgccatccaactcaacttgaatttctgcataatcaacgttttcaacaaaaaaaaataaaaaacccctgcgaggcacggagcgcattgttttgcatacggtacggagcgtattgtctgcatgcggtacggagcatattgttttgcataaggcaaaacaagtttatcgcttcgccggtattgcgacgtattgtctgcacaaggaagaacaagccgttgcttgtacgacaaaggagagaaaaaatattcccgttaggaaaaacgccactgggaagggagggagaaattgccccgacagaaaatacgaagtgcgaaaagaaaggggggaaattgctccggcacaaacacttttaaacggcataacccataaatccacaagaaatcattacctttgcacttcaaaacaaaaaggcgatgtttaaagaaattttccttaccattattcatctgatcacttcgcctcaaagtgcatggagaagcattaaaaaagacgaagaggatcaacaagaatttttaagcaaatttcttcatccggttttcggcattattgcgcttgcttcctttataggagggctctggtttacccgcgacggaaacgtagagcaagctttaaaagccacaatcgtaaacattatcacggtatatggagggtatcttgttgccgcatacatactaaacgaaatctcattccgatacgaccttcaaaaacaaatagtcgcctttcagcgttttacaggatattcgtcggtcgtaatctacggcttatacatcatcatgccgttcctttcggattttttcatcttgtggttgctttcggcatatacggcttatatcgtatacaacggagcagaagtattcttcgaaatagcggaaaacaaaaagaaaaaatttacgcttgcctctacccttctgatattgtttattccgctaattattaaagcaataatgaattttctgatcaagtaaaaacaatgaaacagacacctgtcaatataaaaaacaaacgtgccaccttcgactacgaactggtggaaacctacactgccggaattgtcttgaccggaacagagatcaaatcgatacgtcaaggcaaagccagtctggcagatacctattgtatatttgaaaaaggagaactctgggtgcgaaacatgtatattgccgaatatttttacggaacatacaacaatcacaatgtacgacgcgaccgtaaactgttgctcaacaaaaacgaactgaataaactcatgcggtggacaaaaaaacccggcttcaccatcattcccacccgattattcattaacgaaagaggactggcaaagctcaacattgccgtggcaagaggcaaaaagcaatacgacaaacgtcagtctatcaaagaaaaagaagacaaacgtgcaatggaacgcgcatttaaaaagtactgactttatgggtgttgaagtgttcataaaaccacgttccaattaaacgccgctcggagccaacttgttgtcattggccaagtcgtgacaataaaacaacgtttcaattaaacaggtaagtaagcataagcatatgaatttgtataaagaggcaattctcccaagtttgaaaaaatcggggcacacctccatttggctgctaaaaatcatcctccccatatcattggttgtccgtttgttggattattacggcattcttgcttatattgccgattttctcaatcccgcattcgtttatctgggattgccggggagcacagccattgttttcatcaccagcatcttcttgccgctctatgcaccactggccatcatcacttccatgtcgatcacgctccgcgaattgaccatccttgccctgatgtgccaaatttcgcacaacctgcccgtagagtgtgccattcaggccaaaacgggcacgtcgttttggtcgatggtgacgctgcgaatcttcatgagtatcgttgttgccgttattctcaacctcattttaccgcaagacatgggtatgcccatatttgcacagaccaataccgtagcgatgaattccattggcgatgtacttgttctttggttgaaaagttcgttgcaaatagctctgctcatcatcgttattgtcactacgctaaatattttgtacaaaattctcgatgaatatcatttgatcgaaaaactgacaaaaacaatagaaccactattgaaattctttggatttccgagcagtaccggttttctgtggcttattggctatattgtggggctgtcttacgggggagcactgatgatggaacagatgaacgaaggaaaagtaacaaaatccgacgccgaattgttgaattatcatctggctctttcgcattccattatcgaagacaatttgcttttcgtggcattgggcgtgtctatttggtggattttgggcacgcgcctcatcgctgcggcaatcgtggtatggctacgaaaaatataccttcggctaaaagtaaaatggctttatcctgccgtaaacctgaaaattgaagaaaaaaagataagatgaatttcaacaaaatattgcaatcgcacatcctcatccttgatggagcgatgggaacgatgattcagcgttatgggctgaccgaagccgatttccggggcgaacggtttacggattttcctgtgttgctcaaaggaaacaacgatttgctctcgatcacaaaacccaacgtaatcgaggagattcatcgcgcttacctcgaagcgggagccgatatcgtagaaaccaacacctttaatgccaatgccatttcaatgcaagattacaggatgaaggatctggtgcgggagatgaacctcgcatcggcgcgtttggcacgcaagtgtgccgatgaattttcgaaaaagacacccaataaaccccgctttgttgccggttctatcggtccgaccaacaaaaccgcatccatgagtcccaacgtggagaatcctatgtaccgcagcgtgacgttcgacgagatgaaagccgcttacaaagagcaaatggaagccttgatagaaggcggcgtggatatgcttttcatcgaaaccgttttcgatacgctcaatgccaaagcggctatttttgcggcaaaagaaatagccgaagaaacaggcaaaaatacaccgttggcgatttcggtttccttgtccgacaaagcagggcgcactttatcggggcagacgctcggagcttttattacctcggttgcccacgccgagccgttggcactcggactgaattgttcgttcggacccgaagagatgctgccttatttgaaagaggtagcccgcacctcgcccttttttgtcgttgctttcccgaatgcgggattgcccaacctcttgggcgaatacgacgaaacgccggaaaggatggccgctgccataaaaacgtttatcgacgaagggttggtaaatatcatcggaggatgttgcggaaccactcccgctcatattgcccaatatgtcgatctcgtaaaagacaaaacaccccatcgaccgtcgccccgaccacgacacctttacctctcggggctcgaagaattggtagtttcgcccgaaacgaattttgtcgttatcggcgaacgatgcaatgtggccggatcacgcaagtttctccgattgattcgcgaaaaaaattacgaagaagccctcaatattgcccgaaagcaggtagaagacggtgctcagatactcgatatcaacatggatgatgccttgctggacagcaagcaggaaatgacgaattttctcaacctgttggcttcggaacccgacgtggcacgagttccgttgatgatcgactcgtcgaaatgggaggtgctggaagccggtctgaaatgcgtgcaagggaaatccatcgtgaattccatttctttgaaaaacggtgaagaggaattcctgaaaacggcaaaaaaaatacaggcatacggcgccgcagcagtagtgatggcttttgacgaaaaaggacaagccgacagtttcgaacgccgcatcgaaatttgcgagagagcnnaacgtactggccattgccacagggctggaagaacatcgcaactatgccgtagatttcatcgaagccgtgaaatggatcaaagccaacctgccgtatgccaaagtaagcggcggagtgagcaacctttcgtttgccttccgcggcaacaactatattcgcgaagtcatgcattcggtttttctctatcatgccattaaggcgggcttggatatgggaatcgtaaatccggcacaatcggtcatttatgaggaaataccggaagaggtgaaaacgatagtggaagacgtggtgctcaatcgccgcgacgatgcggtggaacgactgatggaatttgccgaaaaaataaaaagtgaaaaaacaaccgaaaccaatcacaccaaaaccgaggaatggcgcaatctaccggtgaacgaacgactggttcatgcattggttaagggtatcgatacttacttggaagaagaccttgccgaagctttgaaccgctatccacgcgccatcgatatcatcgacaagccgttgatgacgggcatgaataaagtcggcgacctgttcggttccggaaaaatgttcctcccgcaggtggtaaaagccgcacgcacgatgaaaaaagcggtagccattctgcaacccaccatcgaggccgaaaaatcggccggagaatttcaaaaagccggaaaaattctcctagctaccgtcaaaggcgacgttcacgacatcggcaagaatatcgtttcgatcgttctctcgtgcaacaattacgaaataatcgacttgggcgtaatggttccacccgaaaaaatcatcgaagctatccgcacggaaaaacccgacatcgtgggcctgagcgggttaatcacgccatcgctcgaggaaatgggtatcgtggcagaagaaatggaaaaagccggttttcgtatcccgctgcttattggcggggctaccacatcgaaactgcataccgccctcaacattgctcccaaatacgaaaacggcgtggtcatctatgtcaaagatgcttcgcaaagcccgtcaacggtggccgatttattaagccccattaccagaaacgattatatcgaaaaaattcgcaacgaatactcgacacttcgaaaagactactccaatcggaaaacggagcttgttcccctggaagaagcccgtaaaaatgcattccgcatcgattggagcaatttcactccctatgttccgaaagtaacgggaagaatagtgttgccgacaataaaaatagaagaaatcgttccctatatcaactggaaattcttctttcacagttggaagctgtcgccaaaattcgcaagcatcaccaacattgggatgtgtggccattgccgggcacaatggctggcatcgtttaagaacgaggatattcaaaaagcgcaagaagcttcgcgtctctacgacgatgctatggaattgctccacaaatttattgatttggatgccgaatatagtaaagccgtatttggtttatatgaagcttttagcgaaaacgatacggtttttatcgataaaaaagccttccctttcttgcgccaacaaagaaaaaacgataaaaatgagtatctttgtcttagtgatttcgttgcgccacgatcatcgggcaagaaggattatgtaggtatttttgccgttacggcaggagcaggtgcggattatctgctgcagaaatatcgaaaccagggagatgaatattcggcattgctcatgaaatcggtgctcgaccgtctggctgaagcggctacggaatggctgcacgagaaagtgcgaaaagaatattggggatatgcacctcatgaaaaactgcccattcccgaattgtttgcggtaaaatatcagggcattcggccggcagtgggctacccctccattcccgaccaatcgataaatttcttgctgcacgatatgctctgctccgacgaaataggcatcacgctgacggaaaacggagtgatgtatccgaacgcatcggttagcggatttttcttctcgcacccacaatcccgttattttgccgtaggtcccgtgtcggatgaacaactcgacgattacgcaaagcgcagaggaatgagtaaggatgaaatacgtaaatttttattgtcaaatatagcatagaataagcaaagatgaagaataattttcgctaatacagaacttaagaaagaaaaaaatagaagtcaacatgagaagttttggaagcgacaacaattcgggtatacatccacgcattttgcaagccataatggatgccaatgtcgatcatgccataggatatggcgatgacgagtggacacgcaa

SEQ ID NO: 1138 - DNA, 24521 bp, synthetic construct
  source 1..24521: mol_type = other DNA
  misc_feature 1..24521: note = Synthetic
tttcctttttgtgcgaattgaacgacaccgtgtgtcaatgttaatcctttatcatactgacgccacataagaacttcgtcgtaaccagccatattttcatcggcatacatattataatatggattcgaggcatcttccgtattttgttgtaggataccattgttttctgtcaacgaaacggcatcggctacgactttcgccgcatccatcgcctggccgaggaaatagtcgatctcattgtcgatactccctgaaggatactggaagttagcattataatctttgctttttccgggccatccgctaccgtcgggcacgaatggggtattgcggaaatacttcagccaggtgccctcgaacaatgcaactctcgatttgaacagataggcgcagttacgggagaggcggttctttttgccgtcgggcgaagcgtctttcagcataacgatcgccgaatcgaggtcagccaggatgaaacgtgccacctcgttgcgtggtgcccgtttactggcttcggtcaacgcttcctgttcgtcgatgaccggacgataaaggatcgggaaatcgccgaaagcttgtagcttattgaaatattcataagcccggaggaaatagacttcaccgatataatgtttcacattctcttcgtttccgctgatttctccggttttccatttatccacaaccctaccgaggaaataattgcatttgtatatcttggtgaactcccaatcgccaccggtctgtgctgttttcaactcgccgggaacatagtctttataatcacctttggcgatcatattgtctgtcccgacatcccatccgaatgtgccgtaccagttgatgtctgtattgtgtgaaggcaggatatccggatacacgttatttatataggaagccaactgactttcttccgtcaggtaatattcgggtgtgatttgtgagagcggctctctgtccagataatcgttacacgagaataagagtccggccaggataatgcctgctgtctgtttgcatatattatttatacggttcataatgattctgttttataaggttacacttaaaccaaacgataaagtcttggacaaaggatatccgctaccaccgtaaccggcatcgattgtttccgggtcgagggttttgaataagccggttcctgtccagaggttttcgccggagacgaatactctcagtttggatacatagaatttgttggtgagagacgaaggcaatgtatagcctaactgtacgttcttcagacggatataagctgcgttttgcaggtaacgggtctgtatgttatggttcatgttcgtacggaaactggggcgcgggaaataagcatccaggttcacgccggcttcaccagcctgtaccataactgaattctcgtcacggaaataatccagatgaggtgcatagcaggtcgaccaccagatgccgccgtggcttccccagaacgtagaactgttctggtagtaatcgcgtttcatcacaccctggaagaaggcgcggaagtcgatacctttccaatcggctgtcaggtcaataccgaaatggtagcgcggtgtcgagtttccaatgatggaaaggtcgccgtggtcgctgatcgtgttggcaccggcatctacctttccgtcgccgttcgtatcggcgtacatgatatcaccggcggcccagagcgaacccagggcactttgtccgccgttaggcaggctggctagatgctggtccatttcggcctgtgtcctggcgataccgactgtggtataaccccatatttctccgactttcattcctttccggtacgtatcgcttgcaatgacaccggttttgttcggatagcgggtgatctcagtctgtgagtcggacagcatgagccgtacgccgtaacccagtccattttgcaggcggtcgttccagccgacagagagttcccagccataggttttcaagtcggtgttattggtacgcggtacgtttgttcctaacgtgatcggtagttccggagccgggccgatcatatcgagtgtgtttctgacgaagtagtcgaacgatccggtcaatcggttgttcaatgcaccgaagtcgagacctatattccatgtttttaccctttcccacgtcagggaggaggcgatcaattccggtgtgatggcgatattgggttgcgtaccgttgatcatccattttccgttcgaggcctggaactgcatctgtgcatacgttggatacaggcttgtcgtattctgatttcctaattctccgtaagaacctctgagtttgaatgtgcctacatgatcggcgatcggttcccagaaactttcacgtgcgaggttccaccccagtgagaaggaggggaacaggttccatcgttccgatgaacggaagcgtgatgtcccgtcataacgcaggttgacttctgctaggtatttaccctcgtaatcatagttgatacgtccgaagaaaccagcagtagcccaatggtcggaagagccttttactatcggtgtgatcgggttaccattgatatcgacaccggaagtaatatctgtttccggcagtcccggcacaatgatgccgttgcgttgcaggtaggtatattttttcttcgataactcagattggaagccgaacatgcctttgaagttatggcccgattccagttgcttgctgtattctgtataagcattgaagttcaggtagttttctttcgacatatcttcggatacataactggttgaattataaacatacgggtcgccggaaacgttatggttataagtgatctggcgatcggtatgttgtgtcgagttgtagatacgatagtttacgtcgacgaatgttttccagtctttgatcggttccagtactaactgtgcctgctgatacagatagtcagcctgtttcttgatcctgccaccctccaccaggtcgagtgccggggtaggagcactgtaaaggtaaccgttcgggtcgtaagctggcataaatggccatgcctggcgggttaagccttcgtaaacaccgtccagtgtcgtcggtttggatatatcttcgcggatgaaacggctgctgtaattcagttgtgcccagtccgtcatcttgacgttgatctttccggtagcggtatagcgaccgaaattatcatcggaaatctttaataaaccgttctgatcgaggtagttcaaggatagataataagtcactttgtcgtttcctccgttcaggctgaaattgtgttcctgtgaaaaagcccaatgcccgaaaatcgtgttataccaatcctggttggcgctacccgaactgtaagggtccatccagtaacccggattgctggggttttcgatcatggtcggagtggacggatgtccatcgcggttgtctttgatccgttgtaaccatgttgcatcaaaataaggtgtttgtccggcattcgctctcgcttcgttgaagtataaagcgaatttataggagtctacctggtcctgtaacagaacgggatcgttccagcggaaactgttgttatagttgatgacgggtttgccgctgacaccggttttcgtggtgatcagtattacgccgaaaggtgcacgcgaaccatagatggaggaagctgccgcatctttcaatacggagatattttctatatcctgcgggttcagtgcattgatatctccttccatcccgtcgatcaggatcagcggactgccgcttgaaccttgtccgatcgtggcgataccacggatgtttatatcggctgtctggctcaggtcaccggaacgttgtgtgatctgcaaacccgggaccaaaccctgtaaggcttgtgtggcggtggttaccggacgggcttccaggtcttttgcattggcaatcccgacggaacctgtcaggtttactttcttctgtgtaccgaaacctactaccacgacttcgtccaggctttgtgtatcttctgaaagagtgatggtaagtgctttaccggcttcggccttgatttcccgggatagatatccgatatatgatatcaacaggatggagttctcaggaacgtccaggctgaagtgcccgtccatatccgtaatagtaccgatcgttgttcctttaacggaaacgttggcaccgataacgggaatgccggcttcatctctgaccgttccctgtacccgtttactttgctgggtggtaaacggagttccttttttagacaaaatgatttgacggtctacaatgctgtattgtacatccgtgtttttgaatagttggttcagtactttgcctatctcctgatttttaacctgtatgttcaccggtttactgatatcgagtgtattgtcggtaaacaggaaggtaaactcggtctccttttcgatttgttccaatacctgttcgaccgtcgcattagaaaaagcgagcgataacgacacggattgtgaataggattcttcagctcttatctgcaggatcgtgattaacaataaaaatatacctattctcatttttcgacaaattttaaagaaatatagggatcctatatccccgaataatttctggattttcataactttgttgctgatttagtgattaattatgtctttggatcttgtgccaaagatgtgattttcgcgaacaagagtgagttgcacctcgctcttgtttttcttatgtctgtattttcaatctctctccataggctttaatcatttaagtttaacaattcatactgttttattttaaccaaacgtcgattcgctgtttagcaaatgtggcatcgctgttttgtttcatcgcatttactttccacctgatcggtgtggcttgttccagataactgaatatctgatagatcgtttcgtcggtaaatgtggcccaacaattatattccttatcctttttctgattgtggagcactatctctacattgaaacgatggccgagtacccggaatacgtcgtcgagtgaggcattcctgaaaacaattttgccgtctttccaggctgtattctcatagatgttgactttccggatctcatatttattcgttcgtttgttgtaagacaatctttctcccggtttcaggccggcaatgaacttatcgtaagaatggatatccaccagtccttctaccaggattgcttctacttcttcacgttcatcgtatgtgtttacattgaattgcgtaccgtgtgccatcactttcagaccggatttggtagtgacgaagaaagggtgttctttatccgattgtacttcgaaataaccttctcctgtcaactccacttctctggtgtttcctgtgaaaacggttgggtaacgtagtgtacttcctgcattcaggcagactttcgagtgatccggcagttccagccgtgtgaccatacccggggcagaaagaacctccatgaattgtacggaactttcgatcgccggtgcttgccgttcaaggaacagatatccgaaagtcagtgtggagagtaggagaggtatactaataatcgcagcgacacgcgataaataatttaccagggtccttcttttgtttctcttttccaactctctgttcacttcggcaaatgcctcctgcgagttgaacgaattatgctcatttatcttcgttttcaactccagggcctggcggagaacgtctgattccttttgacagtcatccgattctttcagccaggattctacctgccgggtttcttccggggtggtttgcttctgcgtatattttattaataatgtctccttttccaaatcaaaaaaatctttttctttcattgtcgattatgttatctttgatagatgaaaaatatgctcctttatatataggataactgaccgtaaaaagaccgccagttatttcataattttttttcagaaaattttcaatacatttgtatctgtatggaaatgactactcaaatacagaatcctgatgaattgttatggaagattgccataaacgatgataaagaggcttatcgaatacttttcgatcttttttatccggcattatgtctctttgccaaacgttatgtcgaagagcgggctgttgccgaagatctggttcaggatgtatttgtaactttgtgggaaagcaggaaaaaaataagagtggaatcgtctgccaggaattatctggttgtcagtgtcaggaatcaaagcctcaattacctaaagcgggaaggatacaaacaaaattatatcgatgcctatctggcaaagaatgcagatcagtccgattatgatgacttttatttgctgaccgaacttcagaagcttttggatgaagcactggcaaaactaccggagacgtatcgtcttatttttgaaatgagtcggttggagaacaatagcaatacggagattgccgaaaaactgaatatacctttacgtacggtggaacgttataaagcaaaggcaattgaaattctgaaaaaggatttgaaagattatttgccgttgcttctctattttcacttattgagttgacaagtaacacagatgacagttaatagttgaatagtatgattgaaatatctattaacagtccactgtcatctgtccactatcacctgtttacagccattctttcataaagctgtccatctcttcagcatgttcttccaggctttgcagcagtttgaactgagcttttgtacggatcaggttatgtttcgggctatggatcttataataagtatcgccgttgatatagtctgtcaggaagcgtacggtctgcatataagtcaataaacgaccgccataaggaagtagactgatttccagcggagaaaggaatgccttggctgtttccatgtaaccacgggtatatgctttgaagatatccatgttcacatttacgttgtccaggttttcatcgtcttcagcacctgtgtttgctcctgtacggataaagtcaccgatatccgacaaaacgaatcccggcataacggtgtcgaggtcgatcacacaaagcactttgtctgtgtcggcatcgaacatcatgttgttcacttttgtatcgcaatggtttgtgcgtttctgaagttttccttcgcgatataaacgttcctggatacacatggcttccgcacgtttttctacttcttcgatcaggtcttttacttcttccagacgtcctgcggcatttgcttttacagcatcatggaattgttgcaggcggaattccatattatggaaattaggaattgtttcgcccagcgatccttccggcaggtctgacaacatggattggaaatcaccaaaagcttttcctgcttcataagacagttcgggagtcacttcttcatagcttttgctgttcgggatgaacaggcatacacgccagtaactgtcgccgtcgaagtaatagggtttgccatcttttgtcggaaggaaagtcaatactttacggtcgatatcgctctcgcctttggcttccagtttcttacggatgtgtgtcgttacagttttgatattgttctgtaacatatctacatttgtaaagatcagatggttgatacgttgtaatacgtatttgatttcacctttttcgttcgttactttcagcgtatcgttaatgtgtccgtttccgaaaggttcagcggaaactactttttctgccagtgtgaactggtcgagaatgttcagtaattcttcttttgtttttgccatggtattttattcgattaatatagcttttaacaagctacaaatataggaatatttttgattttccccctttcttatgcctaaaatgggagggcataaaaaaaggctgcgaactaaatcgcaaccttttttcaattccttgcaggaaatgattatttcttattacggttaccgtaacggctcatgaacttatcaacacgtccagcagtatccactagtttagacttaccagtgtagaacgggtgtgaagtgttagagatttcgacctttaccagtgggtattcaacaccgtcgatttcgatagtttcttttgcattaatagttgaacgagtgataaatacatcatcgtttgacatgtccttgaatactacaggacgatagttttcaggatggattccttttttcattgcttctttatctaatttaatttatactcttattagtttggtaaccggtaaattggcttgcaaaggtatggatttgctctaaacaaacaaagaatttccgactattttttcctaaaccttgacttttgtgttattttatatgcttaatagcataatatatttggatagtttttatctttgtacaagattttcaatcattaacgtaataacatatacaacaatggtaaattacaaagacttaggtttggtaaacactagagaaatgtttgctaaagccatcaaaggcggatatgcaattccggctttcaacttcaataacatggaacagatgcaggctatcatcaaggctgctgttgaaacaaaatctccggttatcctgcaggtatctaagggtgctcgtcagtatgctaatgcaactctgttgcgttacatggctcagggtgcagttgaatatgcaaaggaattaggttgcgaaaatccgcagatcgttcttcacctggatcatggtgatacatttgaaacttgcaagagctgtatcgattcaggtttctcttctgtaatgattgacggttctcacctgccttacgaagaaaacgttgctttgactaagaaagtggttgaatacgctcatcagttcgatgtaacagttgaaggtgaactgggtgtattggctggtgttgaagacgaagtttcttctgatcatcacacatatactgaccctgaagaagtaattgatttcgctactcgcacaggttgcgattctttggctatctcaatcggtacttctcacggtgcttacaaatttactccggaacagtgccatatcgatccgaagactggcaagatggttcctcctccattggcattcgaagtattggacgctgtaatggaaaaacttccgggattccctatcgttcttcacggttcttcttctgttcctgaagaagaagttgaaacaatcaacaaattcggtggtgctttgaaagctgctatcggtattcctgaagaagaattacgtaaggctgctaagtctgcagtttgcaagatcaacatcgactcagactctcgtctggctatgactgctgcaatccgtaagactttcgctgagaaaccggcagaatttgaccctcgtaaatatctgggcccggctcgcgataacatggaaaaactgtacaaacacaaaattcttaacgttttgggttctgacaataaactttaatccaagttacagattaaatataggaagccactctgcatttgcagggtggctttttttatttttactatccaaatgttacaattttcgcctttttgctaacaggtgaatgggagaattaatcgcttttggagaagataggcggctttttcgactgttttggagaagagttcgaaaaatcatctaaatgatttttttaacagatggaaattagtaggaaaaagagcaaataacgggtgcgatgaagggcgaaaatgccagttcttgtgtgtggattaagttggtatatgactgtttttgagatgacgtaatgtttgtcgcttttcgaattaccggcttgctgaaaaatatcatctgaataatttgcctgagtaacaaaaaaataatagcaaatccttcaaattagaaacaatgtgctattgctaatctctgcgagaagcgcatattttcaaagaagcgcatgatgcggttgatacaggctgtggagaaagtatgtcagttgacgttttgacaaagtgacagaataaaaaaagggcgagtttccccgccctgaatgttttcacaacggaataatccttattgtgatttgctttcaaatttatctttgtaagtgcaaatatatataatatttttaataaaaaaagaaatattcgaaataaaagaatatatttgaggatacacaaatgttaatgccatgagaaaaatagtaggactggatttgggtaccaatagtataggttgggcactgttaaatgcttcagagaatgaaaaagggcttgttttgagtggaatagagcgctccgggagcagaattatccctatggatgcagctatattaggtgattttgataaaggtaattcaaaatcgcagacttctgaacgaacgcgatttaggggaattcggcgtttacgtgaacgtcatttgttgcggcgtgaacgtctgcatcgtgtattgaatgtattaggttttcttcctcagcattatttgaacgaaattgattttgacaatcatccgggtaaatatcttacagatacagaaccgaaattaccctggaagaaaatggcttcaggaaaatatgagtttctttttaattcatcttttgaagaaatgttgaatgactttagagatagtcagcctctgctagttggtgaaggtcgcaaggtcccttatgactggactatttattatcttcgaaaaaaggctttacgggaaaaaataaataaggaggaattagcgtggttattattacacttcaatcaaaaaagaggatattatcagttaagaggagaagatgaggaagaaaatagtaataaactggtggagtttcatgcgctgaaagttgaatcggtaaaagcaacggatcagaaaaaaggtaaggatgtctggtatgaaataatattggaaaatggttggatttatcgtagggcgagtagtgtacctcttgactggaaaggtaaaacgatggagtttattgtaacaacagatatcgaagaagacggtactcctaaagtagataaagacggttgtgtaaaacgttcttttcgtgcccctaaagaggatgactggacattaatcaaaaagaaaacagaagcagatatcgatcaatcggctaaaacggtaggaacttatatttatgatactcttttgcaacatccttctcaaaaaatacgaggcaaattagtacgtactgttgagcggaaatactataaagctgaattggaagctatacttaaaaaacaaacagagtttcatccggagttacaaaatgttgatctttataataagtgtatcacaaatttgtaccccaataatgactctcatcgcgaaaatattgcaaaaaaagattttactcatctgtttctgaatgatattattttctttcagcgtccgttaaaaacaaaaaaatcactgataagtgattgtccttttgaatatcggaaatataaagatcagaaaacgggtgaagaaaaaatttctccaattaaatgtatagcaaaatcgaatcctttctttcaagaatttcgtctatggcagtttatcagtaatcttcgtatctatcaacgagaaaaagaagttgacggaaaattgaaagtggatgtggatataactggtgaatggctgaaagatgaagacgattatgtagctttgtttgagtggctgaatgacagaaaagaaataaaacaagatgtgttactacaatcttattttaagcagaagaaaataaaaggacagacagtttttccttatcgatggaattatgtagaagagaaagtttatccatgtaatgaaacgagggcttctatattgagtcgtctggataaagctaatgtttcaagtgattttctgacaaaagaaaaggaaatggctttgtggcatattctatattcagtagaggataaatatgaaatagttaaagctttggttcattttaaagaaaaaaatcaattggatgatgcgtttgttgaggcttttcgtaaatttcctcctttgaaaaaggagtatgggacttactcggaaaaagcaataaaaaaactattgtcattgatgagaagaggtcagttctggagtaaagatgatatagatgctcatacacggatgcgtatcgagaagattattacaggagaggttgatgacagtattcttgaacgtgttcgtgataaagctattcacttattcgatattgcagactttcagggcttacccgtttggctagcttcctatatagtttataatcgtcatgcagaagcacaggagatgactaaatggctgacagccgatgatatggatgtctatataaattcttttaaacaacattctttgcgtaatcctattgtggagcaggtcatattggaaacattgagaacggtacgtgatatctggaaagaggccggacagatagatgaaatccatgttgaactaggtagagaaatgaaaaatccggcagataaacgaaaacaattaactgaacaaactcttgagaatgaaaatacaaatttaagagtaaagcagctgttgatggaatttcttaatccggaatatgaaatagagaacgtacgtccttattctcccatgcaacaggaaatattcagaatctatgaagagtatgtcttgaatagtgttgaagtgcctgacgatatgatggatgtgattaagaaattcagagaatcagatataaagaaacgacctggaaaatcagagataatgagatataaattatggctggaacaaaagtatcgttctccttatactggggagattattcctttggggaaactgttcacccctgcttatgaaatagaacatgtcattcctcaatcccgttattttgatgactcctttagtaataaggtgatttgtgaatcagaagtaaataaattgaaaagtaatcagcttggatatgagttcataaaaaatcatcatggtcagaaagtctcattgggttttggtaagacagtggaggttttttcagtatctgcttatgaagaatttataaaacaaaattatagtagtgcgaggaatcggtctaaaatgaaaaaactactgatggaggatattccggaagcatttattgaaaggcagttgaacgatagtcgttatataagtaaagtaatcaagggattattatccaatattgttcgtgaaaaagatgaacaggaggccatctcaaaaaacgtaataacctgtactgggggagttactgaccgactgaaaaaggattgggggcttaatgatgtgtggaatgatattgtttttcctcgttttgaacggttgaatcaattgactaactcggaacaattcacagtatataatgagagagtacaaaaatatcttcctgctatacctcttgagttacagaggggttttaacaaaaaacgtattgatcatcgtcatcatgcaatggatgctattgttattgcttgtgcgacacgtaatattgtgaattatttgaataatgagtcggctagcagacgctctaaattctcccggtatgatttgcagcatgatctctgtgaaaagcggagaacagatgacagaggaaattatacttggctgataaaaaagccgtgggatacatttacgcaagatgcccgattggctttggaaaatattattgttagttttaagcagaacttacgcgtaatcaataaagctaccaatttttatcaacattatgatgcatcaggagagaaggtctttgtaaaacaggtaaaaggcagtaattgggcgatacgtaaaccgatgcataaagaaactgtatttggaaatgtgaatctgcgcaggataaaatatgtaaagttgtcggttgcattggatatgccaagtatgatagttgataggtctttgaaagataaagtaaaatcactcatggcattgaaatatgaaaagaaaagaatagataagttttttaaggaaaatgcgaacgactggaaaaaatatgattttacgaagatagcagtttattattataccaatgatacaaaagatcggttgattgctgtaagaaagcctttggatagttctttcaataaaaagaaaatagaagaaagtgtaacagacactgctattcaaaaaatcttattgaggcatctgggaaattttgaagaaaaggcagaattagccttttcactggaaggtattgatgagttgaatcggaatctaaaggcattgaatggaggaaagttacatcagcctatctataaagttcgtgtttgtgagttacaaggaagtaaatttaatgtaggtataatcggaaataaatcaacaaaatatgtagaggcagctaaaggtacaaatctcttttttgctgtttatcaaacggagaatggtgaacgaacgtatgattcaattcccttaaatgttgttattgagcgtcaaaaacagggtttgctttctgttccggaagttgatgagaatggaaataagttattattctggctttctccgaatgatttagtttatgtacctactgaagatgaggttgtgaataatagaattggcgataagctgaaaagtaaaagaatatataagatggttagttgtacaaaaggggaggcgcattttattccttgtaatattgcatatcctattgttcctgtactggagttgggtagtaataataaagcacagcgttcctggactggtgaaatgatcaaagagatttgtttacctctgaaggtaaacaggctcgggattataatacatagaagtaaataagagtattattaaatcattttgttatgattaagtgtacgttatattttggaaatccagcgtatttatctacttgtaataatcagttaatgattaaattaccagaagtagagaagaatgatactgtgccggagagctttaagaagcaggcggtagtcagtcgtccgatagaagatattggtgttgttgtattggataataaacagataactattacatccggtgctttggaagctcttttggaaaataattgtgctgttatttcctgtgatagtaaaagtatgcctgtcgggttaatgttacctttatgtggaaatacaactcagaatgagcgatttcgtgatcaactggatgcttcattaccattgaaaaagcagttgtggcaacagactataaagatgaagatagaaaatcaagcatctgttttatctgatagtacaggtgcagaagtcagaaatatgcgtgtatgggcaaacgatgtaaagagtggtgatcctgataatctggaagctcgtgcagctgcctattattggaagaatttattctacagaataaaagattttacaagggaaagggatggtattcctcctaataatttattgaattatggatatgcaatattacgtgcagtggttgcccgtggactggtctccagcggtatgttacctactttaggaattcatcatcataatcgttataatgcatattgtttggctgatgatatcatggaaccgtatcgaccttatgtagatgaattagtggttgatattataaaaaatggcgaagacataacagaattatcgagagacataaaagccaagttgcttaatattcctgttttggatgttaatattaatggcaaacgtagccctttgatgattgctgtagggcagacaacagcgtctttatataaatgttttagtggtggattgcgccgtatctcatatccggaaagatagtatgaatcgatttagtgaatatcgcattatgtgggtacttgtattttttgacctgccaactgatacgaagaaaaataagaaggcttatacggatttcagaaagaatctgcagaaggatggctttactatgtttcagttttcaatttatgtacgtcattgtgcaagtagtgaaaatgcagaggttcatataaaacgtgtaaagtcttttcttccggagtatggtcaggttggtcttctttgtataacggataaacagtttgctaatattgaacttttttatgggaaaaagattcatggagtaagtgctccaggtcaacaattggaacttttctaaaataaaaaatctcgtctttatggcgagattttttatttgaatacagtagttttttatttcctgcatttgcttataagttattgaataatagttgcttgtcgatgttgtgctgtattcaatatgacaaagatataagtttgaaagcaaatcacaaccaagagagatcgtgttaacgcctgcatccggctgtattcaatatgacaaagatataagtttgaaagcaaatcacaacgaaatgcggctcatataatctttcccggaggctgtattcaatatgacaaagatataagtttgaaagcaaatcacaacaaaagaaacaagcgaaatttaatacaaaatgctgtattcaatatgacaaagatataagtttgaaagcaaatcacaaccgattgaaggcattcccagaagcgaaagcagctgtattcaatatgacaaagatataagtttgaaagcaaatcacaacattgcgacctgtaataactacccactttgagctgtattcaatatgacaaagatataagtttgaaagcaaatcacaaccgccggcgagttgaaatgtccgccatttgtgctgtattcaatatgacaaagatataagtttgaaagcaaatcacaactaacgcgagccattgtttgttttacttcctgctgtattcaatatgacaaagatataagtttgaaagcaaatcacaacttggaataaccatatctattatataaggcgctgtattcaatatgacaaagatataagtttgaaagcaaatcacaactaagttcagttgttgcgttaatttcagcctgctgtattcaatatgacaaagatataagtttgaaagcaaatcacaacaaagataaacacgctcccctcagatatatcgctgtattcaatatgacaaagatataagtttgaaagcaaatcacaacaaagcatgttcagaacgtcttctgaagcgagctgtattcaatatgacaaagatataagtttgaaagcaaatcacaacgtactgatttatccgtatagtcgacaccgggctgtattcaatatgacaaagatataagtttgaaagcaaatcacaacgctttataattcgttaacagtttagtctttgctgtattcaatatgacaaagatataagtttgaaagcaaatcacaacttattgatgcagcaagtgtacttttagcggctgtattcaatatgacaaagatataagtttgaaagcaaatcacaacgcgaactgttacttcctgtacccttgattagctgtattcaatatgacaaagatataagtttgaaagcaaatcacaacggtgcacccgaaccacaccacagacccggcgctgtattcaatatgacaaagatataagtttgaaagcaaatcacaactatcacggaataacatagccattggcataagctgtattcaatatgacaaagatataagtttgaaaacaaatcacaagtatcgatcttataattgttgtttataaaaactcagactatttgaatccttttagcggcctcggttgtgaaatccttaaacaactgactattgcagcgacaatagcaaatccggtagctaaatatagacaagcctgtgtactgttgttgggaactaaattgaatatcatggcaaccagtgtcgctcccagtgtttgtcccagtagacgggcggtgcccagcatcccgcttgctccgccacttcggttggatggggcggaggagatgatagtgctgttgttgggtgtctggaataagccgaagccggctccacaaataaacaggcgccatactatatccatatttgtcggattttcaggcagtatggcgagaaggaaaagaccggctgcaaatacggtcatgccgatacctcctaatatacctgcatggatacgttctaccaaccgacccgcaaggggagccatgatcatggtggccaacggccagggtgtcagaagtaagcctgtcgtaacatcactgcgtcccagcgaaccctgcaggaaaaaggggagggagatcattgccagcatttgcccggtgaaagaacagatagatgtgccgatcgacatggagaagatcgggatacgcatcaggtcgaccggcagcaacggaaacttctcatgcagttggcggcgtacaaagaaataaccgatcacgaacaatgcaaatatcccggctatgatcaatgttgtgttttctttgtgggcaataccctctaacgagaatataagcagaccaaaggtgactgcgttcatcagacaactgagcttgtcgaaacggcgtccggttacttttaccggattgtcaggcaggtgcatcagtccgattgcgagtgcagcaattcctatcgggatattgatggcaaaaagccaatgccacgaacccaatgagagaatgattgaagcgattgtaggtccggcagcaatcgatacggcaacgacaagggcgttgatacccatcccacgacctagaaaacgtttgggatagatgatccggagcagcgccgtattcacgcttgtgattgcggctgctccgaatccttgtaagatacgggcggctgtcagcatccagaatgaatcggcaaaggcgcagatggcagacgtgatgctgaatagcaaaatccctgataagtaaatcttccggtaaccgtaaatgtctcccaacgaagagaaagagagcagcgaaatggtaatagccagctgataagcattgactacccagatcgttacggacggtgaagttcccaggtcacgggcgattgtcggtaaagccacattggcgatggtgccgtctatcacagacattccaactcccagggcagtggctaaaatagcccagtaacgcttgggtaatggtaatccgtcgttctcatttacagatatggcgcgattttgcaatatcattttatcataattacttaatgacttctcttaccgcttccaacatcggttcgactgtcaacggactgccggttgccaatatcatccactggttaggtgtcagacatccctgccggaagatacgttcgacttcattggcgaaatccttcccttccagatactggtcgagttgaaattcgatgatctgtccgaatgcataggccgataaatacagcggataactgatcatatgggagtaaacagccagtacggtttcatcttttaccccgaaaacaggagcataatatttgttccatatttctttagacaataagatggttgcttctttcagctgttccgctgttgcgtccggatgggcatacatccatttccaaacagaaatatccagcatggaaacaccgcagatctcatacatactccaaatcttgtccagcacatccatagctttcttctccggattcggatcggtgatgcctaaaatttcaaggtcacgtttttggaaaacaaatgccagcgcctcggtgaaagcggtgttcggaacgccatgcagcatataataatccacatcataaagtgacaatgtctgttccacattatgcccaaattcatgaatggcaatgttataccctttgtaattcattccggaagaaggaatacgggtgcgaaggcgcgactgctgtcctttcatcgaagctccccaggcgtgtcctgaaccacgggccgcatctactgtgatcttgtctgccaggtagtttgcgcgttcggcactgaatcccagtttcatcaggatatccggcagtttgttatccagtgcggcagcatccgggtaaagagcctgcgtttgtgcatccagcttcgtttcatccaggttgctgcgggctttgaaaccatcgtaccagatgtcgtaagcttccaacttacgtcccaggcgcttggagatcattttaccgacttctttcagttcgggggcagaaagaaattcgtcaaacagtttttctacatcctgcagggctacttccatatcatcattgaatttgcggtcgatataagtatttccggtgtattggtcgatgccttgcatagctttgaaattgttgagcatcttctgataacgcgtagtcgattcgggtgtcgattttacctctttaccgttttgtttgattgtgtttgtatatggatcccattcataggctcctgaattgattacttcaagaggtatatcctgcgatatgatacgtttcatcacttcgtaaaccgtacgttgcttatccagcccttcttttcctttgttatagttcgctttgatctcgtcacgcagattccagtgtgataacaggatcatgtcttgcggaaacagcaactgtcctttcttgtttgtcacatgccccatataaatattgtactgggaaatatagatatcggcatcgctttcagcgtttgaggcagcttgcagaagagaggccgggatgcgttccgtgaacaggtcgcccatacgtgcgtaagcccatgctttacggtcggttccgagtgcttccttttcttcaagggtgagatgcggaaaattcagggcaatgataaaggcgattttgttgttgtacaagtcatcgttcaggtgagtggacggactgtacgaaccgaacttctcatcgatagagagcagcggtccgttatccagatgcaggtttttctgcaggcgcagggacatttcgttgaaatgaccgtaaatgctttccaggtaatcactgattttaagaaatgtctgatacttttcttccggatcagtgatataattcgcttcacagaaagcctggaaagcggcatcgtcgccatcggtttccagccagagacgggcaacctggttgacccctttttcaataccgtttttgttactgttgtctttggtggttaatgtgttgattgtcgattgtacgacggacggggcgatagccgcttgtccgtacagatacgctaatgagcaaataagcatgatgcagatgcgtttagttagatttctcataagacagatgttgttaagttcaagatcttttgctgcacaaataaatgtgaagaacaaatgtagctataatatttgtatctttgtacgtttttaaaaagagtaaaactagagaaaaatgaaaaaagtgtggggattagtggttgctatcagcatcctgctgtctgtatccggtcaggcatacggacaatcgttgaaagacatcttgaattcatctaccgtaaaagatgcggtgacttctgtaacaggaggtaaaaaactgacggtagaaaatctaacgggaacctggacatatacgaatccggctgtccagctggaaggagataacgccttgaagaatgtagctggaagtgtggctgccggtgaactggagaagaaactgaaaacatattgcgccaaggcgggtatcgttgagggtatgttcaattatgtattcaatagtgacagcacatttacgaatgcgttgaagaagaaaaccttgaaaggtactttctctgttaatccggatgagaagacggttgagttgaaatatgctttgggcggaaaactgaaagtgactacgctgacagctcatgtcgttatctccggtgatgagttgtccttgcttttcaatgccgataagttactggattttctatcgaagatatcttctatctctgacaattccacgttgaagttggttaataaactggccagtgaatatgaagggatgatgttgggatttgaattgaagaaataattcagctttggaattgatccaaaagctgacaaaagatcaaggctgaatcgcttcgctactccggtgaagctcgttcagccttatttttttattttaaaccggataataacctgtaaagcgtctttttcgtcataatcttctgattcaggaaactgacgatataccctgtaatgcaagctgcaataagtgagccttcgcgtatgccttcgatcccctgtgtaaacatgagcgaaattagtaccgctaaagtaaccaatgtaacatcaaaataaactttaaactttccaaattccttgttatagcaacgggaagcatattttacaaacgcttcggcactcatcattgccactttgggtttgatttcgagtacgacgccgatagactgtacgaggcatcctacgagtagcaatcccatcgccatcccatagctggaaggctgtaaattgctggtcagtatcatattgaaatctataaaagccgagaagatgaatgaaaaaggtatctgaagaagaatttctattgtatcctgtcggctcctgtctttcctgatcagccagaattgccccatgatcaataaaatattcacgataaacgtccaggtccctaacgagaaaggtgtattaagacttaacacataatttacactggaaataggggtggtgcctaaagtagagcgtacgatcaatacaatacctactgctaaaaaatataatcctaaaataaaaaccgaatacttttttaataattcttttatctccatatcaaatctctatttgcctgatctttatctttttagacttactgaaaagatatgcaaatatccgatttttttaccagaaagggatgactctgatggataaattagtataaaatagtcagatgggaggtaaatctcgtttaaaacgggcaaaaactcgttttaaacgagcttatagtccgtttaaaacgaataaaaattcatttaaaacgagttccatgctcgtttaaaacgagtaaattgactttcaaaatttatttatacatactgttatcctttacggaattcatcaaccagtttcagtaatatactgccgtagttttctatgactttctttcctattccgggaatagccagcaattctctggagttggttggtaatgtatttacgatacccaacaaggctttctgttgcaggatcgtgtagggaggcaactctttttctacggccagctcgtaacgccagtttctgatgctgttgtaaaggtccggatgtaagatgtcgctggaaatctccacttttgcagtctgcgatgaggaacgctcggagcgttttttggtcgatgcaggcggttctatcgatgctttggccttggcggagagatagccaacgacagaaaaaccgttctggcacgctttcaatgtctcctgcttcagatgtaattcttccgtaaatttgccgaccgcattattgacggctttccggctttccttgttgtctatttcgacagccgagttttcttccagagacgtacaaaggctatcgatatgctctataaaataagtaacacctttccggatacgttcctgtatcgcttcgtcttcccggtaattcggattgcctgtgatcatgcgggtcagctgctgctggaaacgtccgctgacctctgttatcacggaacggaaagcatcccgggtattcgcatattgcgtgttgagttccggatatagcttttgtaaatgtgtataaaccatataagccgcatattgcagccgttgctggatactctcgaagttgaaaagttcgatagccagttccaggaaatattcttgttgcgccagttccagttgttctttttgcggttgtttttcggcgacggtagaggaaaattcctgtatccgtaaatccttgatcatggcattacgggtaatgggactgcttaaaaccaatccttccagggttttacaccggctaagggcaacatacacctggccatgtgagaaggcggcggaagcatcgatgatagcatgatcgaaagtcaatccctgacttttatggatcgtgattgcccaggctgttttcagcggatattgactgaaagttccggcaatcgtctctgtgatctctttggtctcgggattgatcgtatatttgacgttgctccaggtttctttttcaacttgtatctcgttcccgtcttctccgacaacggtgattttgttcgggttgatgaaaacgatcttaccgatttttccattgtaataccgatgttcgccggaagaatcgttcttgacaaacataacctgggcaccgcatttcaattccaggtgctgatcggtcggataggagtattcgggaaagtcattgtttatttccgcattgaatgtgtacgacttacccggtaattccgccagtttacggttgttgagttgctgggcctgataattatgggtggtcagggtgatatatccctgtccgtcatccggtgtaaagttcggtatatagcgttggttcagacaatgtaatgtgtcgtcatcgaacctgttttccctgatgttattcaatagattgataaacgaactgtcgctttggcgatatacctgtgtcagttcgatgcagtagtaattactttcccgaagcgctttgctgtcaaagaaaaaggtggagggataatgttctttcaatagattccattcttcctctttggcaaccggcgccagctgttgcaggtcgccgatcaataacagctgtactccgccgaatggctttgtccgatctttataacggcaaaggacatcgctgatagcatccagcaggtcggcccgtaccatactgacttcgtctatcacgagtaaatccatactccggatgatattgatcttatcccggctgaatttattcatatagttgttactttgattaccttctctgttagcggaaggaatgtaaggaccgaaaggtaactgaaaaaaagaatggatggttacacctcctgcgtttatagcagcaacaccggtaggggcgacaataatcatacgtttaggagaaacttcttttagttttttcagaaacgtagtttt

SEQ ID NO: 1139 - DNA, 24518 bp, synthetic construct
  source 1..24518: mol_type = other DNA
  misc_feature 1..24518: note = Synthetic
tttctgtcggcaacacccaatggcataatggaactgctcgcacgttacaatatcgacaccaaaggcaagaaatgcgtagtattgggacgtagcaacattgtgggcaagcctatggcaaaccttatgatgcagaaaagcataccgggagacgcaacagttaccgtgtgccacagccacaccgtaaacatagccgacgaatgccgacaggctgacatcataattgcagcactcggtcagccacatttccttaaggctgacatggtgaaagagggagccgtggttatagacgttggtacaacacgtgtgcccgatgcaacacgcaagagcggtttccgcctatgtggcgacgtggattttgacaatgttgctccaaagtgctcatacataacacccgttccgggcggtgtcggccccatgaccattgtgtcactaatgaagaacaccctgctcgcaggcaaacgagaaatatataaataagaccttgaaaacaagagtcatcatagcactattgctgttctgcactatatcacaaacggtatcagcgcaggacagcattccttttttccgaaaggcaaagctgattttcgcaggcgacataatgcagcacagcggacagcttgccgaagcaaggagagaagacggcacatacagctattcgcattggtaccgttacatcacaaaagagataaagaagaaccactttgccatagcaaaccttgaaacgcccatatacaagaacagcttcagcggttacccctcgttctgcgctcccgaaagtttcctgtatgccatacgcgatgccggattcaatgtaatactctttgccaacaaccactgcttcgacaaaggcaagaaagcggccatgcacaccctgaacctgctcgactcgctcaacattgcacattgcggtgtatatcgcaatgcagaagagcgtgaacaacgctacccccttctaatagagcataacgggataaggattgcaatactgaactacacatacggcacaaacgggaacagcatccccgagcccatggtggtaaatctgatagacaaagcaataatagagaaagatattctcgatgcaaagagcatgcatgctgatgccataatcgcctgtatgcattggggagacgaatatgtgagaattccatccaaaagagtagaagaattgagccattggctgattgaacagggagttgaccacataataggcaaccaccctcatataatacagcctatagaggtgagagaagatagcgagacacctgatatgcacaccgtagtatactccacaggcaacctggtttcgaacatgtcgttgcgaggtactgatggaggaatgatgataagaatggaactaaggaagataatgaactacacccgtgttatctcgctcggatacctgctcacatggattgcgccaaagaagagcaacggagagagagactacacaattctgcctgcggcaaccaccataatacagggcaaccagcatgcgcaaaagaaacttcatgagttccttaacgacacaagagaactgttcagaaaatacaacaagggagatataagagaacttacgggcgacacggtgcggattactccttagcaaaccatataccgttccaacgataaactatcttacgcaacacagaacgcacctttgcagcatcctcactgttcatataatcgggcattgtatactctgcgacaagagatgtatcatcggcatcaagtttcaatgatacaagatatatgtcgcacatatctataatcttttcatccgctccggacagaaaatcgtttattgaaggagccgtaaagtatgattccgtgtcaattttttcccaattacggtcatagaaagctatacggctgtcggtagcctctgccgaaacgctgttcaccacacacactataaaactctctccgaaaggcagaatcttcatctcaacagttgatatgcccgtagtctgcaataagagatagtcgtcggtaagagtcttgagaacagacttgccgtcgaatagattcgatacgggataagacatccctgcctcaacaaaatcgacacaatcaacacgcacgttgcgtggcaacatcggcaacacggcatcgggtgcatccaggaacagagcacgcatattctgtgccgatgcagatgacaacattccgcacaacaccaacaatatcaaaaatatctttctcatttcgagcccaaatataagaagaataatcctattaaaatcaaaacaatatcaaaagctttacgtttcagattcttctcgtgcaacaacagtgcgccaaaaaggaacgaaaccacaacacttccgcgtcttatcatggatacgacagctatgagagcaccatcctgcgccaatgaagagaaatagcagaagtcggcaaatcccaagaagatggatatcatggggatagcccaactccaatggaacctcttttcacgttgtcttaaagagaacatattcaacagcacagccagacaacccataagaatacactgatagacattgaaccacgactgaaccagaactggttcgagcgagcgcatcaggtatttgtcgtacaatgcactcaccgcaccgagcaatgctgccaacgcaacaaataagacccaacggttcgatgtaaaatcaataccttcgcgtttgccactacggctcaagagaaacaccgacacaactgcaattatgacaccggtccattgatatccgttgagtgtctcgccgaaaaggagcaacgctccaagcaatacaagaacaggacgtgtcgactgaatgggcgatacaattgttatgggcaggtgttttatacctatgtaaccgcaaagccacgatgacaacacgattactgcctttagcagcagaagcagatgggtatgcagaccagccttgggcacaaagaatgcaccatctgttattatacccagatgagacaatatgataaacggcgaaaagagcagtgccgaaaacagagtattcaggaaaagcaccgcaattaccgaattatccttgagcgagaccttcttgaagaaatcgtaacaaccaagaagagccgctgacataaaagcaagaacagcccacatcataggaacaacgaatcggggtattcaacacctacaagaaaaagtgcttcgcccatagccgaatcaccggcttcgccacgcgccttgttctctattacggcacggaaaccgtcaagagttagttttccacgtccaacaagcaacaacgtccccactatcgcacgcaccatattacgcaagaagcggtcggcttctatctcgaagagccattcgttctctgccacctgacgccatttggcataggtaaccttgcagttgttagtcttcacatcggtatgcagcttgctgaaacttgtaaagtcggtatattcatacagaatctctgcagcccggttcattgtatcaaaatccacatcgggcatgacacggcaggcatatttccttgaaaaaggactctttgccgtaacgactctataattgtatcgccttgacacagcatcaaaacgggcatgggcatcgtcctttacacggcggatatcacttacggcgatgtccggtggcaaaatcttattcaacttatacaccagttgctttgcatcaatctcattcggaaaatcggcatgtgcaaccatgcacgacgcatttactccggcatctgtacgccctgcgcccaccaacggaacgggaacacgcaccagtttggcaagagcctcctccataacctgttgaactgtaatggcattgggttgcacctgccaaccatgataagcggcaccgtcatacgaaaaatatatgaaatagcggcacatcacttctcgttcttgagcattaatgtatgacatgccacaagtgcggctgtctctgtgcgcagacgcgaatttccaaggctcacaggcttatatcccgccttcaaagccaatttaacctcctcggggctgaaatcaccctcgggaccaataagaacggttgcatcacatcctgcctgatggatatccttcagaagaaccttctcatcctcgtggcaatgcgctatatatttttcaccggcacgttcctgtgaaatgaatttcttgaaatcgacaagttcctccacaacgggtttactatatttcagcgactgcttcattgcagaaaccactatacgctccacgcgctcggtcttgatgaccttgcgctccgaaaaacggcaattaaggaaagtcaactcgtcgatacctatttccgtagccttctcggcaaaccactcgatgcggtccatgtttttagtgggagcaaccgcaatgtgtatattaccgttccagcctttgggcatgggaagaatctcctttgcctccacatagcaatgcttgccggcaatggaactgataaccgcacgatacagatttccctttccatcggttatatccagttctgcacccacagtcagacgcaatacacgaagggcatgggcagcctcttcttcggagagttcccaactttccgctatatcaggtacataaaatagagccattatttattattttagtgtttttcagtttcagtatcactattcttgtggcgcgaatcaatctcctccttcagtttcatagccaattcatagttctcgtccttcacagcattttccatagccgcacgcaaagtactctcgtcggcagccgttataggtattgatatcgcaccgttctgttcgtcgcgtatgcacatgcggttcaaaagtccttcacggatatatatgggagcttttgccctcaacgctatggcaatcgcatcacttgtacgggaatcaacaaccgcttcctcgccctcccttgtatagcacaaaagcgaatagaaagttccatcatcaatcctgtcgataatcacatgacgcatttcaatgccgaaagccgaagtcaaagagccgaagaggtcgtgtgtcaacggacggcctacatcaacgccacgcatggcgaaagcaattgcctgagcctcgagcatccccaaagccacaattatcttacgcaatccctccttctcctgcaaaacaagtacatgggcgcgatggtcagagaccttcgacatcatatccgaaacaacaagttcaaccatttcttatccttttctccttaaatacaaatgcaaacagaaccgctataaaaagcgcgtaccctgcaaagatacaccaaactatcgaccaaccatcaaaattggtttgattttgtgtaaaatagtttactataccctgcgcaaccatcactccgaccgatgctccaagcccgtttgtcatgagcatgaacagtccctgtgccccggaacgcattccctcggggacctcgttatccacaaacagggagccggaaatattgaagaaatcgaacgctacaccatacacaagcatcgacatcacaaagaacatcacacccggcatacccggatttcctactccaaggaacaagaaacgcaacacccaggcaatcatggcaatcagcatcaccctttttataccgaatcgacccaagaagtaaggaatcagaagtatacacaacgtctcggacacctgcgacaatgatataagcacattggtatgctcaacaacataagcaccggcatattgcggtatatcgccaaagccactgatatagagatttgcataaccgtttgatatctgcaacgcaacaccaaggagcatcgagaagatgaagaataccgccatttttggtttagcaaacaacctgaaagcctcgaggcccaaagccgaaaacaaagactttttaccgccagcaccattcaccgggcaatgcggaagcgacaacgaatacagggcaagcagaacgccccatattgcagaaacaaagaattgaacacagttattctggaaacccgtataatccacaataagcattgagataataaatcccaccgtaccgaacacacgtataaaaggaaaactcctgacagtatcgagtccagccttttcaagcgcagtatacgacacggagtttgagagagcaagcgttggcatatagaaagccaccgaaacggtataagtccagaaaatgtcgttgaacgccacgttgtagtccatcttgaaagcaacatagcccgttatagccataaagagagccgccacaatatggcaaaaagacaacagacgttgcgcaggtacccaacggtcggccaccacaccgattatggcaggcatgaatatagaaaccaatccctgtactgaatagaaccaaccaatttccgcccccaatccatagccgccaaggtagcgtcccattgatgtaaggtatgaaccccagaccgcgaactgcagaaagcttaatactacaagacgtatttttacataagaatcagacataagagcttgttttagatattactacatacataatcaaatatctaaaccaccaaagaaccattatgttcagtgttttatctgaaaacgatatccgttatgacctgagccttcacatgctcattcaatttatgcacaagagccctgcggttcatcagcagctcctgacgcaacaccgacgaagtgagtgtaacataaagcacctggttgtatatctgaagattcttggtatatgactgcacagcaggaccaagcacctgcgaccatgcctgaataaggcggtattcgttcaaaggagtctcaagcccctcttcgcgacacattatacgcacaagctccgcaatggattttgtttcaccacgtttcattttacaatctccttcaacaattcagtttcaccacgcttcacctcaaacagtttgtactcaccgtttatactgtcgagaataccatcgatatgctcacggttcacatcagttataaaaatctgaccgaagccctcgcccgaaaccaagtcaattatacgctctaccctatggctgtcgagcttgtcgaatatatcatcaagcaacagcagaggagtttcaccacccttgcgacacagaaaattgaactgtgccagtttcagcgacacgagatatgtcttgttctgcccttgtgagccctcctttcttataggaaagccattgagctgcatcacaagttcatcgcgatgcacaccctttgatgtataacccatacggcggtcgtcggcgcgcgaagcagcaagcaactccgcaagatcattctcatcaagatgcgaacgatagcgtaacgacacctcctcaccgccacccacaatagcattatggaattcggtaaagataggtataagttcatcggtgaactgcttacgacgctcatgaatggcaacagcctccacaaccatcatctcctccatcagcgacatcatctccgcatcaggttcacgttcaccacgcaacagcacgttgcgttgctgcaaagccttattgtaacgtataagagcattaagatactccttgtcgtattgcgaaatcacgacatccataaaacgtcgacgctcctcactgccaccggcaataagttcattgtcggcaggcgacaccataacaagcgggatatgacctatatggtccgagagacgctcatacgccttgccgtccctgcggaactgcttcttgtcgccacgtttaagaccacacgaaatctcattgtcaattccgctatcgcttgtataagtcccctgcaacataaagaaaggagcttcgtggcagatattaccattatccgacggcgaaagggcactcttgcagaacgacagataatataccgcatccagcagattggtctttcccatgccattgctgcctataaagcaatttatcttaggcgacaacggaatattcacgtccacaaggtttctataattaagaatcgaaatggtattgagcttcacaataagagtatttctgttttacaatgcgaagatagtaaaaactcacgtaaaagcggacatatttatcagtcaaataaagagtccattgttatgacattttggatacgaccactatattcattctttgtaagcccgtatgtggttaccaaagttgtatgcaatgccttgcgacattttgtttcattggcaaaaacatccagcttacgtcgaagttctgcatcgtatttcttgtctatggtgtaatcgtctgtagaatacttcatttcgcaaacattcacaactctatcggctctgtctataagcatatctatctgagccctatctccttctgccaatttgcttcgccaaggagagatttctgcctgtacagcagctatgcctaatgcctgttttatcttctcacggtgcacaaaacagacctcttcaaaagcaaagccacgccaagcattcaggactggcgacataagattattcttccagtagtttggcccggcattcttcttgtcaataaagtaaagatagaacaatgtatacaggtcggtgagtttgtaatagacctcacgtacagagtgattataatagacataaggcataataaagtcactgctctcaagtgcacggagcatttttgtcaatccaccaccgtatggtagtccggtctcttttgcaatctcctcccttgtatatccttcgcgtttctgagacagcagctttattatttttatgtacttctcaggagttgtaaatagtgatgcgtacaaccggtcaaactctcctcgcaactttcctttcttatcgaagaacaagcggtctatattctgtgtgaggctttcacctttgtttatatatgaaaggtaatagggtattccacccattgccatataacattgcaactgctcgtagcggtccataataataccctcgctcttcatatactcctcacattcgccaagagtaaatggagaaaggtgcatttcataggttgtacgcccgtagagcccgcctttgttttgcaagagtttatcagaaatccacgatgtcgcagagccgcatacaatgagcataatatgtctctgcccggccgcccagccattccaaaaatgttcaaaagccgtgataaagccggaacgcggggtatccatccacggcaattcatctataaaaacaacaaggcgtttatctttgcctttactctcgagcaaagtgatgaacatttcaaaagcttcaaaccaatctgccggttttttctcgacatctgcaccatagcgtttcaatgaatggtagaatgcctgcaattgtttttctaccagattttcatcctcgagttctattggtgaaagtgctgtatggtaaaagtccaatctgtcctgaaagtactccctaacaaggtatgtctttccaacacgccttctaccataaacaacaacaaactcagctttatttgaattatatatctgcccaagctccttttgctcttttttgcgtccgattatactctccatagatctattattttgccacaaagatactaaaagtttgtttcgtggcaagtttatcggcagttattttaccataaaaggcaaaattatcgtttcatggcaggaaacacctacatttagaaaaggttatgactatcctcagaaaagggttttgaaataataaagcatatataacaaactactcagaaactggacgtacgcattgaccgttacatcgactattgagataccagcagtattcaccatgatcgaagtataagtggtaagcatacccattaccgctaccatacaacgaacttgaccaataatgaccacaataattttcgtagtcaaaatttgtaccatgacgataaccagtagcaggcaaaaaaaatacagttgacactcttgttacttattacactataaacttctattacatttttagttatccaactccaagaagaacaaagaaagcaagtataaaaaaaccctcgccaaaagacgagggactcccctacttaggcgaagggatacctaatgttttcacaacggaataatccttattgtgatttgcttcattttagttatgcaaatgtatttatttatatttggaattgcaactagtattaggtatttttgtgaaacaagaataaaaaagaactatgaaaagtatattaggcttagatttaggaaccaacagcattggctgggctatacttaaaagcgacgaaaacaagaacaataacctgcaatctataaaaatagaaggtgcggggagtcgtataatcccaatggattctgcagtactaggcgactttgaccgcggtaattcaatatcacaaactgcagaaagaacacgattgcgcggcattcgacacctgattgaaagaagcatacaacgcagagaacgcttgcacagagttcttgacattttaggatttctgccttctcattattcgcaagcactaaatcgatatggcaaaatacaagaaggggaagaacccaagttagcatggcaaaaggacaaattcggaaaatcgactttcctttttacagattctttcaatgaaatgttgaaagattttaaaagttcacatccagaacttattggtaaaaagataccatatgattggactatatactatctccgcaaaaaagcccttagccagaaagtaacaaaagaagaattggcttggatattactgaattttaaccaaaaaagaggttactatcagttaagaaacgacgaagataatgcaagcagaaacaaaaaagtagaatacctagctttaaaagttattgccgttgaggatagtggtgaaaagaaaggtaaagatacttggtataacgtacatctagaaaacggctggatataccgtcgtacaagtaacattatgcttgattgggttggaaaaataaaagaattcattgtcaccacagatatcaatgatgatggtacagtaaaaaaagataaagaaggaaatatcaaacgctcctttaggtctccaaatgaagatgattggactcttatcaaagaaagaacccaatctgatattgaaaactccggcaaaagtgttggtgaatacatctacgattgtattattcaaaatcccagccaaaaaatacgaggcaaactagtgcgtaccatcgaaagaaagttctataaagaagaacttataagaatattgaataagcaattagagttccatcctgaattaaaggacaaagatctatacaacgcttgcattgatgaactataccaaagcaacgaatcatacagacagaatattgcaaacaggaacttcacatatctttttgtcgaagacattttattctaccaacgtccgctcaaaacaaaaaaatcgttgattgcaaattgtccttatgaagaatacacaacaatagacaaagcaactggtgaagaaaaacgcatatgtgtaaaatgtattgccaaatcgcatcccttatatcaagaattccgcctttggcagttcattagcaatttacgtatctataaaaaagaacctgctaatgacattgacgtaacacaattgtttctcaagaacgaggatgattatgttgcattgttcgattggttgagcaataaaaagaccataaaccaaaaagcatttttgcaaaaattcgatttaaaaaaacatgaggagtatcgttggaattatgttgaagacaaagattatccatgcaacgaaacacgtgctcagattctgtcatttttatctaaagccaatattagcgaagacatattagacactctgtttgaaaatgaattatggcacatactatattcagtagaagacaagcaagaactcatcaaggctctaggtaaatttgcaaaaaacaaaaaacttgacaagctatttgttgaaatattccaaaagtttccaccattcaaaaaagaatatggtgcatattcagcaaaagcaataaaaaaacttttgcctttgatgagaatgggtaaatattggcaacaagagaacatcgatccaagcacaatagaaagaatagataaaataatcaccggtgaatacgatgataaaattaaaagcagagtaagagaaaaagccattaaccttacaaatatagcagcatttaaagcccttccactatggttagcttgttatattgtatacaaccgtcactcagaagctaaagaaataacaaaatgggctacacccgacgatctgcaaaactacttgaattcattcaagcagcattcattgcgcaaccccatagttgagcaaattattacagaaactttacgcaccgtgcgcgatatttggaaacaatatggcaatatcgacgaaatacaccttgaattaggacgagaaatgaagaatcctgcggacaaacgccgtaagatgactcagcaaattctagaaaacgagaacgcaaatatgcgaataaagaagcttttgctggattttgcaaatcctgaatttgagatagaaaatgtacgtccatattcgccgagtcaacaggaaatattacgaatttatgaagaagccgtaatcaacagacaggatacgtataagaacgaaaatacaaataattacaaatataaaaataaagaagaaaaagaagagattgaaaacatattaaagaagttcaaagaaagcgatacaaagaaacagcccacaagaagcgaagttctaagatacaagttgtggttagaacagaagtaccgctcgccatacacaggacagccaatacccttggcaaaactattcacacctgcgtatgagattgagcacataataccacaatccctttatttcgatgattcgctttcaaacaaagttatctgtgaatcagttgtaaacaaacgcccatacaaggataaccagctaggatatgaatttataaaaaaacaatctggtcgcattgtacaagaattgtcaacaagcaacaaaatcgttaagattttcacagttgatgaatataaacagtttgtaatagacaattatagcaataaccgcactaaaatgcgtaaactcatgttggagacaatccccgaagagtttatagcaagacagctgaacgacagtcgctacataagcaaggtagtaaaaggcatgttgtcaaacattgtacgcgaggaaggagaagaagaagctatatcaaaaaatataattgtatgcaccggtggtgttactgatagattgaaaagagattggggcataaacgatgtttggaacagaattattttgccacgtttcacacgcttaaacgaaataacaggaacaacacatttcacaacaatatctaccaacggacacgaaattccttcaatgccattagaaatgcaaaagggatttaacaagaaacgaatagaccatcgccaccacgcaatggatgcaataatcattgcatgcgcaactaggaacattgtcaattacctgaataatgaatcggctagtaagaactccaagatttcgcgcaacgacctaaagacattactatgtgaaaaaacaaagactgacgaaaatggcaattataaatgggttgttaaaaagccatggaaaaatttcaccaatgatgtgtattgcatactaaacgatattattgtcagctttaaaaagaacctacgagtaatcaacaaagcaacaaattattacacacgttttaaaaacggagaaaagaacatagttgaacaggatggaactaattgggctatacgaaagcctatgcataaagataccgtctttggtgaagttaatttgcgcaaaattaaaaccgtctcactgaacgaagctattaaaaatccgtcaagaattgtggaaaaagagtttaaaatcaaactacaatcattgttaagccatggttacgacgcaaaaaaagcaaagaaatactttgaagaagaaaaagatgcttggcgagatataaatctctccaagatcgaagtgtattactataccaaagaaaccaaagacagatactttgcaacaagaaaaccattagatacaagtttcaaccaaaagaagattgaagaaagtgtcacagacaccggtatacaaaagatactattgcgccatttagagcaaaaggggaacaatccggaacttgcattttcagcagacggtattgacgagatgaataaaaacatagtacaactaaataagaacaaataccatcaaccaatatacaaagttcgagtatacgagaaggccgacaaatttgctataggcacaagaggtaacaaatcatctaaatttgtggaagccgcaaaaggaacaaatctgtattttactgtttacgaaagcgaaaaatgggatgataaagcaggcgactacaagaaagtaaggaaatttgctacaattccattaaacattgtaatagaaagattaaaacaaggactttcgcccgcaccggctgatgaaaacggcaacaatcccaaatttgtattatctccaaatgatttggtatatgttccgacagaaaaggattttaaggacctaaaacaaaaaaatatttacaaaattgttagttttactggaaataggctatatgctgttccttatcctgtagcaaattccattgttgacaaacttgaatactcacaattgaataaggttgaatttacagatgataaaacttcaattaaagaagtctgcatacctataaaaattgacagactaggcaatatcattaatattgagtaaaagaaaatagtaaatctttatatattaaccataataaccattgcctatgataaagaaaacattatattttggaaatcctgcgtatttatcattgcgcgatgcacagttagttattaaactacccgaaattgtaaaaaacaaaaccttacccgatagttttaaacaagaaaacgaagttacaaagcctattgaagatataggtgtgcttgttttggataataaacagattaccataacatcggggttgttggaatatttacttgaaaacaactgcgcagtaattacatgcgacagcaaaagcatgcccacaggcttgatgttgccactatatggcaacacaacccaaaacgaacgtttccgacaccaaatagaagcatctttacctctaaagaaacaactatggcaacaaacaattaaaaccaaaattgaaaaccaggctgcaatactaaaaaaatataccgcgacagaaatcaggtgtatgaacatctgggctggcgatgtaaagagtggagacaccgaaaacatggaagctcgtgctgcagcatactattggaagaacctgtttcctataaaaaaatttacaagagaccgagaaggaattgctccaaacaacttgctcaactatggttatgcaatattgcgagctgttgttgcaagaagtttgattgctagcggattactaccaacatttggaattcatcatcacaaccgttataacgcctattgcctagccgatgacatcatggaaccctaccgtccatatgtagacgagcttgtatacaaaatcatcgttagcggcattgactacaatacattaagccgtgagctcaaggcagaattattgacaatcccgacattagacgttataatcaatggcaaacgtagtcctttaatgattgcagttggacaaacaaccgcctcactctataaatgttttagtggcgagattagaaaaatttcttatccggaaatataaagatggaacgcttaagtgaatatcgtattatgtgggtacttgtcttgtttgatttaccaactgaaacaaaaaaggacaagaaagcctatgccgatttcagaaaaaacctgcaacgcgatggcttcacaatgtttcagttttcgatttatgtccgccactgcgcaagcagtgaaaatgctgccgtgcacataaaaagagtaaaatcttttctgcctgaatatggaaaagtgggtataatgtgcataacagacaaacagtttggtagcatagaacttttttatggaaagaaaattgttgaagcaaacactcccggacagcaactagaattattctgaaagcaagaaatcccgcttttgcgggatttcttatttgggaacctctgattttttattttccaaacatctttgtaaattactgcctatcaagacattataaagattctgttgttcccgataggacaaaggtaataaaatgaaagcaaatcacaacagccttatcgaggatttcgacagcagtcttgttgttcccgataggacaaaggtaataaaatgaaagcaaatcacaactaaaaaaatgctttataaaatttgcttttagttgttcccgataggacaaaggtaataaaatgaaagcaaatcacaaccagaacatttggattccacagaatagagccgttgttcccgataggacaaaggtaataaaatgaaagcaaatcacaactaatattatgaactacagttatacccaaatgttgttcccgataggacaaaggtaataaaatgaaagcaaatcacaaccaacgtccatctgcttgcgggcagccctacgttgttcccgataggacaaaggtaataaaatgaaagcaaatcacaactatatataaagaacttaaaaaaaagcatccgttgttcccgataggacaaaggtaataaaatgaaagcaaatcacaacaaccttacttcgcatggttctcgttgtcttgttgttcccgataggacaaaggtaataaaatgaaagcaaatcacaacgactgaacaatgcagtgagattgacaaaaagttgttcccgataggacaaaggtaataaaatgaaagcaaatcacaacaataccagaattttatattggatagcctgttttacatccaatcatacataaaaccatatatatattcaaaaaattcagctataatttttcatcaatcaagaatttgattacttttgcattttgtaaaatgtatataataaaataaaaatataactatgagcaagaaagaaacagagaaaccaattctcgcagacgaggttctcagcaagtcagaggcctttgtcatcaagaacaaaaacacatttttgggtataatcgttgccattgtggctgtagttgttggctaccttgcgtacaacacatacgttgctgagccaaaagaggctgaggctgcaaaagcgattttcaaggctgagcaatattttgtaaacggcgatttcgaaacagctctcaacggtgatggcgtaaacgcaggtttcctcagtgtaatcgaggagaacaagggtacagatgctgcaaacatggcttacgcatatgcaggtctttgctacgcacagcagcagaactacgaggaggctatcaactatcttgagaagtacagcggcaacgaccgtttggtttctcctatggttaaatatgcactcggtaactgctacgcatatcaggagaacatcgacaaggcaatcaagcttcttgttgctgccgctgacgaggctgacaacatcacagtaagccccaaatgtttgtttgatgcggctgcaatgtacgagaagcagggtaaggcagacaaggctatcgagctttacaacagaataaagaacgaatatcctcaggctcccgaagcgtcgaacatcgaccgtttcatcaacgcgaagtaaaaaccatttttaaaacatagttcaagaccgaccggagcaaactcggtcggtcttgattctttttataaaagtatcatggcaacagaattgaagaacctttcaagctacgacccaagcaagactcccgatggcaaaggtcgcaaggtgggcattgtatatgccgaatggaacgaagagataacacatgccttgcgcgacggtgcaataaagacgctatgcgacaacggtgtggcagaagaaaacattacggtgacaagcgtacccggcagctttgagctgattttcggtgcatctcagatgataaagagtggcaagtacgatgctgttattgcaataggatgcgtaatccgtggtgacactccgcatttcgattatatatgcgaaggtgtaactgcaggactttcaaaactgaatgtagagtatgatgttcctgtaatcttcggtcttatcaccacaaacaatctgctgcaagcgcaagagcgcagcggtggtcgcctgggcaacaaaggcgatgaatgcgcagtaactgcgctacacatgatagcgcagttcaagcatcaataacacgagtagcaactggtcgcacgcagtgcagcgcagttgcaccgtgcgggttgcgaaaagcgagtgttattaatgtgcaaaatcacatgatagcgcagttcaagcatcaataacacgagcagcttaaacaataaaatctatgggctagaaggtttcccatctagcccatagattttatatatcaacctctttatttcttgaaataacggttgtaaagaccttcaaaacctttaccgtgacgagcctcgtcctttgccatttcatgaacagtgtcatggattgcatcgaggttcaactcctttgcacgttttgcaatgcggtacttgtcgctgttagcctcagcctctgcattcatacgcttgtcgaggtttgtctttgtatcccaaacgcaatcgcccaaaagctctgcaaactttgcagcgtgctctgcctcttcccatgcatagcgcttgaaagcctctgcaatctcgggataaccctcgcggtctgcctgacggctcatagccaagtacataccaacctctgtacactcaccaatgaaatgattgttcaaatccttgatcatctcctcgtcgcaaccttttgcaacaccaatcacatgctcctgcacgaactggattggaccctcctgcaactcgttgaacttctccgcaggaaccttacacattggacaacgctctggagctgattcaccttcatgtatataaccacatactgaacaaatatactttttcatagtcgtaaaattttaaattgtttttaattattgtattatctattatttatcatttctttaaacaagccgggcacaaacctttcagatacaactgggcgtcagttacctcgtatccgttcacaccctcaaccatcgacaggaaatcctttttgattttaaagtcaactatctttccacatttgttgcaaaggaagtgagcatgactgcaacagtttccatcaaagcaacggtatgtatcgtcgatagtgagcatcattatcagtccggcgtcaacaaaaagtttcaatgtattatagactgttgtcaacgagagagaaccgagttcatcgcgcaaagcctcgtaaacgacttcggccgtgggatgctgacaacttttacgcacatattcgaatattgccagacgttgcaccgatggacggatacctgcctttgtcaattcctctttaagttctgctcttgataccatatttcttgcctgtttttattgttttttatatttcatttctgaaatcattgcaaatatataatgactttttatttctcgcaagagtttcggatattttttttgcaaatttttaaaaaaaaatgaaaaaacaaagaatttaggggttgaaaccacactcaatttttatttttcggcataaaacagtacctttgccaccgttggaaacaacaatatacattatataatataaatacaggaattttgctttcgatagacaacataagagtagacttcggtggaaccaatcttttccacgatgtaagttttattgtaaacaagaaggacagaattgctcttgtcggcaagaatggtgcaggtaagagcacattgctgaaaataattgccggcatacaatctcccacggaaggtgcaatttcaaagccaaaagaattcacaataggctatttgccacaggtgatgcaccacacagacggacgtacagtttacgaagaggcagaattggcttttgcacacatacacgagatggaggcaaggctcgaaaagatgaacaacgaacttgccgaacgcaccgattacgatagcgaggagtatcatcagcttatagaggactacacccatctcaacgaacaatataccatgatgggtggcagccattacgaagctgagattgagcgcgccctgcaaggtcttggattccgtcgtgaagatttcacacgccccactagcgagttcagtggcggatggcgcatgcgaatagagcttgcgaagctattgttgcagcaccccgacatactgttgctcgacgagcctacaaaccaccttgacatagagagcatccaatggcttgagcaatttcttgcacgcagtggaaatgcggtgttgctcgtaagccacgaccgcgctttcctgaatgccgtcacaaacagaaccatagagatttcgtgtggaagaatatacgactacaaactgtcgtacgacaagttcatggagaaccgcaaagagcgtcgtgaacagcagatacgggcttacgagaaccagcagaaggagattgccgacataaaggagttcattgaacgtttccgttacaagccgacaaaggcggtgcaggtacagagccgtataaagcaactcgaaaagatggtacccattgaaattgacgaggaggacacaagccgtctgcgactaaaattcgctccagccacacgaagcggcaactaccctgtcatatgcaacgatgtaaaaaagaactttgatgagcatacagttttcgaaggggtaaactttacaataaaccgcggagagaaggtcgcctttgtaggaaggaacggcgagggcaaaacaacaatggtgcgctgcatacttggcgaacttgcacacgacggagagattgtgataggtcacaatgtagaaacagcatattttgcacagcacgaggcacaattgctcgacgagaatcttaccgtattccagacaattgacaatgtggctacaggcgacataagactgcgcattcgcgacattcttggagcattcatgttcggtggagaagcatcggacaagcccgtaaaagtgctatcgggtggcgaaagaagccgtctggcaatgatacgtctgctcctgcgtcagatgaacctgcttatccttgacgagccaacaaaccaccttgacatgcagtcgaaggatgtattgaaggaggcgatacgcgattttgacggaacagtgattgttgtaagccacgaccgccaatttctcgacggacttgttacaaaggtctatgagttcggcgacggcaaagtgcgcgaacaccttggcggaatatatgaatatcttgcgacaaagaatgcaagcaacataaacgaagcccttgcacagagcagaccggcaacaagcaacgagccacagcagaaaacggtcaacgagaaccgactgagttacgaagctgaaaagcagttgcagaaacagcgacgcaaactggaaaaacttgtagaagacgacgaaaaggctataaatgaacttgaaggtgcaatatctgctttggaagccgtgatgagtaccattgacggaagcaccgaagagaattttacaaaatacgcctcgctcaaaaagcaactcgatgaagctgtagcacgttgggagacgaacatggaaaatcttgaagaactaaactgatataaataatgaaaaaatcaatcatctgcatagctcttgccacagcgttgggagcatgcacaacaaacggaaaaatggaatcaagacttttggcgaacatggataccacacaggcacccggaaccgactttttcgagtatgccacaggtggatggagaaaagcgaatccgcttacagacgagtatgcacgttacggacagttcgatgccttgcgcgagaataaccgcgagcagttgaaggaactcgttcttgaacaggctgcaaagaagagtgagccgggaagcaacgcacagaaggtgggcgacctctataacatggtaatggacagcactcgccgtaacagcgaaggtgtatcacccgcaatgcctctgataaacagaattgcacagttgaacaacagagagcaagttgctgtgttgttggcagagaactgccgcaatggcattggcggaatgttcggcactggtatcggcactgatatcatggacagcgacaacaatcagctgggactatatcagggtggcttgtcgctccctgagaaagagtattacagcgacaacgacgaggtttcggtgaatatccgcaacaagttccgtgaacacgttgtgaatatgttcaagctctatggtttcagcaacgaagaggctgaacagaacatggaggctgtaatgaagatagaaacacgcattgcagcaaaacatctcagccgtgtagaacgtcgtaacccactcaacagctaccacaaaataacattcgcagagctcaagaagcagatacccgatttcaattgggatacattctacggcatattgggcatcaacggtattgaaaacataaacctagcacaccccgaagccatcaaagaggctatagcagttatcaacgatactcctatgaacgaacttgcggcgtatctgcaatggagagcaatgcgctctacatcaaacgaactgagcgatgaaattgaagccgagacttttgctttctatggcactgtattgagcggaaagaaggttcaacagccacgttggaagcgtgcactcagcgcagttgacggagcattgggcgacatcattggcgaactctacgttgcaaagcacttcccaccagcagcaaaagagcgcatgacacagcttgtaaagaacctgcagattgcattgggacagcgcatcgatgctcaggagtggatgagcgacgtcaccaagaaagccgctcacgaaaagctgaacacattcaccgtaaagattggttaccccgacaaatgggacgattatagcagactcatcatcgaccctgcgttgagctattatgagacatgtcgcagaatgtcggaattcggctgggacaagcatgtggaagagaaatggaacaagcctgttgaccgcacagagtggttcatgaccccacagacagtgaacgcatactacaatcctacaacaaacgaaatatgcttccctgccggtattctccagtatccgttctttgacatgaacgaggacgatgccttcaactatggagcaatcggtgttgttatcggtcatgagatgacacacggattcgacgaccagggccgtcagttcgacaaggacggtaactttgcaaactggtggaccgatgaggacagcaagagtttcaacgagcgcacacaggttatcatcgatttcttcaataagattgaggttcttcccggtttgaaggcaaacggacagttgaccgttggtgagaacatagcagaccatggtggtttgacaatagcaatgcaggcattccagaatgccacaaaggataatccgttgcctgtaaaggacggtttcactgcagaacagcgtttctacctttcatattctaatgtatgggcaggaaacatccgcgacgaagaggcacgcaacctcacaaagagcgacccccactctctctcacgctggagagtgaacggcacattgccacacatcgacgagtggtacgaggcgttcggaataacagagcaggatcctatgttcgttccagccgatgagcgtttgagaatctggtaaaaatagagatacaatgcctatcaaagttcctgccggattaccggcattgcagaatgtcatagacgaaggatgcgcagtacaggtgctcgaagcacctactgcacacaccctgcgtgtggcattgctgaacattatgccaatgaaggagaccaccgaagccgacttcatacgtctgcttgccacatcggacgaggagatagagcttacactgctcaaactcgacacccacactcccagacacgcaaaccccgagcatatgagccgttactatacatcgttcaacgatgtaaggaacagccgtttcgatgggcttataataaccggtgcgcctattgaaaaaataaaattcgaggaggttacctattgggacgaactatgcgggattttcgaatgggcaagacagaatgtaacttctacgctttatatctgctgggcagcgcaagccggagtatatcagaagttcggaattcagaagcacctgttgccggcaaagatgttcggcgtattcccccacacaatagcgaagccagacatgccattgttcaaagggatggacagtaccatatatgtaccgcacagccgccacaccacccttcttcgcgaggatatcgttgccgaagagaggcttgaactgctgtcggaatcggaattgtcgggagtatatataatgcaggagaaaggaacaaaggacttctttataacaggtcactccgaatatgcgctatacacccttgacggagaatacaagcgcgatgtggcaaagggactgcccattgaactgccactgaactactaccgcgacaacaatccgaccaatgaaccggttaaccgttggcagggaacagcccggaaactttttgacaactggttaaagtattactgtaaataaactgactatggcaaaatattcaatcaaccacactattgcatgctatgaggcagatgcgaacaacataatgcgccccacagccatgctcgacatgatgcaggaagctgcaaatacaaatgcagcatcactcggtttcggatacgatgaaatgagagcggcaaacaccggatgggttatttcccgtatacatctgcgcttcaagcgttacccacaatggcgcgaagaggtaaacctccagacatgg

SEQ ID NO: 1140 - DNA, 24515 bp, synthetic construct
  source 1..24515: mol_type = other DNA
  misc_feature 1..24515: note = Synthetic
tggtcagatcgcataccacatgcagcacatgaccgccgccgatggcgtaaccgtttaccatggcgatgaccggtttaggcagtgaccggatttgcttttgtacgtccagcacattcagacggggaactccatctgtgccgatatagccgccatgcccctttacgtgcatatctcccccgctgcagaaggctttgtcgcctgctccggtcagaaccactacattgatatcctggcactcgcggcagtaatacagggcgtcgctgatttccgaagtggtggtgggggtgaacgcgttgcggtaacgcggacggttgatggtgattttcgctattccgttgtaaaagtcaaacagaatatcctgatattctttgatggttttccattctcttgtttccattattcatttttatttttaagtccgtgataatattctcttaacagggtggtgtctttttccttgtcggtaaacacctccagcagcatgggttgcatccgtgtctcgggtgaggtgaatggctgcatcgcttcttccagctcttcttctccggtcactttcatgtaaataaagccgcgttcttccgcccagcctttggcggtggtgtaatgctcggctgtgataaactccctggaacggcttgatttgtccattccaggcagggtgtggaatatttctcctccttcgttattcagtaacaggatgcggatgttggcaccgtaattttgattccacagtgcgttcatgtcatagaagaagctcaagtcgcctatgatgatgaaattcagcttgctggaagcggcggcataaccgatggcggtggacagggagccttctatgccgttcactccccggttgcaacagatttccacctggggaggaactgtaaataactgtgcatagcgcacggtggagctgtttgccagatgcagggcacagggttcgggcaatgcccggatgagttttccgataacggagatttcggaataagcaaggtccggcatcggaatggttttgcaatagttttcccacatcagcggataatgggtaggtttgttgtccagcaggaaagctattttttccaagaactcaaacggatccatctcgatgacggtggtcaggcaaccgtataaatcggctatcttcccgtcggcggcaacatgccagtgttcgcgcgggggatgattgcgcaggtatttcttcaattgtttggatacgatgtgtccgccgtaggtaatcagtatttcgggggccatgtcttcctggcgttccggtgtcatggaataaacggcggcgtcgaaattcttgataggaatgccggggatggtctggttgcctagatgttccgtcagccaggcgaaatgtttataaagcggtttcacatattttttctcgaacaggtaaatcagattcatctggcctaccacaaccatgcgcttgttgtacttgttcagccgttcgatcagttccttatagtcacggtcgtacacgctcagtccctgataacgggtgatgacacgtacttcgggaagtgttttggcggtgaagcggtaaatgggttcggaaatgggtacattgatatgtacaggccctttgccgtggtgggtggtttccagtatggcttcgttgataaggcggttgcaaaaccattcgtcttcctcagtatgtacttcgggcaggttgacagacatcttgactaacgttccgaacacatggggctggggcagggtttgtccgtccatttgtcctatccaggcagcggggcggtcggcggaaatgacaatcagaggtacttgttggtaaaaggcttcggctacggcagggtgcaggttcagcagggccgaaccggaagtgcagcatactgcggcagggcctcccccttgtaaagataggccgatggcaaaaaaaccggcactgcgttcatcggttacagaataacaagtgaagtcctctatattggccagagtatgtacgatggcagcattacggctgccgggacaaagcactattttccgcacaccgtgcgctttgagaagtgccaccaactgaagtatgttctttttgtctgaatacattattcttctactttaattgtttccatttatttacttataaagtcaggatgaaggatgctccgcatcgtattcatcttgtctcccgtttccatccattccgattctacttccgaggaagccagtattcctcctcctgcatacaggatggcttcacccggctttatttccatgcagcgcagattgacgtagatatcggtatgcccctctgtgtccagccagccggtgaacccggaataataactgcggtcgtacccttcattgtccggaataaaccggaaagcctcctctttgggcaggccgcagacggcgggagtgggatggagttcttgcaataaatcgcctatatggtctgtatttttcaacaagaaataaaaatcggtcttgaggtgtaccaattgtccggcacgggcggtataaggacctttctccgtcatcttgttgccgaatcttttggcgatccggcggatgtaatcagccacatagccctgctcttcccggttcttcctgtcccagtctgtcggcatcacttcattctgcatcggcatggtaccggccagggccacggtgtgccattctttgccgtgtccgcttaataagatttccggtgtgctgcccagccaggttccggaagcaggggtgtggcataggtaaatcatcatgcgcggatagttgttgcaggcccggacaaaagcgccgagtggtgaaaaatcatctccgatatgtctggcggaagaacgtgacagaaccagtttctggaaccgcttctcttgtaagggagtgatgaaacgcccgaatgcgcgggtatattgttctttatccgtttcttcggaaacaaaaggggagagttcactctgccggcttttgcaggtgagcagggcatccgcacattccagtgaagacagtgcttcgctgatttcgctccagtcgtatgcggtgacatccggacggataagtaccaagggatgttcctccgatatccggaaaggagccatgacaaatcctttctttccattcagttcctgaatgtccgctaattgttccacatcgcccgaggtttgcaataccaggtagcattcgtctgtccaaggtaaccggtagagggcgaaaccgaggcggctgtgtgtcaggcaatccaataatttttgcgtatgtatatctggtagattcatttctttttcagtatgaaattaacgacacgaacagtagaaaccagttgtccttgtggagtggtgatatctatattccatatatgcgaggatctgccgcggtgaatcagtttgccggtggcgaatactttgcctccgacgggcacggccgacagatgatttccacttacttgtactccgcaggcatattcgccttcccggcatagcgacatggagccatgccctgccacaatctcggccagagccagtgacgcgccgccgttcaacataccaaagggttgtgaagtacgatggtctacaggcatttcggcatgtaccgcatcctcggtggagggtagaaaccggatacccagatgttccgccatcgaattcgaataatcaggtttgcaggttgtttcttccatcatttgtatgtctgttcttttctatagggctacaaaaatacataaattttagatgaaaaggtgttgtatgtatgtcttttactaacaaaaacatttatttaaattcaattgtttgggagctttttcgatacttataatatatgatgccgatgacgtccgctataaaccatccgataggaatagaccaccagattccgatgaccccgatggcaggaatgccggcaagccaataggaaagggctacacgggttcccaacgataccactgtgagcactacggacattcccggcatacggatggcacgataatatccgtataacaggaacaaaatcccgattccgcaataaaacgctccctcgatgcgtaaataactgataccgatgttcagaatttccgtttcgtggggacggacaaaaatcagcatcaatggtttggcgaataaaaagaccagaatggaaatgaccagagagaagagaacggtggtaatcaaggcacttttcactcctttgcggatccgttcctcttttctcgctccgaagttctgggcaataaaggtggaaaaggcatttccgaattcctgtaccggcatataggcgaacgagtctatttttattgctgccgcaaaggcggccatgactacagtgccaaaactgttgaccaatccttgtaccatgagaatgcccagattcatcaccgattgttgtacacaggtcagtgcggagaacgaagtgatctctttcaggcagtgacggtcgaaatgcaggtcgttgcggtgtaatctcagttcggggtatttcacgtaggcatatcccataattcccaaagcggatactccctgtgcggctaccgtggcgatggctgctcccttgattccccaatccaactgcaagataaagaacaaatccagcccgatgttcagtacaacggaaaccgccagaaaccaaagaggagtgacggcatctcctatggcacgcagcaatgccgcatagaaattatagataaaggtaaagccgattccccaaaagataatccacaagtaatcatacatcatgccataaatatctttgggaatctgcaatatcctgaggatgggatgaatccagacgaaaaccgctatatttagaatcaatgttactgtgccgatcagcaggacggatacatagatgctacggcgtagggaatccgtccgtccggctccatattgcaaggaaaaaacggttccgcttcccatggacaatcccagcaggatggaaataaggaaaaccatcagcgtgtaggcggaaccgacggcggccaatgcgccggaacctatacattgtcctacaatcagcgtgtcggctatgttgtaacactgttgtagcagtgagcctataatcataggtaaggtaaaacgtagcagagtgccggtgatgcctccctgcgtcaagtctattttagataacatgatgtgcgtctgttcgattcaatttcttatttattttgaaatttattgcgaaggtagggaataaaatatcaaacaacaatagagattgtctatttaatacctggaatgttctttctccttaaaaagagttaacttgataatattttccataggaaactttttattataagaaatatcatgtatgtttgcataaagtttccattggaaaatattaaatcaaataaaatagttcgattatgaagtatatagtaataggaggcgtagcaggaggtgcaactgctgccgcacgtatcagaagaaacacggaacaggcggaaatcattttgttcgagaagggagaatacatttcgtatgccaattgtggtctgccttattatataggaggtgtgattgcggagcgggaaaaattgtttgtacagactccggaggctttcgggaaacgttttaacatagatgtgcgtacccggtccgaggtaatagccatccattctgccgataagacagtggatattcgtacttccgacgggaaaacttatacggagagttatgacaaattattgctttctccgggtgcgtcgcctgttcgtcctcccttgccgggcattgacaatgaaggaatttttaccctacgtaatgtgaatgataccgttgctatcaagagttacttgcagcagcataaggtgaaacgggcggtaatcatcggggccggattcatcgggttggagatggcggagaatctgcaggaagccggtgcggaagtggcggttgtagagatggcaaatcaagtcatggctcctattgatttctctatggcttctttggtgcacgagcatttgttgcagaaaggagtgcatctctacctggaaaaggcggtggcttctttcgagcgcacggtcaacggactggaggttatttttaaatcgggcgaaaggctgcctgccgatatggtgttgttatccatcggggtacgtccaaatacctcattggcgacagaggccggactggagataggggagatgcgcggcattaaggtgaacgattacttgcagacttccgacgagcatatttatgcggtgggcgacgctatcgagttccgtcatccgctgactgatagaccgtggttgaattatctggctggtccggccaaccgtcaggcgcgtattgtggcagataacatggtttttggaaataaggttacatacgaaggggctgtcggtacttccattgccaaaatttttgatatgactgttgctgcttcaggccttccggcaaagcggttgaaacaggcaggcattgattatttgtcggcaaccatccattccggttcccatgcgggatattatcccgatgctttacagatgtccattaaaataaccttctctcctgtgaacgggaaattacttggagcgcagattgtggggtataacggagtggacaaacgtattgacgaattctcgcaagtgattaagcataacggaactgtatatgacttgatggctttggagcaggcatacgctcctcctttctcttcggcaaaagatcctgtagcagtagccggatatgtagccggaaatatactgagcggaaagatgaagcctctttattggcgcgagttgcaggctgccgatttgagtaaagttacgttggttgatgtccgtactcccgatgaatttgcactcggtgctttgaagggggctgtcaatattcctttggatgatatgcgcgaaaggatgaaagagattcctcaggataagccggtctatttgtattgtggagtggggttgagagggtatcttgcttctaatatattgttacagaatggctttggggaagtaaggaatttaataggaggtttgaaactgtataaagcggcaacggctcctctgcccaagccgaaggagttctcaaattccggatcttcaagttctgattcttcaaaagttgatcattctgaacacagtaaagattctgctgaagcttatactattgcctcttccgtcattccttctatgaaagcaataaaagtggatgcttgtggcatatcttgtcccggtcctatcatgaagctgaagaagagtatggaagaactggcggacggcgaacgtctggagattgtcgctacggatgccggtttcccccgcgatgccgaagcatggtgccagactaccgggaaccgttttgtctcagtaaagtcaggagcaggaaagtatgaggtaattgttgagaaaagtactccgcaatcttcttcctcggaggtttgccgggaggataaagggaaaacttttattctgttcagtgacgacttggacaaagttttagctacttttgtactcgcaaacggtgcggcggctacgggaaagaaggtaaccatcttctttactttctgggggctgaatgctatcaaaagattggacaagcctgcggtgaagaaagatatctgggggaagatgttcggcatgatgctgccttccagttctttaaagctgagattgtctaaaatgaatatgggtggaatgggagccaggatgatgcgatatatcatgaataagaaaaatatcgactcactggaatctctgcgtactcaagccattcagaacggagtggaatttattgcttgccagatgtcaatggatgtaatgggtgtgaaacgtgaggaattgctggatcatgtgactattggcggagtggcaacctatatgaaccgtgccgaacaggcgaatgtaaacttgtttatttaaatttgcatggagaaaataaaatcaatatgtgtcatgagagagctgttcaaggctctctctgaacttgaaacccgcttgatggaacaatatggagtgtcattgaatgaggcaatggcactttgttgcattggcggagatacgctgacagccagtgtgatatcggaaaaaacaggcctgtctgcttcgcatacctctaaagtcatccgttccattgaagagaaagaattaatcgtccgtaatttgggggataaggataaacggcagatgcattttactttatccgataaagggcgtgaatgtttggaagcgctgaaagcaaatgaaatagaaataccggaactattaaagccattgtttaaataaacccttctcttttccatttgtttattccggatatgaaactggagaaatggaaaaacaagtggaaggagtggagcaatctgcgcaaatggcaaatatggaaactgaagctgattgatgcccgtctgtatttcgtgagcatattcgtggggctgcttacgggactggttgctgtgccttatcactatcttctctggtatttctttgatgtgcggaaaacttttttcacggcgcattatccgtggtattggcatgtattgttgttttttatcttatgggggattctgatctttgtcgcttctttggtaaaacgtatgccattgatagccggaggcggtattcctcagacacgtgcggccaataacggtcgtatccgttatgagcatccttttaaggaactggtggccaaattctgcggaggtgtgttggctctcagtgcggggctgtccttgggacgcgaggggccgtctgttcagatagggtcttatataggaacacttatctcccgttggggacatatcctgaaaggggaacggaaacaattgctggctgccggagccggtgcgggcttgtctgccgcttttgccgctccgttgtcttcttctttgctggtaatagaatccatcgagcgttttgatgcacctaaaaccgccattactaccttgttggccggcgtggtagccggaggagtggctagttggatgttccccacgactccttatcatctgattagtgcggtcgttcccggtttatcttttatccgtcaggcagagctttatattatctttgccgcccttatggctgtcattgcaaagttttattcgctcatcgttcctttctttcaagaaaggatacctgccatgaaactctccattcctgtcaagatgttgtatttattgatcatagcttatgccatatcgttaacagagacgaatctgacaggtggcggagagcagtttttgatgatgcagggaatgaatggaactcatgatatccggtggcttactatcatgatgcttattcattttgtttttacgctgttttctctttcttcgggtttgccgggaggaagtttcattcctaccttggttacgggaggattattgggacaaatcttcgggttggtattggtacagcgcggatggatagggtatgagaatgtgagttatatgatgctgatcgggatggtggcttttttggtggctgtggtgcgtacccctttgactgccattgtcctgataacggagattaccggtcatttcgaggtgttctatccttccatcgtggtaggtgggttgacttattatttcaccgaattgttacagataaaaccttacaatgtattgctgtatgacaggatgttccgtagccataatccggagtcttccgaagaggctggtgcccgctatcatctttttgtcgagataatggatgggtcttattttgacggaaaggaagtggatacattggctttacctaatcattgtatcattcgtagtatacatcggaatcgtaaaaacttacttcctcaggggcaaactctggttcctggtgatcaagtggagatagaaatggatgcgcaggatatagaaaaattatacgaaccgttggtcagtatggcaaatatctattaaaagatgagtctaaaaaagcccccgttaaaggacgagggcaacctaaatgttttcacaacggaataatccttattgtgacttgcttcaaattagtattgcaaaactatgaaataaatatgtaaaggacaagtgattattagaataatttgataactttgaaaagttttgataaaatagttgtcttatgaaaaatatagtgggtcttgatttgggtaccaatagcataggttgggcagtagtaaatggaagtgtcaatgacgatggaagtgaacaattggttaagatacaagcttctggaagtcgcatcatacctatggatgcagctatgataggagattttaataaaggtaattccatatctcaaactgctgaaagaaccagattgcgtggagttcgtcgtttaagcgaacgatatctgcttcgcagagaacggttgcatagaattcttgatattttaggatttttgccttttcattttgctcaagatttagataggcatggtaagatagttaagggcaaggaacctaaactggcttggcgtaagaatgaagctggtcagtttgaatttatattccaagattcatttaaggaaatgctggaggattttaagctaaatcatccgaatctgataacagatgataaaaaagtaccttatgattggactatctactatctccgtaaaaagggattgacttctaaaatttcaaaagaagaattggcgtggatattattgaattttaatcaaaagcgtggatattatcaattacgtggtgaggaagaggaggaaaataagaataaattggttgaattctatgctcttaaagtagttgcagtagaggattccggagaaaaaaagggaaaggatatttggtataatgtgcatttggaaaatggatgggtgtatcgaagaacaagtaatatgcctcttgattgggttggaaaaactaaagaattcattgtaactacggatttagagaaggacggaactccgaaaaaagataaggaagggaatgtaaaacgctcttttcgtgctcctaaggaagatgattggtcattggtcaagaagaaaacagaagcggatattgatcaaactcataagacagtaggtgcctatatttatgatacgcttttaggaaatcctagtcagaaaattcgtggaagactggtgagaaccattgaacgcaaatattataaggaggagctgaaacagattttggagaagcagaaggagtttcacctggaattgcaagacagagcattgtatgctgcttgtgttgaagaactatatacaataaatgaagcacatcggaataatattggtaatcgggattttacttatttgtttttagaggatatactcttttatcagcgtcctcttaaaagcaaaaaatcattaatagacaattgtccttatgaggagaatcagggtcttgataaggaaacgggagagataaaatcttttcctgtaaaatgtattgctaaatcacatccgttgtttcaagaattccgcttgtggcaatttataataaatctgcgtatttataggaaagacctggcacaagatgtggatgttacaaatgagttattgaagacagaagaagattatgttgctttatttgactggttgaatggtaaaaaagaaattgatcaaaaggcttttttgaaatatccggtttttggactgaaaaaagagatagagaattatcgttggaattatgtgcaagacaaaccttatccatgtaatgaaacccgtttattgatgttggcgaggctggagaaatgtgatatttctattgaattcctgacaaaagagaatgaggaagctttatggcatatattatattcggttgaagataagaatgaaatagtaaaagctttgcagaaatttgcggataaacacgacctgaatgcttcttttgttgatgtattccggaaattcccgccttttaagaaagaatatggttcctattcggcaaaagcgattaaaaagttattgcctttaatgcgtatgggaaaatattggagcgaggattccatagataaaggaacgcgtaaacggatggataagataataacaggagaatatgatgagaaaatagaaaatagagtaagggagaaagtaattcatcttgctgatgtttttgatttcagaggtttgcctctttggttagtgtgttacattgtttatggtcgtcactctgaagcaaaagaaataacccagtggaaatctcctgctgatattgattcgtatttaaaatcttttaagcaacattcattgcgtaatccaattgttgagcagattattattgaaacactacgtgttgttcgtgatatttggaaacaagtgggaaatattgatgagatacatgtggagttggggcgtgagatgaagaatccggctgacaagcggaagaaaatgacacagcaaatgtctgaaaatgagaataccaacttgcgtatcaaatatttgctcacggaatttttgaatcctgaatatgaggttgaaaatgttcgtccttattcgccaagtcagcaggatattttgcgtatttatgaagagggtgttttaaatagtgtttccgatttaccggaggaaatatcggatatattgaaaaagtttacagaaacagacttgaagaagcgtccttcaaggtcagacgttttgcgttacaagctttggctggaacagaagtatcgttctccttataccggtgaagtgattccattaggtaagttgtttacgcctgcatacgaaatagagcatgttattccccaatcatgttattttgatgattcttttagtaacaaggtgatttgtgaagcggaagtcaataagcttaaaagcaatttattgggacatgagtttatagtgaagcatcatggggagatagtggaacttccttttggaaaaaaagtaaggatcttcactgtggatgaatatgagcaatttgtgaaagataactattcgcgtactcgtagtaaaatgaaaaaacttttgatggatgatattccggaggagtttgttgctcgtcagctgaatgatagtaggtacatcagcaaagttgtaaagtcccttctttccaacatcgttagagaaaaaggagaggaagaagcaatttcaaagaatgtaattccttgtaccggaggagttacggatcgtttgaagaaagattggggaataaatgaggtttggaataagattatacttcctcgttttcaacgactcaatgagttgaccggcacaaataaatttacaactaaaaatgttgggattcaagaaattccgacaatgcctttggaattgcaaaaaggttttaataagaaaagaatagatcatcgtcaccatgcaatggatgccataataatagcgtgtgcaaataggaatattattaattatttaaataatgagtcggcaacagctaaggctgaattatcccgatatgatttgcagaaactgctgtgtgataaagctaagactgataataacggtaactataaatgggtgatcagaaaaccgtgggcatcgtttacacaggatacatatttggctttggaaaatataatagtcagttttaagcaaaatttgcgtgttataaataaagctaccaatcgcttcttgcattataatgaagaaggcaaaaagatctttgtgaaacagggaaaaggggacaactgggctatacgtaaatccatgcataaagatacggtatttggagaagttaatttgcgtaggataaagactgtagctttaaatgaagcgatgaaaaatcctcaaagcatcgttgtgaaagacttcaagagaaaattattggaactttggaatttaggatttgacgcgaagagaataaagaagtactttgaagataatagagaaacttggagtgatataaatctgtctaaaatagaggtttactattttagtaaagatactaaagatcgattctttgctactagaaaaccgctggatactagttttgatagaaagaaaatagaaaataatattactgatacgggtatccaaaaaatattgttacgtcatttggaactgaaagataataatccggatattgctttttcgccggatggtattgatgaaatgaatcgtaatattattcagctgaataatggaaagtatcatcagcctatcattaaagttcgttggtatgaacaggctgataagtttgcagtaggtcaaacaggtaataaattttctaaatttgtagaggctgcgaaaggaacaaatttattttttgctgtatacgagtcgaatattctagataaaaagacgaatactataataaagaaaagaaattatgctaccattccactgaatgttgcaattgaacggcaaaaacaaggtttacctgttgcaccggaagatgagaatggtaatgaccctatttttgtattgtcacctaatgatttggtttatcttcctactgatgatgaattagctaatggtattattgcccagcctttggataggggaaggatttataagatggtaagttcctcaggtgaacaatgctttttcataaaacatattgttgcgaatgtactagttgacaaatttgaattttctcctttaaataagatggagcgggctttaactggtgaaatgataaaaatgatatgtatacctataaaagttgatcgtttaggaaatgtcttagaatcaagtagttcacataaaaaataatatatccttattttatggaagaaaacaaaggacaaattcttttatatcaaacggtagatggtgagtcaagaattgaagtaacactatgcaatgataccgtttggctgacattagatcaaatggcagaattatttcaacggaacaaatcaacgatttcacgccatataaagaatgtttttgagggtggggaattacaggaaaattcagttgttgcattttttgcaacaactgcttctgatggtaaaatatatcaagtggcttattataatttggatatgattataagcataggctatcgggttaaatcttaccgtggtgtgcagtttcgaatatgggcaatacaaatactaaaagagtatttagtaaagggatttgtaatgaacgatgaactgttgaagcgtgcaggtggtggaaattattttgatgagttattatcacgcatacgtgatattcgttcctcagaaaagatattctatcgtaaaattcttgaaatttatgctttgagcatagattatgacccaagtactgagtctactcgattgttttttgccacggttcaaaataaaatgcatttttcggtacatggacatacggctgctgaggttatttacggtcgtgcagatgcagggaaagattttatgggattaactaattggacaggagcagtgccaaagcggaatgatatagaatatgctaagaattatttgacagatgatgagttggatacattaaatcgtattgtaagtttgtatcttgactttgcagaattgcaggctaaaagtcatacccctatgtatatgaaagactggattcaaaaattggatgattttcttagactgtcaggaaaagaattgttacaacatgctggtactatttcggctgaattagcaaagaaaaaagcaaatcttgaatatgatgaatttaagaaacgcattagtaatcagttatctcctgtagaaatagatttcattgaaaatttcgaaaaagagcagaagaaattgcgaggtaagtaatatattaacctttaaaatatgatactatgataaagaaaacactttattttggtaatccggcttatttgtcattacgaaataaccaattagtcataaaacttccggaagttgagaaaagtgattcattgccggatatctttaaagaacaatcggaaataacgaagccgattgaagatataggtgtcgtagtactagatcataagcaaattactattacttccggtgtattagaatctctattagagaataattgtgccgttatcacttgtgatagtaaaagtatgccagtgggtttaatgctccctttgtatggaaatacaactcagaatgagcgtttccgtcaacagttggatgcatcattgccattgaaaaagcaactttggcagcaaacaattaaggcaaaaatagataatcaagcatctgtattgagagtttgtgtaggtgaagaaatgaaatgtatgcgaatttgggcgaatgaagtgaagagtggtgatccagagaatttggaagcacgtgcggctgcttttttttggaaaaatttatttgcagatattattggctttactcgtgacagagaagggatttctcctaataatttattgaattatggttatgctatacttcgtgctatcgttgctcgtgctttagtggcaagtgggttgcttcctaccttagggatccatcatcataatcgttataatgcatattgtttagctgacgatgtgatggagccatatcgaccttatgttgatgaattagtatttaatttagtgaaattgtatggtgcaaatttggaattaacaaaagaaataaaatcacgtttgcttgttattcccacattggatgtacgtattaatggtaaacgtagtccgttgatggtggctgtcgctcagactacagcttctctatataaatgtttttgtggagaaattcgtcgtattagttatcccgaacgataatggaccgttttagtgaatatcggattatgtgggtactagtattatttgatttgccaacggaaactaagaaggacaagaaagcttatactgattttagaaaaaatctacaaaaggatggctttacaatgtttcagttttcaatttacgtccgtcattgtgctagtagcgagaatgcaactgttcatataaatagagttaaatcttttttgcctgaatatggacaagtgggaataatgtgtatcactgataaacaatttgctgctattgaacttttttatggaaagaaactacaaggtgtaactactccaggacagcaattggaattattttaaaaataagaaatcccgtctgaaacgggatttcttattagataacaactttgtttttaattcctgaatatgtgtgtaactaattggtaattagtttgtaacatatattccgttgtttccaatggttcaaagatactaatttgaaagcaaatcacaactggataacgaattaaaataaatatttgcaagttgtttccaatggttcaaagatactaatttgaaagcaaatcacaactacttgtggaatagcccaacagatacaaggttgtttccaatggttcaaagatactaatttgaaagcaaatcacaacgtgattacagtggaaatgtattatgcttaagttgtttccaatggttcaaagatactaatttgaaagcaaatcacaacgtaaccttttaatataattttgaacatcaagttgtttccaatggttcaaagatactaatttgaaagcaaatcacaactggaattaaagaagttgctaatagaataggttgtttccaatggttcaaagatactaatttgaaagcaaatcacaaccagtttcttcaaagttcctctcatattttgttgtttccaatggttcaaagatactaatttgaaagcaaatcacaacaactactagaaacagaatgtgggaacttgagttgtttccaatggttcaaagatactaatttgaaagcaaatcacaactgaaaccatcagttatagattgatgattatgttgtttccaatggttcaaagatactaatttgaaagcaaatcacaacgatatgcgcatatatctgtatcaatatatagttgtttccaatggttcaaagatactaatttgaaagcaaatcacaactagagggcttgatggcagccatgaaaaaagagttgtttccaatggttcaaagatactaatttgaaagcaaatcacaacctgtccgatgcaatgcccgacagggagcgtgttgtttccaatggttcaaagatactaatttgaaagcaaatcacaacggtggtgtaatatctaccaggtgtttgatagttgtttccaatggttcaaagatactaatttgaaagcaaatcacaacgcttcgtattagacttggacgtaaagtaatgttgtttccaatggttcaaagatactaatttgaaagcaaatcacaacaaagtccatgcagttttcggtgtacagtgggttgtttccaatggttcaaagatactaatttgaaagcaaatcacaacttctgttggtaactctataaatgaatactggttgtttccaatggttcaaagatactaatttgaaagcaaatcacaactataatagtgggagatacgagtcaaactcagttgtttccaatggttcaaagatactaatttgaaagcaaatcacaacttcttgagacggctaacgctggagatcagagttgtttccaatggttcaaagatactaatttgaaagcaaatcacaacgttcctcagattgatgctacgaactgttctgttgtttccaatggttcaaagatactaatttgaaagcaaatcacaacggatatgacaggtatacttcttaatcaggagttgtttccaatggttcaaagatactaatttgaaagcaaatcacaaccacttttcaatgcttccaatgcagcattgagttgtttccaatggttcaaagatactaatttgaaagcaaatcacaacgaaatgagcatcatcaatatatccctgtttgttgtttccaatggttcaaagatactaatttgaaagcaaatcacaacatggtgcatccgtcaaaattggagtatgcgttgtttccaatggttcaaagatactaatttgaaagcaaatcacaacggagcaatagcctctatcgcggctaccaagttgtttccaatggttcaaagatactaatttgaaagcaaatcataacatattagctgaaaatccctagtcgagtaagaaatcaaaaatttcatctgggttctcatctaggttttctgggtcatcataataagaatctaggttatcaagatagaaatcatattctgatgattgattaccaaatctctgatcatactgttgttgtgatagcttagtaactttatcaggattcctatcggcataagcagatgcctcttctattgacatttgtttggtagaagtaaataccaagtaatataattgtggcttggtataatgagtatctaaagttacttgttgataaccagatttccttgcagtaactattacgttttctggtgtgatagtagttttcaagatataggtatagattctttgatttctaagtgaatcccttagtaatttaattgaatctactttagcaaagaatatagaatctcttctaagttcttctttatatcgttttacccttttgatagaatcctctctgctctcctttatataaggaggagttaccctcctaggttcattgtttaatagaacaagacccagaagagaaactccaaatatagaaaatggaagtaaaagatgattcgtttttgagttcatacccactagttttgtattgatctttaatatgagaatttaagtacctacctcctagattcactttttaataatcttttgaattgctctttagaactttatcatatcggtatactttgttatttttaaaagatacccatagatgatgtttctttacgttgtaaccaataccttctatattagaagattctactgatgttatttctattccagtattcattttaactaattcaagatattcttctctgtccattctattaaaattttagaagtcttaactccggatgtaatgcgttggtatatttttgaataattgcccatgctctcagatgttatccattcttctttcatttttcataggatatgagagcaaacatataactgatactttgtaagagttttattatgttatctaatacccctcttatttctccctcttcaatctgaagaagttttttaaaaagatagtgatctgtatcctctcaattatgttgttttcattgattcaaatatactaatttagatatgaattatccttaattattaattcttattatattaaagagtttaaagtgggttggaggtaaaactttgcagcatataatgtgtatatagaaaaattatacgaaccgttggtcagtatggcaaatatctattaaatttgccgtatgaaaaagaaattccagcttgaagttccgggaggagccgacaaagtgttgcttcatacttgttgtgctccttgttcatcagccatcatagagtgcttgatgcagcatggtgtcactccggttatctattattgtaatcccaatatttatccgttggaggaatacattatccgcaaggacgaatgtacgcggtatgcccagtccttgggattggaaattatagatgccgattatgatcatgatgcctggcgttgtcgaatggcaggaatggagcaagagcctgaaagaggaggccgttgcttgcgttgtttcaagatgcgactgcaggaaaccgcacgttatgcccacgaacatggattcccggttatcactactacgcttgcttccagccgttggaaaagtttggaacagatagaggaagcgggccgatatgctacggctccttatccggatgtcacttattgggaacagaactggcgtaaaggtggattgagtgagcgtcgcattgctatcattaaggaatataatttttataatcagcaatattgtggctgtgagttcagtatgcggaaagaagaaaagggaggatgacgggaatgaagatgttcaaactgtggatggttgtgatgttattgggactcttgcccgttgtctcagaggcgcaagaagacataaataatgccattaatgtacagttggagtatctgaaaaagtatcctaaagacaaagacgcgcttcggaaagttagttttctctatctgaataaagcagattatgatcagactatcttttatggtcgacaattgtttgagatgggttataatgaacgggattacaatggcgctgtaatttattctcatatttgtctggggcaggcccatatgatgaagggaaatgtaaaggaggcttatagtcatttagggcaggccaggctgataggtgaaagtaataaaaatgattccgccttatgttccgtatataatgggctgggactttatgcatcgaatgtccaaaaagactattatcgttcacttacttatttcttcaaaggagttgaagctgcaagacgttgtcattatgacagactctattccattttgctttctaatattgccggtatttattatttgaaaaatgatagcacaggattgaaatcttacttgggagtacaggctatttaggggagccggagatatacctttctttatttttagattatgcaaactaacggtgtagatttaatatacctataggcttttcaaactgagcactgcgattagggaagatattttcagactatacagataaagatgtggttcgtgttaaactggcactttggtataatgaaattgaggagtttggctatgatacatttaccacggttgcaaattccattgagaatcattacgaacggatattaaactactttgtaaacagaagaacaaatgctgctgcggaagcttttaatgcaaaaattaaagcatttaaggcttcattttgtggagtagtagataagaggttctttctgtatggattagcaaaggtctatgcataaaggggaattagcaaagattaatcccccaagaattataactgatcccttataccgacataccctgcacaaagcagggctaccaaataaaaaagccatcgataaatcgatggcttttttatttggtagcccgtgggggaatcgaacccccctttcaagaatgaaaatcttgcgtcctaaccgatagacgaacgggccatcctttttatcgaggatttctctctcgattgcgggtgcaaaggtagtgactttttttgaatttgcaaacatttcccaaacttttttctaaactttttgttcatagtccattgaattgactatttacctaaacttaacttttatgaaaagtatctttaaatcaatgagttgccttgtgttgggcgcaatgattgttacgccgatgtttgcgcaacaaaaaaaactttatccggagctggaaggaccgggacctgttgttattatctcaaaagataaaaatggcaaggaagaattaatcaatgtatttgaagaaacgcaacgtccgcatttccatgatccccgtgctcctcgttttttacttactgaccaacagggaaagtttgcattgggtatcggtggttatttgaaaactacaatggaatatgattttaatggaatagtggatgatgttgactttatccctgcactcattccgcaaccgggatccacgtctgtccgtaatcagttccagatggatgcaagcacttccactatctttttaaagttggtggggagaaccaagcatttgggtaacttcatcgtttatacagccggaaacttccgtggaagtggaaagacttttgaattgcagaatgcttatttatccttcctgggctttactatggggtatgataccggattgtttatggaccttgccgcagctcctccgactattgattttcaaggacctgacgggatgactttctatcgcgccacccagttgcgttatgaagccaatgtgatgaaaggtttgaaagtgggtgtcggtgtggaaatgccgtcagtagacggtactccggcacaagatgtgagaatcggtaagcagcggatgccggatattcctgcctatgtacagtattcttgggcaaaggctagtcatatacgtgtgggaggaatcttgagaagtatgacttatgaggatcaagtgaataataaggcaaagtcattgaccggttgggggatacaggcatcggggacagcaagactgggtggtttccagctttacggacaatatacttatggtagaggtattgctcaatatttgaatgatatcagcaacttgaatgtagatatcgttcctttggccgatgagtccggacgtatgcaggtactgcccatgaaaggatggtatgccggattacagtataatttctcgaaacgggtattcgcatcggctacgtatagccagtcacgtctgtttacagaagattgctatgctcactttaatgaaactcagtataaaaaaggtcagtacctggttgcaaatgtattctggaatgtaagtcataacttgcaggtaggtgcggaatatcttcatggttggagagagaattttaatgatgtgaaccgtgaagcaaaccgtataaacttgagtgcgcaatataatttctaacttatttttcctatctttgtgtctatcaataatggaaagagaatgaaaaaaataggtgcacatgtatccgtaagcgggggcgtggaaatggcccccgttaatgcattagggataggagcggacgcattcgctctttttacaaagaatcagaggcaatgggttgcaaaacctttgtctgtcgagagtgttactctgtttaaagaaaactgcgagaaagaaggttttgatgcccggtatgttcttcctcatgacagttatctgataaatttggggcatcctgacgaggaagggctggagaagagtcgtgcagcatttttggacgagatgcagcgttgcgagcttttaggattgaaaatgctgaattttcatcccggaagtcatttgaacaagatatccatagagaagtgtctggacaggattgccgagtctgtcaatatgactttggataagacgactggtgtgactgctgtgattgagaatacagccggacagggaagtaatgtgggaaatgaattctggcatttgagatatattatagataaggtggaggataaatctcgtgtgggagtttgcctggatacttgccatacctataccgccggttatgatattgtgaatgaatatgaccgggtctttaccgagtttgatgaggtagtggggagaaactatttgtgtgccattcacttgaatgactcaaagaaaccattgggtagccgggtagaccgtcatgacagtatcggaaaggggctgattggtattgatttcttccgccgctttatgcaggattcccgttttgacaatatgcccgttattcttgaaactcccgatgagaccatttggcgggacgagattaaaatgcttcgcagctttgaaccatagtttgtggctggatgaaaacatatttaaggaattcagctatcattttgcttgtaagagcgaggcttgctcgcccgaaaataggctgatttgcatattctcccaagatcgtgcccgttagttcgggcaggcaaaaaaacttatattcgtcaatctgagttggcaaatagtattttcaccaccgtaggggcaggcccgtgtatctgcctgatagtacgaaagcagttgcaggttctctttccaaagtatgaccgaccgtggtcttgtaagcagcttcttgacgataaagtcgggagagaagcggaactctggaggagcctgcagactgttatctaaaacttataaaatgaagaaaccgacccttttgggtcggtgttctacggtagatgtttttcctttgcttgacggctatgaggcaatccctgcccctacagctgaatacatgacagcac

SEQ ID NO: 1141 - DNA, 24515 bp, synthetic construct
  misc_feature 1..24515: note = Synthetic
  source 1..24515: mol_type = other DNA
gaagatttctgccatcggtggttccagctttaataccggcttttcgaatatatacggagtatattcaatggtgtgtgaaaacagacgggaactgcggatgagtttttgtgagaatcctacaaaaatgaaacggcaatccggactttgttcggtgagttggacataaaggtcggggaaaataatcgcaatcgaattggccttcatctgatactgggtaagatgaatggtcagtgtacaggtacctctgacgcacaacaaaaaaatgcatcccggagagggtatgggaaacttgaatagctgcttgaatttaccatacaggtctattccggccatcatgtcggctcctgcgggaattagatctgatttttcaagttttttcatgggcatgctttgtctcttttttttgattacggaaggcaaatatagtgtatttgtttttatattccaaacattgaattgtttgttttttttgttgcctttcaggggataagccagatgtgatacccttgtaaacgaacttgattcctatatccgggaggaagaattgccgaatgccggacggggtgttgacggtaggcgatggtgatggaaaaccggtgtatgccggtggggttcaaaagaacaggcagggaaagaaaaaagtggcttccgtagagaaatctttgctattatgtgaaaaagacttaagaaaaaatacggcatatgattgtattttgtattttcgtcgttagtacgaaaactataagtttaatataatgaaaaccactaatttgtatcttgtaagtttggtattcgttgccattctgggcggtttgttgtttgggtatgacaccgcagtaatttcgggagccgaacaggctttgcagaaacatttgggacttaattctttttggcatggtgtaaccgcctccagtgccttggtaggatgtgtgataggtggagccatatcgggaatatgcgcttcccgtttagggcggcgcaactcgctccggctggcagctgccttgttctttgtttcggccttaggttcttattatcctgagtttttattcttcgaaaaaggagacacttcattttcactgatacttacatttaatctgtatcgtattatcggtggggtgggagtcggcttggcttcggcagtctgcccgatgtatattgctgaaatagctccttctgaaatccgcgggaaattagtatcctgtaaccagtttgccattatcttcggaatgctggtggtttattttgtaaattacctgataaaagacggtatgccggcagaaacgctggtatccgatggctggcgctatatgttcgtatccgaagccgttccggctgccttgtttggcattttgctgttctttgtgcccaagaccccccgttacctggtgatggaaggaaatgacgagaaggccatgaacgtattggagcgtatcaacggaaaagaaaaggctgtgcagattttggcagacataaaggcggtaactggtgaaaaaacggaaaagctgttcgcctatggtgttgccgttatagtaatcggtatccttctttccgtgttccagcaagccattggcatcaacgccgtattatattatgctccacgtattttcgaaaagattgggggcggaggcgatggcatgatgcagaccgtcattatgggtgttgttaatattatatttactttggttgccatttttacggttgagaaaatcggaagaaaacctcttttgataatcggctcgttaggcatggcattcggtgcattgggaacagctgcctgcgatgaacttcaggcaggaggcatgattgcggtactgtgtatcattgtttacgctgcatcgttcatgatgtcatggggacctatatgctgggtattgatttcagagatattcccgaacaccatccgtggaaaagctgttgccatagccgttgctttccagtggatattcaactatttggtttcatccaccttcccggtgatgtatgaattcagtccgttctttgcctattccatttatggcgttatctgtttggcggcagccgtgtttgtatggaaatgggttcctgaaaccaaaggcaagactttggaagaaatgaatcagctttggttgaatcgcaaaaaataaaatgcatatttaaacaggtttaaggaagattctttcaaaaattacagaaagttttcttcgggagtatgtagtttttatgaaaatgcttatatttgcatcccgaattgtgaagtgccataattgggaaagaaatgtatagtttacaaaaagaaaaaaagacatacgatatagtataaacacccggaattgcttttcggcaaatccgggtgttttttataatgtagagtccggagcttttcatgtgtccggtctaatctcagaaaaagagaagcctttgcagtttaagacagacagactgagaatacgagactatttaataaaacaatattagggtatatatataaggtaatgagaaatgtaacgttaatccttgacgacgggagccgtttccatggcaagtcgttcggttatgagaaaccggtggcaggtgaagttgtgtttaacactgcgatgactggttatccggaaagtttgaccgatccttcgtatgcaggtcagctcatgacgctgacttatccattggttggtaattatggtgttcctccgtttacggtggaagaaaacagggttcccactttcatggagagtgagaaaatccacgctgaggctattattgtcagcgattacagcgagcaatacagccattggaatgcagtggaaagcttggcagactggctgaagcgtgaacaggttccgggcattacaggcattgatacgcgtgaactgaccaaagtgcttcgtgaacacggagtgatgatgggtaagattgtatttgatgatgagcccgatcatattccggaagctgcttatgccggagtgaattatgtggataaggtttcctgcaaggaagtgattcgttacaatgaaggcgaaggaaagaaaaaggtagtgctggtggattgtggtgtgaaatcgaacatcatccgctgtctgctgaagcgagatgtggaaatcatccgcgttccttggaattacgatttcaattcactttcgttcgacggtctgtttatttcgaacggtccgggcgaccctgatacttgtgatgcagccgtgcaaaacatccgtaaggcaatgcagaacgagcaacttcctatttttggtatctgtatgggtaaccagttgctttctaaggcaggtggtgcaaagatatataagttgaaatacggacaccgaagtcataaccagccggtgcgtatggtgggaacagagcgttgcttcattacctcacagaatcacggttatgcggtcgacaataatacgttgggagccgattgggaacctttgtttatcaatatgaatgatggctcgaatgaaggtatccgccataaaaacaatccttggttttctgcacagttccatccggaagctgccagcggacctactgataccgaattcttgtttgatgagttcgtgaaattactttaaacggtatttaaccgcttgaaaaacttaaaaactcaacaacttaaaaactgacattacatgaaagaaaatataaagaaagtattattgcttggttccggagccttgaaaatcggcgaagccggagagtttgattactctggttcgcaggcgctgaaagccttgaaggaagaaggtattgaaaccatccttatcaaccctaacattgccaccgtacagacttcggaaggagtggctgataaaatctacttcttgcccgtaacgccttatttcgtggagaaagtgattgcaaaggaacgtccggacggggtattgctgtcattcggcggacagactgcattgaactgtggggtagctctttacaagtcaggagtatttgagaaatacaatgcacaggtactcggtactccggtgcaggccatcatggatacagaagaccgtgaactctttgttcagaagctggatgaaatcaacgtgaaaaccatcaagagtgaggctgttgaaaccattgaagaagctcgccgcgctgccaaggaactgggctatccggttattatccgtgctgcttatgcgttggggggactgggttccggtttctgcgataatgaagaagaactgaatgtgctggctgaaaaagcgttttctttctctccgcaggtactggtagaaaaaagtctgaagggatggaaggaagtggaatatgaggtggtacgcgaccgcttcgacaactgtattactgtatgtaatatggaaaacttcgacccgctgggcattcataccggtgagtcaatcgtgattgctccttctcagacgctgacgaacagcgaatatcataaactgcgcgaactggctatccgtatcatccgccacatcggcatcgtgggtgagtgtaacgtgcagtatgctttcgaccctgagtcagaagattaccgtgtcatcgaggtgaatgcccgcttgagccgttcttcggctttggcttcgaaggctaccggatatccgctggcttttgtggctgcgaaattgggcttgggttacggcttgttcgacttgaaaaactcggtaaccaaaactacttcggctttctttgaaccggcgttggattatgtggtttgtaagattcctcgctgggacttaggtaaattccacggagtagaccgcgaactgggctcctccatgaagtcggtaggtgaggtaatggctattggccgtacgtttgaagaagccatccagaaaggtttgcgcatgatcgggcaaggtatgcacggcttcgtggaaaacaaagaactggtgattgaagatattgacaaggcgctgcgcgagccgaccgacaagcgtatttttgttatctccaaggctatgcgtgccggctataccgttgaccagattcatgaactgaccaagattgataaatggtttctcgataaactgatgaatatcatggaaacctctaaggaactccatggttggggaaataatcatacacaaatcgcacagcttcctaaggaattgctttatacagccaagcgtcagggattttctgatttccagattgcgcgtgccatcggctaccaaggcgatatggaagatggaatccttgaagtacgtaactaccgtaagagccagggcatcgtgccggtggtaaaacaaattgatacgctggctgccgaatatcctgcacagaccaactatctgtatcttacttacagtggagtagcgaatgatgtgcattacttgggcgaccgcaagagtatcgtggtattgggctcaggtgcctaccgcatcggttcgtcggttgagttcgactggtgtggcgtgcaggctttgaataccatccgcaaggaaggttaccgctcggttatgattaactataatccggaaaccgtatcgaccgactatgatatgtgtgaccgtctgtactttgacgagctgacctttgaacgtgtcatggatattctcgacttggaaaatccgcatggtgtcatcgtctctaccggtggacagattcctaataacctggctctccgtctggatggtcagcaaatcaatattctgggaacttcagccaagagcattgacaatgcagaagaccgtgataagttctcggctatgcttgaccgcatcggagtggaccagccggaatggagtgcactgacttcgatggaagacatcaatgcgttcatagaaaaggtgggattccccgttttggttcgtccgtcgtatgtactttcaggggcagccatgaatgtatgttctaatcaggaagagctggaacgcttcctgcaactggcagctaatgtatcaaagaaacatccggtggtggtaagtcagtttattgagcatgccaaggaagtagaaatggatgcagtggcacagaacggagagattgtagcgtatgccatttccgagcatattgagtttgccggtgtacactcaggtgatgctactattcagtttccgccgcagaaactttatgtggaaacggttcgccgcatcaagcgcatcagccgtcagattgcaaaagaactgaacatttccggtccgtttaatatccagttccttgcccgtgaaaacgacatcaaggtaattgaatgtaacctccgcgccagccgttcgttcccgtttgtaagtaaagtgttgaagataaacttcatcgagctggctacgaaggttatgctgggattgccggtagaaaaaccggagaagaacttgtttgagcttgattatgtaggaatcaaggcgagccagttctcattcaaccgtttgcagaaagccgacccggtattgggtgtagatatggcaagtaccggtgaggtgggatgtatcggcgaagacacttcttgtgccgtattgaaatccatgctgtcagtaggctaccgcatcccggaaaagaatattctgatgtcaaccggaactccgaagcagaaagtagaaatgctgaaggcagctcaagaactgaaggctaaaggctataatatctttgccaccggaggtacttccaagttccttgccgagaacggagtggaaaacacccgtgtgttctggccgagtgaagaaggacatccgcaagcattggatatgcttcacaagaaggaaatcgatatggtggtgaatatcccgcgcgacttgtcggaaggcgagctggataacggatataaaatccgccgtgcagctgtcgatttgaatattcctctggtaacgaatgcccgtctggcaagtgcctttatccatgcgttctgcactatgaccatcgatgacattgccatcaagagctgggatgaatataagtaatcctccgcttttcagtctgttataaaataatccgcccgcaggtttctcatagttgagacttgcgggcggtgttgtattgtattaaataatgtgtatatttgcaagagtaatgttggtaacagtgacggatggtttactgaaagtttatcgataaataaaattggtggaatatggcaaaaaagaaaaaacaggcagagcagaaacaatgttctcctcaagagtatattcgcagcgggctcgtacgcttccgttgggtgactgttatgtaacttccgattggcaagaatgtggagaagccgtggcgtgtgtggtacggcttcacccgcagcatacttataccgtgggtgtttatctgatagatactttttgcttgggagtgaaagatagttactggtatttcagtataggcgaacagaattttgaagagctgatgcccgtatctgtgtgccggagatgatgacttggttggctgttcaacatcccgagcgccgtgcagaaatcatagagtggttccggactttacttgtgttttacgacgggaagctggaaacccgccaatgctgcgacggctcgcttataggaatgataaccggttttatactggacttgcatgcagaagaattgttgcctgaactgaagaaactgtatgacaccggcttggtagatgaggaatgcagcggcaactttaaaacagtagtgaaagaaatgaaagacggattgaattctttcgtagatgtttactgtatggacatccgtgaaaactataagaaattcaagaagtttatagaataataaaaggagaaggattcatttaagttaaggctataaggcaacgttctgacgggttgccttatagccttcttcattttaaatatcctcacatgaatgattctgtatgtatgagagagcagctccgatggcagtccggtattcggcatatttcggaatatggaaacgctttccatacatcttttcaagggctggaaacgtttctgcacactgaggcatacgggtaagatttcctatcaggataaagtcgtcaacatccgaatttaaggaagacaagatagctgcctgtccgatgctttgcagcaccatatggacaatgccggctgcaatatcctcggtagcagcattggttgcagcttttccgaaaatggaggcagtggcatccaagggcaatcccggaagcggatggttgcagatgtcctggatttgcaggtcgatggaagagagcgagccgcgttgtgccagatcgataatctgattgaaatcttgcgttttcagcatgagtcgggacagaccgagaatcgttcctcctccgataccgatgccacctatatgatgcacgttgttcccgtctactctgacaaacgaagtgccggttcccatgctgactacaatcagtttgttcagcttcgtcatatattgcgctcccagtccgttggcaaggaattcatccacgcgggctgtaggcagtccgtataaaggctgagtgatataggcacttcccactcccgtcagtataatcttttccacttcattcagcggaatatcattatcgtataaatattttccgaaagctccgaacagcgaggctaccgagtcggtggcacggacaaactgtggattacagatttgtccgtttcgtattcccaccactttcgtggtgcttcctccaacgtctatccctattactacgctcatagtttctttattttgggctcaaaaatacgataatttttatatacggcaaaagaaaaagtttttcctgtttgtgcttatcatttttcattttgtcataagtccgcaaacgaatataaaaatagctctatatttatccgaattaaaactttaaatcagaatgaaacgtattgtgtttttggattatgtacgcgtatttgcgtgcttccttgtgatactggttcatgccagtgaaaattattacggagccgtcggggtaggtgagatggcaggtccacagtcgtatcttgccaatgaaaccgaccgcttgtgggtatcggtttatgatggcttttggcttgttgtcttgctgagtgtgcttctggcttttttctttggataaaaccaaagaaatggcggctaaaacttgcggatgtaggcaagacaacctatctttatacgcaagaaaagtcaaagtcacagtgtggtttgtagaaatcacagtgtgacctgtacaaaccgcagtgtgatttgtataattcacactgcggttttcacttttttatacaggaatatgaattatgtttttcatcgaattgatttttatataccaaacatttaaattttaatctatggcacgttatacaatgcaagaaatgaatgacttgcaccatgagggcaagactctgctttatccgagaatgattattgagcactgttgcgagagcgatgaactggcacgcgaggtggcagaagtgacctctttcagtgagggtgaagttatcgggatgtttcaggaactttggaagcaaatggcatggcagatggcaagaggttactcagtaaagatagagggggtaggagttttcacacctacgcttgaactgaaagaaggcaaggagagagaggcagtcgatggcaatgggatgaggcgcaatgctgagagcatccgtgtgggaaatgttactttccgtcccgataagtcgttggttagtgaggtaaatcagcattgtcggttagagcgtacttcgggaaaatttatgcggtgcatatcgccctattcttttgacgaacgcctgaaactggcacagggctttttagcttcgcatgccgtaatgaccatatccgattatgctgacttaaccgggctgagccagactacggcaggcagagaattacgcaagctttaccatgatccaagctcaggtctggatgtgaaagggcgtggctcgcatcgggtttatgtgctgaagaaggaagaatgaggggaaggaatgaaattatttcctcagtaaggcttgatgtgcaaaaataaagaaagcgacctttttcaagaccgctttaaatgttttcacaacggaataatccttattgtgacttgcttcaatttaatataatgcaaatgtaggaaattatcttgaatataggtgtcttttgtgattgtttttttctaactttgggaaaacgagaaataaaaaacgatgaaaaaaatattaggtttagatttaggaacaaacagtatcggttgggctgttgttcattctgatatagatagagatggtaatgaaaacttgcttgagatatcttcttcagggagtcgaataattccgatggatgcagctacactgggtgactttgataaaggaaactcaaaatcacaaacggcagaacgtacgcggcttcgcggtgtacgcagattgctggagcggagtttgcttcgtagagaacgtttacttcgggtattgtcggtcatgggatttcttccccaacattatgcctctcaattagaccgatatggaaaatttatttcagatgcagaacccaagctggcatggtataagactcctgatgggaaatacacatttttatttcaagattcttttcaagagatgttgtcggattttcagatgtttcatcctgaactgctggaaaaagggaaaaaagtgccatacgactggaccttgtattatcttcggaagaaggcactgagtcaaaaggtaagcaaagaggagttggcttggattctgttgagctttaatcagaaacgtggatattatcagttgcgcggagaggacgaacaagaagatgtaaagaaggaagtaaagtattatgctttgaaagtggtgtcggtagaagactcgggagaacataaagggaaagacatctggtataatgtgtttctggaaaacggatggaaatatcgaagggcgagcagtgtgcctttggattgggtcggtaaggtgaaagaatttgtagtaacgacagatttggatgagaatggaaatcctaaaaaagataaagatggagaggtgaaacgttcatttcgttctccgaaagaagatgactggggattgcttaaaaccaagactcaggaatcgattgatgaaagcggaaaaacggtcggggcatatatttatgacacgcttcttcatgtcccagatcagaagataagaggaaaattggttcgtacaattgagcgcaaatattataaggaagagctttataagatattgactaaacagactgagtttcatgccgagttgcgcgatgcttctctcttgaaggattgtgcggtagaactttatccacaaaatgaagcgcatcggaatattttattaagccaagactttgctcatttatttgtagaggatattttgttttatcaacgtccgcttaagagcaagaaatcgttgattgatgactgtccttatgaatcgcatatctataaaaaggacggaaatctattaaacactccgttgaaatgtgtatcaaagtcacaccctttgtttcaggagttccgtttgtggcagttcatatctaatttgcgtatctatcagcgtgaaaagatggtaggtggttctttaaaatcggatgtagatgtgacaggagattttctgcagagtgaggccgactatgttgcactgtttgactggatgaatgatagaaagagtgttgatcaaaaagcgttcttggcttacaaaccttttggtcttaataaaaaaaatcaggtcgcttaccggtggaattatgtagaagataagtcctacccttgtaatgaaactcgatattcaattagtagccgattggcaaaagctggtgtggctaaagggtttctgactggagaaaaagaaacagctttatggcatattttatattctatttctgacaaagaggagttggtaaaagcgttaaaaacttttgctgtgaaaaacaacttggatgatgcttttgtagaagcttttgcaaagatgcctccgtttgaaaacgaatatgctgcgtactctttaaaggctataaaaaaactgcttcccttaatgcgtatgggaaaatactggtgtaaagaagcgatagatgataaaacgttaagccgtattgataaacttctgaccggtgaatgtgatgaaacgattcgcaggcgtgttcgtgagaaatccatgcaccttacagagttatcctcctttaggggacttcctctgtggctggcatgttatgtggtttatgatcgccatgctgaggctaaggatataaccaaatgggaaagcccaaaggatattgatttgttcttaagtaagtttaggcagcattcactgcgtaatccgatagtggagcaggtaatcacagaaacattgcgtacggtccgtgacatatggaagcaagaaggaagtatcgatgagattcatgtggagttggggcgtgaaatgaaaaatccagctgataaacgcgagcagatgactcgtcgttctcttaaaaatgaagatactaatttaagaatcaaagctttgttgatggagtttataaatccggagtttgagattgaaaatgtacgtccatattcacccagccaacaggatatactgcgtatctatgaagaaggagcattgaatagtgcttcagaaaaagagttggaaggtatttcagatatactgaagaaattcagagagacagatgtaaaaaaacgtccttctcattcggaagtattgcgttataagttatggttggagcagagataccgttcaccttatacgggaaaaatgataccgcttggaaagctgtttactcctgcctatgaaatagaacatgttatacctcaatctcgttattttgatgattctttcagtaataaagttatttgtgaggcagctgtaaataagaagaaagataatttgttgggatatgaattcattaagcaacattctggtgagatagtggagttaggaaatggtaatactgtttccatatttacagtggaagaatacgaacaatttgtaaaagaattttatgtaaataaccgaaagaaaaaagagaatttactacttgaagatattcctgatggatttatagaacgtcagttgaatgacagtcgctatatcagtaaggtggtgaaatctttgttgtcgaatatcgttcgtgaagaaggagaacaagatgcaatttcaaagaatgtaattgtatgcaccggaggtgtgacagaccgacttaaaaaagattggggagtacaagatgtgtggaatcgcattattttacctcgttttttacgtttgaatgcattaagtgattcttcatattatacagcggtaagtgcgtgtggcaatgtgattccagccatgcctttacatttacagcgggggttcagtaaaaaacgaatagatcatcgtcatcatgcgatggatgcaattgtgatagcttgtgctaatcggaatattgtgaattacttgaataatgcttcagcaagaaaaggggaaaagatttctcgttatgaccttcagcgtatgctgtgtgataaggtgaagaccgatgaaaaagggaattataagtggattatccgtaagccttgggatacatttacacaagatgtatatgttgcactccaaaatatagtggttagcttcaaacagaatcttcgtgtaattaaccgcacaacaaatcattattggcgttatgacgaagatggaaagaaaacccttcaatcccaagaaaaaggagatagttgggctattcgtaagccgatgcataaggatacggtgcatggggaagtgaatttacgtaagataaagacgctttctttgaaggaagccatgaagaaccctgtgatgatagttgataaagtcttaaaaaggaaattaatggaattgcttcatgtgggattcgaccaaaaggctgtcagtcgctattttgaggagcatcagaccgaatggcaaggaatcaatctgaaaaagatagaagtatattactttaccaaggacacaaacgaccgttactttgcaactcgtaaaccattggatacaagtttcactcaaaagaaaataacagaggaggttactgatactggtatccagaaaatattgttgaatcatttgttgaaaaatgataatgatgccaatgtcgctttttctcctgatggtatagaacgtatgaatcagaaaataagtgatttaaatggcgggaagtggcatcagcctatctataaggtaagggtatatgaaaaagcagataagtttgctgttggaacggcaggaaataaaggtagaaaatatgtagaagcggctaaaggcactaatcttttctttgcagtttatgaatcagaaattatagataagaagactggagaggtcattcgtaaacgaaattatgccagcattccgttaaacgtagtaatagatcgacagaaaaaaggactttcttcagcacccgaagatgaaaacggtaaattgccgatatttgtattgtcccctaatgatttagtgtatctacctacagaagaagaacataagagcaaccaggtttctttgcctataaataaggagcggatttataaaatggtgagttgtacaggaggagaatgtcattttattccatgttttgttgcggctccaatcttgcaaacaacagaactcggaagcaataataaggcgcagtgtgcttggacaggtgagatgataaaagaaatctgtattcccatcaaagtggatcgtttaggcaatataagttttaaatagtcttttatcaataaatactatgattaagaaaacactatattttggtaatcctgtctatttgtctttacgtaataatcagctggttatcaaaattccggaagtggagcgtaatgcttcacttccggaaaactttaaagaaaaatcaattgtaaccagaccgatagaagatataggcttggtagtgttggatcataaacagataacgattacagcaggggtactggatgctcttttagagaataacagcagtgtggttacttgcgacagtaaaagtatgcctgttgggttattgcttcctctgtcaggtaataccgtgcagaatgaaaggtttagaaaacagctggacgcatcactccctctcaaaaaacaattgtggcagcagactgttaaggtgaagatttctaatcaggctgccgttcttaaaagttgtctgaaagagaagagtaattgcatgtatatttgggctgatgaggttcgaagtggagattcggataatctggaggcaagagctgctgcttattactggaagaatctttttgctcatgttgaaggttttacccgcgatagggaaggggtgttcccgaataacttgctaaattatgggtatgctatattgcgtgcagttattgcgagggctttagtctcaacaggcttgttgcccacattaggtattcatcatcacaataggtataatgcctactgtttggctgatgatattatggaaccatatcgtccttatgtagatgaattggtatttcagttggtggaaaaatataagaatggatgtgaattgactaaggaggtaaaaggagcacttctttctatacctacgattgaagttataattggaggtaaacgcagtccactgatggtggcagccagccaaacctctgcttctttatataaatgtttttgcggtgaacttcgtcgtattgtttatccggaaaaataattttagaatggatcgttttagtgaatatcgcattatgtgggtccttgtattttttgatttacctacagaaacaaagaaagataagaaagctcatgctctttttcgtaaaaaccttcagaaagatggctttactatgtttcagctttccatgtacattcgtcattgtgcaagtatggagaatgcatcagtacacataaaaagggttaaatcatttttgccagaatatggtcatgtgggtattatgtgtattacagataagcaatttggtcagatagaattgttttatggtaagaaggaaaaaaagactaatgcaccagggcagcaattggaattattttagaaacaagaaatccctcttttttgagcgggatttcttgttaggaacaattctttttctttttctaaattttgctataaggaagtgattcacattggtttatgtggaatgtgctgttccttatggagcaaagttactaaattgaaagcaaatcacaacagattgggttgagttcaacaagcaatgaagctgttccttatggagcaaagttactaaattgaaagcaaatcacaacagccttttttttgctttgtctgcttcccaggctgttccttatggagcaaagttactaaattgaaagcaaatcacaactttcgattgtttccgcttcgtcgtatacaagctgttccttatggagcaaagttactaaattgaaagcaaatcacaactgttgcgacatcatcgaatattgcctgtagctgttccttatggagcaaagttactaaattgaaagcaaatcacaactcccactaaatagaccgcctatcatattcagctgttccttatggagcaaagttactaaattgaaagcaaatcacaactaaaacgaattaactatataataaaatcaagctgttccttatggagcaaagttactaaattgaaagcaaatcacaactataatcaattacataaaaaattccataaagctgttccttatggagcaaagttactaaattgaaagcaaatcacaactaaatgaacaatacataaaattaataaaagctgttccttatggagcaaagttactaaattgaaagcaaatcacaactagttcagaactttatgatttcaagatgatgctgttccttatggagcaaagttactaaattgaaagcaaatcacaactaattacgtacttaacattaatacgtaattgctgttccttatggagcaaagttactaaattgaaagcaaatcacaactttcttcgaaatattcgtccatcatgtctggctgttccttatggagcaaagttactaaattgaaagcaaatcacaacgcttctcagcttgtaaagctaattgtatcgctgttccttatggagcaaagttactaaattgaaagcaaatcacaaccgggcgctacaatcgacgaaacgcataaaggctgttccttatggagcaaagttactaaattgaaagcaaatcacaaccagattgtttctatatattcaactgcatcagctgttccttatggagcaaagttactaaattgaaagcaaatcacaacaagagtgggagaatcttacaaagtattaccgctgttccttatggagcaaagttactaaattgaaagcaaatcacaacgataaccttgttgaagttctgctgactgccgctgttccttatggagcaaagttactaaattgaaagcaaactataattatctgagtttaaaattatcctacgttattccttgaatcagaagggccccttctgaagcgtgaaaaccgatttttttatccggtggcagtttttagctgaaagatatttattacttttgtgcagaaacatttaaataaagagacaatatgggatttggaaaatggattggaggagttatgggctttatggctggcggtcctttaggggctttggctggctatgcgcttggctctttttttgataaggctaccgatttgggaaatgtgggaagtgaaacggcttcggacgatgcttatgccggacctgctgggcagcgtaacagtttcttgttttctatgctggtgatggcatcgtatattattcgtgccgacggacgtatcatgcatagtgagatggagtttgtgcgccggtttttgcggacgaacttcggagaggcagctgtgacggaaggagaacagattcttttgaatttattcgaacagcgtaagcagatggagcgaacagacccgactgcgttccggcgtacgatacgcgactgtggtgctcagattgcagcaaacttgagctacggggaacgacttcagctgttgagcttcttggtgaagattgctcaaagtgacggaaatgtatgtgctgccgaggttgaggccttgaaggaggtttcacaggcgatggcattatcagatcaggaattgggttctttgatgagtttgcggagtgattccttggaagatgcctataaagtgcttgaaattagctcttcagctacggatgcggaggtgcgtgcggcttatcgcagcttggctttaaaacaccatccggacagagttgcaactctcggcgaagatatccggaaggctgcagaagagaaattccagcagataaatgcagctaaggagcggatttataaggcaagagggatgaagtaaaccattgattttaatattcaacgtatgcgttgataaattagcaaggtgatctgttgagggttctttaagatcctgtcaacaaaacaccttgctgttttttatagctttgaaagccttagcttaaccggtagtcgccggctttctcatcgatgattttctgcaactcttctctggataatacctttgctttaaatgtaagtgtggctacaggagggtctaaggtcacgctggctgttacgccctcgatgttattcagcactttttctacccgtgagcggcaatggtcgcacatcatcccttcgacttggaatgtttctgtagaggtagtgagaggagtagaaacaggcttcggctcttcgtgaatttccaattcggatgtggctgatgctgctgtacggtctgtactcagttttttcttgcgcaggcgcaggctgttggttaccacactgacactgctcatggccatggctgctccggcaatcatcggattaaggaggaaaccacataccggatacaggattccggcagcaacaggaactcctatcaagttatagataaacgcccaaaagaggttctcgcggatggtgcgtacggtgagagttgaaagatgaatggcatcggctatcttgcgcaagtcggatgagatgatagtcatcttggctacatcgatagcaatgtcgcttccttttcccatggcgatgcttagattggcttgggcgagtgcggcgctgtcgttgattccgtcgcccaccatggctacatgcttgccttgttgctgaagttcccggatgaaatcagctttttgggcgggtagtacttctgcgcggaaatgggtgatgcctgctttttgagcaaggacggtcgcagtcttctgattgtctccggtaagcatgtatacctcgattcctctttctttcaatgtactgattgcctgctttgaactgtcttttatctggtcggttatggcagctacggcaagggcttctgtttcattggcgaaccagattaccgttttggcttctgtagtaaagcgtgaggcggcttcagccaaccggttgcttactgtgatgttgtgttcgttcagcaggcgcagatttcctgcgtaataagtcgtgttttctgtttttccgcaaatgcctgctccggtcaggctttcaaaatcggtaagcggtaggttttctcctttaagtgcactgaccactgcttcggcaaggggatgttcagactgtttttccaaactgaaaaagatatttctaagtttaggcgattcggtctcccatatcaggtcggtcataaccggttttcctttggttagcgtaccagtcttgtccagcactactgtatcaatatttttagctatctccaagcattcggcatctttaatcaggatgccgttctcggctcctttccctatccctaccatgatggcggttggggtggctaatcccagtgcgcaagggcaggctataatcagcacggtaactgcagccagtaaaccatgggtgaacccttcggaaggggacaagaaaaaccataagaagaaggtgagcagggcgatgcttaggatggttggtacaaagactgcggcaatccggtctacggttttctgtaccggagctttgctgccttgtgcttcttgcaccatgcggatgatttgtgacagcatggtttcacttcccacccgttcagctgtaaagatgaagctccctttctggttgatggttccggcatataccttgcttccggcttgtttctttacagcaaccggctctccgctgagcatgctttcgtcaacataggaactgccttctcggactatcccatcgacagcaattttttcacccggttttacctgcagctggtcgccgggacctatcaggttgacagcaacctcttgcagttgcccgttgggagtcactcgggttacagctttaggctgtagtcccataagtttgcggagggcagcagaggtatttcctttggctcgctcttccagcgtacgtcctaatagaataaaggcaataatcatgctggatgcttcaaagtaaatttggggctgaatgcctcggctgagccagaaatcggggaagaataagttgaataaactgaacaggtaggcgatacctgtgctgtttgctacaagggtatccatgttggcacttccatgcttcagttgtttccatgcattgatgtagaaatcgcgtcctaatccaaatacaactggcgtagagagtagccaagtgagataggaggcatagggcagatccataaagcacatgctgatgatggataagggaagtgaaaggcagagggctgccagtgtacgtcgttttagttttctgtatttctggaggtgagcttcttctgctttgtcgatgggattgctctgttctgtttcgatgattaaatcatatccggcagcttgtatggctgatttcaatgcttcaggagaacattctgttgggatgtattctaccgtagcggtggctgtggcatagtttacacttgccgaaattacgccgggctgacggtttagtgttttgtctacccgagatgcgcaggctgcacaactcatttccagtacagggaagctttgtctaatcgtttttggattgttcatattttacttggttagtttctcagtctgcaaaagtaatagctttcccggcaaagggttttatataatttggggtacgatttataagattcagaaaacctggtcgagcggtcggcgtttttgggatgtctgctttttaaactgactgggggtcatgcctgttacatgcttgaactatgcactgagatgtgcaggacttgaatagttgagcaggtctgctatttcgttgagtgaaagttcatcatacgcaagtagttcttttacgcgctctgttttttgtgcgatgaaatacttttctatggtaatgccgcaggtctccgagaagagtttacttagtgtgctgtagtcttgatggcagcattgggtgaggtagtctgaaagattgctgtgtaattcaccgttctggtggtagattagttcgataactgcctgctttatctgttctgtcaggcggttgcgcttgctgtcaatcagctcaaagcctacactttccagtttctgacgcagcttgtctagctgttcacttgtcagttcttcttttattgatacattgcctaactcaacaacgataggtgagattccttcatctctcaatatgttttttactacaataatgcatcggttgcataccatgtttttgatatagagcgtcattgtattccttatggttttatgataaacggaagagaagaaataaaaaaagctccttcaccttgaatggtagagaagctttttcttgtagcccgtgggggaatcgaacccccctttcaagaatgaaaatcttgcgtcctaaccgatagacgaacgggccatccttagttgcttcggcattgccgatgcgttttgttttttagtagcccgtgggggaatcgaacccccctttcaagaatgaaaatcttgcgtcctaaccgatagacgaacgggccatccttagttgcttcggcattgccgatgcgttttgttttttagtagcccgtgggggaatcgaacccccctttcaagaatgaaaatcttgcgtcctaaccgatagacgaacgggccatcctggctttgtgatgagcgatttctcaatcacgggtgcaaaggtacggattatttttgaatctgcaagctttttgagagatttttttcaagaaaaccgtaaaaatgcgtatttatccctccttaatggggtagcggagggataaatatgaggtttatatacacctgtttaaggctgttctacttctttgaggcttttttcaatctcctcgttcgacaggctgtaattgatcagattgcccgacaggtactggtcgtatgcagccatgtcaatcagtccgtgtccggaaagattgaagaggatgaccttttcttctcctgtttccttgcaggccttcgcctcgcggatagctgcggcaatggcatgacacgattcgggagcagggatgatgccttcggctcgggcaaacagacagcccgattcgaaactttccagctgctggatgtctacggcttccatcagtccgtctttcagcaactgggacacgatgactccggcaccgtggtaacggagacctccggcatggatattggccggagtgaaattgtgaccaagggtatacatcgggagcagcggagtatatcccgcctcgtcgccgaagtcgtattcaaattttccgcgtgtcagtttcggacacgaagccggttcggcagcaatgtaacgggtctgctttccttcaagaatggtgtgccgcatgaacgggaagcagataccgccgaagttggatcctcctccgaagcagccgatgatcatgtcgggatattcgcccgcaagttccatctgcttctcggcttccagtccgatgacggtctggtgcagggtcacatgactcattaccgagcccagcgtatatttacagttgggagtggtgcgtgccagttcgatggcctcggagatggccgtacccaaagaaccctgatgattgggatacttggtcagaatgtcttttccggcacgggtagacatggaaggagaaggggttacctgtgctccgaaggtctgcatgatgctgcggcggtagggcttctgttcgtagctgatctttacctgatacaccgcggcttcgaggccgaatacccgggcggcatacgagagtgcggctccccactgtccggctccggtttcggtggtcacgttgctgactccttcctttttacaataatatgcctgtgccagtgccgagttcagcttgtgtgagccgatgggactgacactttcgttcttgaaataaatatgtgccggtgtacccagagccttttccagtccataggcccgcactagtggggtacagcggtagttcttgtacatttcgcgcacctcttccggtatctctatccaggcatcgctctggttcagttcctgatggcagagttccttggcgaagacaggatacaggtcctccggtttcagcggttcacgggttttcgggttaaggggaggcagcggcttgttcttcatgtctgcctgaatgttgtaccagtatctgggtatctcactctccggtaagataaattttttctgtctatttttcataattacttacaattttctgtgaattttcaaatataggtaaaagaaagattacttcaaaggtgaattatgatttatttgctatttcatggaaatatataacaatttcgccccgaaaagcaagtcgggcttttcggggcgatgtaatcggaaaatatacaggtggttagtggacatttctccggttgagcgccttctggtagcgctgtgcgttgcgcgaatgttcggcaagcgtactggcaaaattgtgggttccggaaaaatcttccttggcacacatatacaggtaatcgtgacgggcgtaattcaatacgctttccattccctgtatggaggcaatccggatcggtccgggaggaagtccggcatatttataggtattatacggactttccacctcgaggtgcttgtagaggatacggcgcagtccgaaatcctgcagactgaacttgatggtaggatctgcctgcaggggcattcccactttcagccggttcaggtagagtcctgccaccaccggcttttcctttgtgttggcagtttcctcgtccacaatggaagccagggtagccacttcggccggtgtcagtccgatactgtcggccagtgccttgcgctggggagtccagaagcggtcgtgttctttctgcatccgggcaatgaattcttcggcagtcatgtcccagtatacctcataggtattggggatgaacagtgccggcaacgtacatgtgttgtagcccaggcggctcacataggcggtatcggccagcaggcgggcgatgctgctgctgtcggccatgatctggcgggatacattgtgtgccagccggtcgagggtccgcacactgccgatggtcagccgtacgggagtctggtgtcctcctctcaggcggttgaatatctgccaggctctttcgtcgggcgtaaaccggtaggcaccggtgtgtatctgctgtccgtagtctttgcaggaagccagcaggcggattcccgtcaggtgtctggcgtgcaactgcgtttccagtttgaagaaaaccgaatcggccgtatcgtccgtgtcgacgtagagggttccggctttttcgccggccagcggacggcacatcaaaaagaaagcggccgaccccaggataccggcagccagcagcagtccggcaatcagggtaaagcctgtttttttgtttatcttcataaattcaacg

SEQ ID NO: 1142 - DNA, 24515 bp, synthetic construct
  misc_feature 1..24515: note = Synthetic
  source 1..24515: mol_type = other DNA
aacgcaatatactttgcggttggtggccatgaaaaacatatcgtttgttgcttcggcaatatacgtcacttcttcctgaatggcactttctaattgggtgagatgacgggtgtctatatcgaacaaatattgcttgttttttgtacatagcaatatgttgttgtctcttttatccaagaaggaagcggtgataggcaatcctccgttacttttatctttgctggcaaaatcatagaccagttcgaagttgtcccgcagtgggttatacttgaatatatgtccgctttttcctatctcccacacagtgccggcagtatctatctgcaatgtgtttaaattaggaaaagagttcagggctcttccatctgctatcaagttatagtgtctgtattgtttcccgttatatttatctattcctttatgagtgagaaaccacatataccctttgctgtccttctgtatagatataactctacggctactcaaaccatcttgtgtatcgagatactgatagagttgagcaacagcaggcgttactagaataactataaggcatatagacaaaagaattcttctcataatattattgaggcaaaatccttacaaagttcgttattttcctgaacatatcaaaatctgttataaactaaaaaagcggtaatcagtctgactcaccgcttttttagtaaatataacaaatcgtttttattttttgttcatctcaacccattttctggcatttacaaatgcttccagccacggagtaatctgatcgctctttattctatcggcaggatagtaagcgttctgccaagggaaacaagaacgttccaagtggggcatcatggccagatggcggccgtcggggcttgccaaaccggctacgctgtagtctgaaccattcgggtttccgggatattcgtcataggagtacttcaataccacattgtatttgtcttcctcatacggcaatgagaattttccttctccgtgagccacccagatacctagtttgcttccgctcagtgaaccgaacattacacttctgttcatgggtacggtaacacctacgaatttagattcaaatttgtgtgaatcattatgcagcatctttgctttctttgcaaaatcggggttgatcaggtttagttcaatcatcaactggcaaccgttgcatacacccaatgataaagtatcttcgcgtgcatagaagttgtccagtgcggcttttgctttcgggttgaacaagaaagctcctgcccatcctttggctgatcccaatacgtccgagttggagaaaccgccacagaatacaatcatgttgatgtcttccagcgtttcgcgtccgcttaccaagtcggtcatggtaacgtctttcacatcgaagcctgccaggtagagcatataggccatttcgcgttcaccgttagtacctttttcacggatgatggccgctttgatgcccgacggagtacgacggtccgggttaagtccgaattgtgaaagtttgccggtgaatgatttgtcgaatacaaattccatcggttgttccttgtagttctcaaaacgcttcttggcgcatccgttcatgctctgcttgcggtccagcaagtaagaagtggagtaccatacatcacgcagatagtcgatgccgaattgataagtggcatctcccttttctaccaggatgtgacgttcgtcagtcggtttacccaacttcacgtaacctacgcctgcatcttccagtatcttcttcacttcttctttgtgcttgtccttcacctggataacgatacccgggttttcagcaaacaatatcttgataatgtcgtcttccttaatcttgttcaggctgatttccataccgccttccatgttagagaagcacatttccagcaaagtagtaatcaaaccaccggccgaaatatcgtgtcctgccataatcaggcctttgtctaccaatgtttgtacggcaaggaatgcatcacggaaatattcgggattctgaacggtcggaacgtcgtcgcctaccttatttaatgactgtgcaaaagcagaaccacccagacgcaacttgtcaaagctgaagtcaatgtgatagatagagctttttccatcatttaccaaaacgggagaaactactttcttcacatcagaaacttcaccgcctgccgaaacaattacggttcccgggctgatgatcttttctccgtcggggtacttttgggtcattgataaagaatccttgccggtgggcacgttgatttgcaaagaacagcagaagtcagacaatgctttcacggcagtgtacaagcgggcatcttcaccttcctgtgcgcggcacggccacatccagttggcagacaaagaaatgctgtccaaaccttctgccatcggagcccagacaatgttggtcaatgcttcggcaacagacaatacggaaccggctgccggattggccaaagcggcctgcggagcgtgtcccaaagaagtggcaatacctttttctccacggtagtcgagggcaaccacaccacagtcactcagcggcaactgaatttcaccctggcactgctggcgggcaatcttacctgttacggaacggtctaccttgttcgttaaccagtctttgcaggcaactgcttccaactgaagcacctggcggatatattcgtttaatttagaaatctcgtaagtaacgttttcgtagtgacgttctacggtcttgtcaatcatgtaagtctttggagaagaaccaaacatctggtctactgccaaatcgaaaggacggacaccgtcagcctgttcaaatgcaaagcgggcatcgcctgttgtttcacctacggtgtacatcggggcgcgttcacggtcggcaatcttctttacgtgttctatggccgattcgtcaatcagcaatcccatacgttcctgagattcgttggcgatgatttctttggcggatagagtctggtcaccgataggcaacttatccatgtggatcaagcctcctgattcttctaccaactcggacaagcagtttacgtgacctgccgaaccgtggtcgtggatagaaacaatcgggttattatcttcttcgcacaaagcgcgtactacattgtaagcgcgtttctgcatttctgcattggcgcgttgcacggcgttcagttcgatgcccgatgagtaacgaccggtttctacggaagaaacggaaccgccacccagtccgatgcggtagttgtcaccacccattaccacgactttgtttcctgtttcgggatgtcctttcaggcagtcgcgttgagtaccgtaacccacaccgcctgccagcatgattaccttatcgtatgcatatttctcgccgttttcctgatgttcgaaagtcagtacggaaccgcagatcagcggctggccgaacttgttaccgaaatcggaagcaccgttggaagccttgatcaggatctgttccggagtctggtataaccattggcgcacggggagaatatcttcccattcgcggccttcgtcggtgcgcggataagaagtcatataaacggcagtacctgcaatgggccatgaacccttaccaccacccatacggtcgcggatttcaccacccgtaccggtagatgcaccgttgaacggctctacggtggtagggaagttgtgggtttcagccttcagtgagatgactgtcttaatgtctttaataatgaaataatcggaagtagcgtggtctgccggagcgaactgttcaactaccggaccttcggcgaatgccacattatctttataagcagagataattttgttcggattttcggcagtggtcttcttgatcatttggaacagggaagattccatttcctgaccgtcgataacgaatgtacctccaaagattttgtgacggcagtgttccgagttgatctgtgcgaaaccgaatacttcagagtcggtcaacttgcgtcccaggtctttttccaccttcagcaagtaatccatttcttcacgagaaagtgccagaccttctttttcattgtattcctccagattctctatgtgaacgatcggctggggtttcatgttgactgtgaagatgtcctggttcagccctttgtacatgcgttgcagcatggggtcgtattcggcgttctcatcttttacggggaaatactcctcgatgcgcatcacaccggtcaagcccatgttctgggtgatttctacagcattcgtactccagggagtgatcatttctcggcgtggcccgatgaagtaacctttcaggttttcttcgttctctacagtggcttcaccataaagccagcataacttctgaatatcttcggaagccggtttctggctgacttccgttgctattacactcttagtgggtgttctgaaaaatagaatcatagcacttttatagttgttttgttaattgaaaactaatcgtaatatcaagcgtctattaataaggtgcaaagttacataaaagagacggggtatgaaagaattttgagtgtaaatataggtactttcgtaaaaaagtagcatctttgcagcatgaattggatagaacaagtaaccatactggatttattggtgaaagggcttattgttggtgtagtggtttctgcgcccttaggtcctgttggggtactttgtattcagcgcacactgaacaaaggccgatggtatgggttcgttaccgggctgggagcagccttgagtgatataggatatgccttgattacaggttatggaatgagttttatggatgattttctggcaaaaaaccaggtgttgttgcaagttgtgggcagcgtcatgttgtttgtctttggtatttacacattccgcagtaatcccgtccattccatccgtcccgtttcttctaccccaggcagttatctgcataatttcgttacagcttttttcgtcactctttccaatccccttattatattcctgtttataggtttgtttgcccgcttctcttttgtgatgccgggcagtcctatcgggtttcagttggtggggtacctggcaatcgtcttgggagcattgctttggtggttcggtatcacgtattttgtaaataaagtgcgtacccgtttcaacttgcgtggcatctggattctgaaccgggtgatcggtattgtggtgatgctgatgtctgtagcaggtttcatttataccattttaggaaagacaatgtactgacggggaggacgtatcgcatttattttttaattctcaattctcaatttttaatttaaaaaccatgttcatttccaagcaattaaaagagcagaatatagccgaataccttatatatatgtggcaggtggaagatatgatccgtgccaacggctgtgatatagagaaaatcaagaagaatataatcgatgcctatccgctgactgaggaacagaaagctgaattgacgcaatggtatgcggacttgattgaaatgatgcgccgggagggcgtcatggagaagggtcatttgcaaatcaatcagaatatcattacctggctcaccgacctgcatttgcaactgatgcgatcacctaaatttccttattacaattccgcttattacaaggctttgccctacatcgtggaattgcgtgccaaaggggcgaataaagaggaaccggaactggaaacctgctttgaggctctttatggaatcttattgctgaaattgcagaagaaagaaatcagtgaagaaaccaagaaagcacaggaagctatttcgggtttgctggctatgttgtccaattactatatcgaagataaaaagggagaactggagttctagtgcagcctcccctttcgaagggggatttaagggggatgttctctccacataataaagtaaagagatcaataaaacgaaaatgaagaatatattaataaccggtgccaacggccaattaggaaacgaaatgcgcgtactttcggctgaaaataaagagtataactacttttttaccgatgtagccgaattggatatttgtgacgaacaggctgtgatgtctttcgtaaaagaccatcatatccatgtgattgtgaattgcgccgcctatacggcagtagataaagcggaaggcaatctcgatttatgtaccaagctgaacagtgacgccgtgggttatctggcaaaagccgcagaagccaacgaggccgaactgatccaagtctcaacagactatgtatttgacggcaccaaccatctcccttataaagaaacggatgctacctgccccaactctgtttatggagtgactaaattgaaaggggaagcgaatgccatgcagcattgcaaaaaggcgatgatcatccgcacggcatggctctattctactttcggaaataactttgtaaagaccatgatccgtttgggaaaagaaagagaagcgctgggcgtagtattcgatcagatcggtactcccacttatgcccgtgacttggctcgtgccatctttgcagctataaataaaggggtagtgcccggcatttatcatttcagcaatgaaggtgtttgctcttggtatgactttaccaagtctatccatcgcatagccggtatcaccgcctgcaaggtaagtcctttgcacactgatgaataccctgccaaagcaccccgtcccaattactctgtattggacaagaccaagataaaaaacacctacggcatagaaatccctcattgggaagaaagtctgaaggcatgtattgatgaattaaatgcgcaataacctgccggaagaattattttaggcttccatagcgcagcctcccccttttaaagggggatttaaggggaatgttctccttttctcctttgcgagaatccagcattaggagcataaactccatagagaacatcccccttgcccccttaaaaagggggaggctggcgctgtaataaccaaaaacagaatataaattcgccataagacataataaagatatgaatgcagaaatagaaagaagacgaaccttcgccattatcgcgcacccggatgccggtaaaacctctttgaccgaaaaactgttgcttttcggaggccagatccaagtagccggagccgtaaagagcaacaagatcaagaaaaccgccacttccgactggatggacatcgaaaagcaacgcggtatctcagtaaccacctctgtgatggagtttgattacaatgattataaaatcaatatccttgatactccgggtcaccaggactttgccgaagatacttatcgtaccttgaccgccgtagacagtgtaatcattgtagtggacggtgcaaaaggtgtggaaacgcagacccgtaaactgatggaagtgtgccgtatgcgcaataccccggtaatcatctttgtaaacaagatggaccgcgaagcgaaagatccattcgacctgttggatgaattggaagaagaacttgttatcaatgttcgtcctttgacatggcctatcgaaagcggcccccgttttaaaggcgtctacaacctctacgaacataaactgaatcttttccagccctccaagcaaattgtgaccgaaaaggtggaagtagatatcaacacagaggaattggataatcagatcggtgctcccttggccgaaaaacttcgcggagagctggaactgattgatggcgtttatcctgaatttaatgtcgaggagtatctgaaaggtgaaatggcgcccgtattcttcggttctgcattgaataacttcggtgtgcaggaattgctggatacctttgttgaaatagctccaagtccccgtcctaccaagacagaggaacgcgaagtagagcctgatgaatcgaaattcaccgggtttgtcttcaagattaccgctaatatcgaccctaaccatcgttcttgtatcgctttctgtaagatctgttcgggcaagttctcgcgcaatacgccttactatcatgtgcgccatgacaagacgatgcgtttctcttcgcccacccagtttatggcacagcgcaagactaccgtcgatgaggcttgggcaggagatattatcggtttgccggacaatggaacgttcaagattggtgatacgctgaccgaaggtgaaaagcttcatttccgtggcattcccagtttctcacccgagatgtttaagtacattgaaaatgccgatccgatgaaacaaaaacaattggcaaaaggtattgaccagttgatggacgaaggtgtggcacagttgtttgtcaaccagttcaatggccgtaagattatcggtacggtagggcagttgcagtttgaagtcattcagtatcgtctggaaaatgaatataatgcgaagtgccgttgggaaccgatcagtttatataaagcttgttgggtagaaagtgatgatcccgaagaattggaagcattcaagaaacgcaagtatcagtatatggcaaaggatcgtgaaggacgcgatgtattcctggctgatagtaactatgtgcttcagatggcgcagatggactttaagcatattaagttccatttcaccagtgaattctgataagaaggttagtaacgtgtgcgttcaaaggttactaatgtgtggggtcgaaggttactaatgtgtaggggcaaagattagtaacatgtgtcactgaaagttagtaacttgcaaacttgcaaaacttgcagccctctctcacgcccacacacgcacgcgtatgtatgcgcgtacatatataagggaagcttaaaataacctcaaccgtgaatgtgcccaaacaaggataggctatcattttgcggtaggggcgaggggggcttacccgaatagacttcgctttatatattaatttccatataataatgtacgcgcgtgtgtgtgagcgtgagagagggctgcaagttttgcaagtttgcaagtttctccatttatatcacttcattcctctggctttgtaaatccgttcttttgcattattaatctgctggaatttctcttctgccgctttcttcacatcttcccccagtgtggctacccggtcaggatgatgtttcaatgccagtcggcgataggctgcgcgtacctcatcattgctggcagaaggttccacttccagcaccttgtaggcttcttccagtgaaccgccattcaaattcaacatggattccacttcttttatggaaagtcccatgctttgtgccacttccttcaatgcttctatctcctcgcggcatacgttgccgtcactcttggctatatttatcagaaagtccagcagttgcaaacgttgttcataagtcaggttggcagcaatttgtgcgccacattcatagattgtagttttgaatgccatcggattttgcttatccatctgcttgcgctgttcaaaaagcttgagcagtatatcttccccttggctcacggcagcttcgccgaaattagttcttagaaaccggcgtacatactccatttcactgtgcatgatgcgtccatctgcacggatgatataggaggccatgaccaacatggagaaaaggaaactgttccgttgccccatgtagttgtcttcttccgtttgtgctcctccatatatgttattggaggaaaccgtatttatatctaataaggaccctaaagcaaatcctgccaaagctcccagcggtcccatagtcataaagcccaagataccgccaatccattttcctgctcccatcgttcttttctgttttacgtttttaatgttgcaaaaataaacaatattgagtggaaaatagaattataggctataaaactgattgtactggttagtatggcaaatatctatcaaaagataagtataaaaaagcccccgttaaaggacgagggcaacctaaatgttttcacaacggaataatccttattgtgacttgcttcaaattagtacggcaaaactataaaataaatatgtaaagaacaagtgtttatcagaataatttgatagctttgaaaagttttagtagaaaatgtagtatgaaaaatataataggacttgatttaggtaccaatagcataggttggtcggttgtgaatggaattattaatgaagatggtagcgaacaacttgttaaaatagaggcttccggtagccgcattattcccatggatgctgccgtattgggagattttgataagggcaatactatatctcaaacggcggagagaaccagactacgtggtgtccgtcgtttatgtgaacgatatttgcttcgacgggaacggttgcatcggattcttgaccttcttggttttttacctcctcattatgctcaggaacttgatcgatatggaaaaataataaaaggcaaggaacctaaacttgcttggtgtaagaatgatacaggtcagtttgaatttatatttcaagattcattccgtgaaatgctggaagattttaaacgaaatcagcctgatttgatgacggatgatagaaagattccttatgattggactatttattatcttcgtaaaaaaggattgacctccagattatcgaaagaagaactggcttggatacttttaaattttaatcaaaaacgcggatattatcagttgcgtggtgaagatgaggaagaaaataagaacaaacaggtagagttttgtgcgcttaaggtggttgcggttgaagattccggagagaaaaaagggaaggatatttggtataatgttcgtttggaaaatggatggatatatagaaggacaagcaatgttccactcgattgggtagggaaaatcaaagaatttattgtaacaacagacatagaggatgacggaacacctaaaaaagataaagacggaaatgtaaaacgctcttttcgtgctcctaaggaagatgattggacattgataaaaaagaaaacagaagcggatattgatcaaacgcataagactgtaggcacttatatttacgatactctactgcagaagcctgatcagaaaattcgtggaggattggtgagtacgattgaacgtaaatattataagcaagaattgcaacagattctagcgaaacagaaggagtttcatccggaattgcaggatagaacgctgtatgctgcttgtatagaggaattgtactcaataaatgaagcacaccggaataatattgccaatagggattttacttatctatttttagaagatgtattgttttatcaacgtccgttgaaaagtaaaaagtcattgatcgataattgtccttatgaagtaactcacggtagagataaagcaacaggggaattaaaatctttccctgtaaaatgtattgctaaatctcatcctttattccaagagtttcgtttgtggcaatttataacttatttgcgtatttataagaaagaattgaagcaagatgtggatgttacgaatgagttcctgaaaacagaagaggattatatagctttgtttgattggttgaatgatagaagaaatattgatcaaaaagcatttttgaaatacccggcttttgggctgaaaaagaatgcagagcactatcgttggaattacgtgcaggataaattgtatccatgcaatgaaactcgttcattgatgttgctttatttagaaaaatctgctgtttctgccgactttctgaataaagagaatgaggaagccttgtggcatattttgtactcggttgaggataaacacgaaattgcaaaggctttacagtcttttgcctatcaacatggcttggatgaccgtttcgtagatgtattccaaaaatttccaccatttaagaaggaatatggttcttattcggcaaaagctattaaaaagctgttgcctttgatgcgtatgggaaaatattggaatgaatctgcaatagataatgtgacttgtgaacggattaataaaataataaccgacgaatgtgatgaaaaaatagggaataagataaggcaaaaggcaatccatttagccgacatttctgattttaaggcattaccggtatggttggcttgttatattgtttatggccgccattctgaagcaaaagaaataactaagtgggaaacacctgccgatattgattcatatttacaatcttttaaacaacattctttgcataatccgattgtagagcaaatcattactgaaactttgcgtactgttcgtgatatatggaagcaagtggggcacattgatgagatacatatagaactggggcgcgagatgaagaatccggctgataaacgggctaaaatgacgcaacaaatatcagaaaatgaaaatactaatttgcgtattaagtacttactcacagaattcttgaatcctgaatttgagatcgaaaacgtccgtccttattcgccaagccagcaggatctcctacgtatttatgaagatggtgttttgaatagcgtatcagaattaccggaagatataacgggcatattaaagaaatttgctgaaactgatattaagaaacttcctactcgatcagatattctgcgttataagctttggttggaacaaaaatattgttcaccctatactggcgaaatgataccattgggtaaactgtttacacctgcttatgagatagagcatgttattccccaatcacgttattttgatgattcttttagtaataaggtgatttgtgaagcagaagtcaataagttgaaggataacttgttgggttttgaatttataaagaaacattatggggaaaaagtcgaacttgcatttggaaagcctgtgaagatcttttcggtgggcgaatatgagaaatttgtgaaggataattattcacatacacgaggcaagatgaagaggcttttgatggatgatataccggatgaatttattacgcgtcagttgaatgatagcaggtatatcagtaaagttgtaaagaccttgctgtctaatatagttagagaagaaggagaggaagaagccatatcaaagaatgtgattccttgtaccggaggagttactgaccgtttgaagaaagactggggagtaaatgatgtttggaataaaattattcttcctcgtttccagcggttgaatgagttgaccggcacaaacaaatttacaactagaagtattggcaatcatgaaattccgacaatgcctttggaattacaaaaaggtttcaataagaaaagaattgatcatcgtcatcatgcaatggatgctattgtgatagcatgtgcaaatagaaatattattaattatttaagcaatgaatcagcaactgcaaaagcaaaattatcacgatttgatttgcagaagcttttgtgtgatagagataagaccgacgataaaggcaattgcaaaagggtgataaaaaagccgtgggagtcgtttacccaagatacatatttggctttggaggatataatagtaagttttaaacagaatttgcgggttatcaataaggctaccaatcatttcttgcattataatgaagagggtaaaaaaatatatgcgcaacaagaaaaaggggataattgggctatacgcaaaccaatgcataaagatactgtttatggggaggttaacttacgcagaataaggactgtatctttaaatgaagccattaagaatcctcaatgtatagttgtgaaagacttgaagaaaaaaatgttggcgcttttgggcttaggatttgatgcaaagaaaataaagaaatactttgaagataataaagatatttggcgtgatatgaatctttcaaagatagaggtttactatttcagtaaagatactaaagatagattctttgctgttagaaaactgctagatactagttttgatagaaagaaaatagaaagtagtattgctgatacaggaattcaaaagatattattacgtcatttagaactgaaagataataatccgaatattgctttttcaccggatggtattgatgaaatgaatcgtaatatcactcagttgaataatggtaaggctcatcagcctattattaaggtacgtgtttatgaaaagggtgataaatttgcagtaggtcaaacaggtaataaatcttctaaatttgtggaagcagcaaaagggaccaatttattttttgctgtatatgaaacggatgttatagatgaaaaaactaacaatgtaataaagaagaggagttatgctaccattccactcaatgttgctattgaacgacaaaaacaggggttgcctgttgcgccagaagatgaaaatggcaatgaacctatttttgtgttgtcacctaatgatttggtgtatcttcctactgctgatgatttagcaaatggggttattgctcaacctatagataagaatagagtttataagatggtaagttgtacgggaaatgaaggacattttattccttcaaagatagcaaatcccattttgcaaacaacagagttaggtagcaacaataaggcacaaagagcgtggagcaatgaaatgataaaagaaatatgtatacctataaaagtaaaccgattaggtcgtatcttgaagattggtagtttgaacattggataaatgtagttagaaaagataattgttgcatttattgcaacaactatctttgatggtaagaagtgttgaacaacttattgtcctttagatagaactattagtatattggaagtttggaaacgagtagaagaaactgaaaaacaatatatagtttttataatataatactatgataaagaaaacactttattttggtaatccggcttatttatcattacggaatgaccaattagttataaaacttccggaagttgagaaaagtacttctcttcccgatacttttaaagaacaatcggaaataacgaagccgattgaagatttaggtattgtcgtattggatcataagcaaatcactattacctctggtttgttggaatctttgttggagaataattgtgctgttataacttgtgatagtaaaagtatgcctgttgggttaatgcttcctctgtatgggaatacaactcaaaatgaacgttttcgacaacaactagatgcatcattaccattaaagaagcaactttggcaacaaactattaaaatgaagattgataatcaggcatctgtattgaagtattgcttgggtgaggaaatgaagtgtatgcggatatgggcagatgaagtgagaagcggggactctgataatttggaggcacgtgcagctgccttttattggaaaaatttgtttgcagatattgttggttttacccgggaacgggaaggaatacctcctaataatttattgaattatggatatgccatacttcgtgctgttgttgcacgtgctttggttacaagcggattacttcccactttaggaatccatcatcataatcgttataatgcatattgtttggctgatgatataatggaaccttatcgaccttatattgatgaattagtttttggtttagttaagatatatggtgccaatttggacttgactaaagaaatgaaatcacatttacttgttattcccacattggaagtgaacattggcggtaaacgtagtccattaatggtagccgtaggtcagacaactgcgtctctttataagtgttttagtggagagttgcgacgtataatttatcctgaacggtaatggatcgttttagtgaatatcggattatgtgggtgctagtactgtttgatttgccaactgaaacaaagaaagacaagaagtcttatgctgattttagaaagaatctgcaaaaagatggttttacgatgtttcagttttcaatctatgttcgtcattgtgccagtagtgaaaatgcagcagtccatataaaaagggtaaaatcattcttgcctgaatatggacaagtaggaataatgtgtattactgataaacaatttgctgcaattgaacttttttatgggaagaaaatacaaggaataactactccaggacagcaattagaattattctagaaacaagaaatcccgttttaaacgggatttcttgtttgaaaacaactttgttttttatttctagatattcttctaagttgttgaatatcaggtggtaatacgtaatcagttgttttcaatggttcaaagatactaatttgagagcagatcacaacagtgcacgccttccaaatctacacccataagttgttttcaatggttcaaagatactaatttgagagcagatcacaacactcccatacggttttttcccaatcctggagttgttttcaatggttcaaagatactaatttgagagcagatcacaacaaattgcttcagagtttccgtaacactaaggttgttttcgatggttcaaagatactaatttgagagcagatcacaacacgagagtaggggaatgttactttttcgtgttgttttcaatggttcaaagatactaatttgagagcagatcacaacaaacattagttggtgaagtgctttcaaagagttgttttcaatggttcaaagatactaatttgagagcagatcacaactcggacaagtgagagaagccttagaatctggttgtttccaatggttcaaagatactaatttaaaagcaagtcacaacactccctccaacattccaccattatgagcaagttgtttccaatggtccaaagatactaatttaaaactaaatcacccctacatattaaaaataatccatcttgaatttattttcctacgcattttctacgtgaacttttaaaatagaccatgtgacatatttgttttatttataactattatacctgtaaaaacgaaaatgtcacacagcttatttacagccttttagctcctaaaaaacattgaaataagggaagtttacaaaaaatgtataggctgttttcgcctttttctgaagaagaactgcattttattataattacttgtattccagtattttaatcgttcttgcttcgcgattttgtccggtctctatctcggcatagcgttccaactccttcaccgtaattccccgcgctacgttcggccccatctttttatatacctgtttcagcatacttttagcttcctgcactgtatactccgtgcctgcaacgaacttctgccggatgtagtcttgcatccgtcccgattgctttatattattttcgctacttagatttaatgactgtcgcaactttgtttcattataatccgcttcgcgcacaaactccgccccgaatcgctggaaacaatcataaatatattgatcagccgtagaggttatcagattatccagtatgcgccgataacgcttttgtacttttttatccgtagatttactcattcctgccatttcttccagctttcgcaaaataagttccactcgtttctttttagctagccggtgctggatagcaagacgtccattgtccgataccggcattattcgttcttcatgcaaaaagttaaaatattccgtctgttgataggcattgcatagcagggtggtagaggtatgtctttcgtgatagtagctggactctgatatttgtctctttatcgcccgtcacgctgtccgagtagcgggtcgttttgtaaagtatctcataaagttgcattaggttgattgttagtatattgcagtactgtgttgtggtagaaggactagtgtaactcacaagttactgtacagcgccacactgattgcactactgtgttatcttaattcaagcggacggaatattaaggtgtaaaggcaaaacattaacatgcccttttgatatggcttgtgttttcttttgactaatcttaagcatacctttcgtttaaacgggcgcaaagataaggtttttattttaatgatagggtataaagagtaagtcaatatcctttttttgcttgcagatgtggtgctttttcatcatttttgcattgtaaatagcaggaaataatgagaatgctattaatcaaatgtttttggttgtttttagaaaatcaactaaaaacggttgattttaataaaacaactgaatttggttgatgttacaagaagttatgttatctttgtagccaaactttgtactaaagatttatggaaataagaggtgttataacaggagatataataaagtcaaccacagtaaaaactgaatggagggaaacattattgaactctatccggagtgtagctgatgaattagcattgcttactcctctcaaacttgaattttttagaggtgatagttttcaggttgtggttgctaacccggaagaggctttgaaagttgctgtattgttgagggcaggtttgaaaagtaagacaccacaagaaagtaaaaatctgtgggatgcccgtatagcacttggaataggtgtatatcttattcgtcggacaaagtcgtggtttcggatggtgaagcttttcattattcaggttgggaattggatgagataggtaaacgaagactggcagttagaacgcgatgggaagatgtaaatgatgagctaaaggtaagtacagcctttgctgatgacattatttccggttggagtttttcacaagcatttgttatttattcagccttgttatatcaaataccgcaaagggaaatagcacatgaaatcaacaagagcgcacagaatgtaagtaaattattaggggctgcaaaagagaatctcatacggatgtacttggaacgatatgctgtgctaataaataaatataaaatgatatgaatataattattttattgaaacttttgtttgctcatttcttttcggacttcattttgcaaaccaatcgtatgtgtgaaggtaagaaaatgttaggaacggcaagaataacatttcatcttctgcatagtctgattcatgcgataattgcttatcttttagttgcagaatggaatgaatgggtgattccagtggttatatttgcaactcattttatgatggatatggctaagacagcatatatgaagaataaattaacctcgttcattgtagatcaggttattcatcttgtaataatagttgttctttggtggatgttatatggtgataatacctttgtgcgcagtttgttgaatcctatctggaattcgcctcatatttggattattattatatcgtatactcttattctgaaaccaacttccgtatttctcgctttatttataaagaaatggacgcccaaagaattaacaaatcatagtcttgccaatgccggtgaatggattggatataggaacgaattttgattttaacttttattcttacgaatcatattgaaggtgttggatttctgttggcagcaaaatccatatttcgttttggtgaattaaataaagcaaaagaaataaagataacagaatatgtgttgatagggacattagcaagttttactattgctataataataggttttatatcgttatatttcttagaataataaaaaagggtaagcaattacccttttcttgtttttggcattatccaagaatttatatatgtcataggtgaagaaacttcgatgaaatggcgcaaaatggaacaagatgaatgaaataccctcctctgattatgaaccttaaatgaagacttaagatgaatttaaggtagatttaagatggatttaaggtgattttttcttgtttctgtaaatcattcatttactttggggcaatttaaaaaacatgaagtaaatgaaaatcaaattgctagtatttgttttgttgccgttattggcagcttgtaatgggaaacgccagcaaccgcaaggcgatagtaggactatcatagaggaagccgtgcaaaaaggcgaagttttgaaaggtgaggcagtacctattgatacggcactttttcgatacgcttaccgcatgcgtgtacaaggtgataaggcggtaattcttgatctgcataatgctgactactattatcatgtatttacttatccggattttaattatatatcttcctttgggaaacggggagaggggcccggagaatccatttatgcatcaaatgttcgcttcgcagggcccaatacggtttgggtgcttgatgatggcaaaggacggatgtatcgatatagcggtatcgctaaaggagaggctcctaagctggagaaagatattctgctggataaaaaattattccgttccctcgactttgatttgagtgatactttgactgctgttattccggattattcgggagagaaccgttttagctgggcaaatatctctacaggtgatttgctacataaatccgaacaaatacctatatctgatgaaaaattactgaaagagagtgcacctgccgtggcacaaggttggaacagttttatatcattcagtccggataaaaagatattggttgccgtcactcagtttggtgacaggcttgatgtttatgatatgcagacacacaaacacatcggtaaactgggcggggatggagaaccgaaatttaatgtgagttccgagggatacggatatccggcaggtagactgtgttattatgatgtacaggacggattatctattggcgaacctgtatgccgaaccggctttttaccagcgtgataaattggaacggatggtgagtatcgttttagaaaaagaaccgaaagtgcaatccacagcagtgaagcagatgaggcaaaaggcaagtaagttgttagagaaatagaattctaaaagaaagaggatggtaaatcaaaaattaaatagtaataaatagatatttacggatttaaatttttatctttcggcagaagacagtgatgtaagtttggaatggatttaaatatataaaataggcatgatgcaaaagtggcataaagattaagaacatgctatttgttttttgacgatgaagtactttctgtaaataatagttgttgcttatataagcatggaatacgatgaaaaagaatattttgaaagtaagtttagtggctacatttgccttgtttgcaggacaatatagttctcaagatagtaatagaaactaatataatgaggaagaatatcatctatatttttttaatgatggtttgtattggatgtaaagaccaatctataactggaagtaaaccgataagaggaaccataatacaagtagattccttatttaatggtagttacttttattgtatgaaagatgattatatgataatgcgctcttatgctttagatagtcttatttatgtagctaaagttagcggggatagtttgctgtctcaatattcatttttggcaaaaggtcaaggtccactagaagttaaccatttttatacttggactgaggattctattctaactgtcattgattatacaagttctttagaaaaaggttttcaaatacattatcgttctcatgagctgttgcaatctgataagtgggagaaaataactttttctcccactgttaaggaatactttacttcgggtagttctcgctttacccttttgaatgattctataatcctatttttgggaggccgtgatggttatcctgaaatcttatctatgtatcaactgaatacaggcaacatttttcccgttaattattggcctgatgatggtttcgcaggaaataaccatttgaagcaacgtgtgtatatggaaaattcctatttgttcaaacagaaaagacagaataaatatttatatcatgctggtaatgggcgtgttgtaatgttgtttgaattaagtgatggaaagataaggaagcaacattatatttataatactttccctcaatatgaattacgaagtgatggattaaactatctagtaaagtattccgatgaaaaatcattagagtcacttgatataagtgtgacagagcaatatatctatatgatgatttcacctcataatcaagaaaaactttttaaaggatacccgtattattatggtgataaagtagtagtatttgattgggagggtaattggataaaagaattcgatacagaaatcccattttgctcatttgttgttgatcagaatgatgaatatttatattctatgggacttgatttggatacaggggaagatgtgatcgtacgatacaagattgatttatataaataggaacaaagtataggagaatagtctgatgtaaaagtaatgcaaaaaatagaaaagacaagcatatatgctctcttttctacggtggaattcttatcgtaaacaagatgaaacaatagttattaatcatctaaaaacagaatacgatgaaaaagaatattttgaaagtaagtttagttgctgtatttgctctgtttgcaggtatataaatatagtgcgtgttcctcaattgatatttgtccttaataaaaaatgaaatattgtagcatactatatatgtgtatacttagtatttattcatgcaccagtggatacaagcatggaaatgacaggtttgagtccgaatcttatcggattcacctggacttttcagatctttcggatacattgcgcttttcaaccttcattgattctgtggaagaaaaaacattagttttacctgattcattatacttgggagaagcctcgcaggtatatatagatgctgccaatattttcgttacagactggcgacagaattgtatatatcgttttgataaagaaggcaaatttataaatgaaataaattgttggggtgaagggccaaaagaatatttacgtatcaataagacctgggtacataatgacatcttgtatattcatgacgataggggaattaaaatcaattactatacattagaaggggattttaagggaaagataacgtgtaagaatcatttctccgatattgaaatgctttcggacagctcgtttttatgctttaccccaacttatattaatgaaaatccgactggtgtctggctgatggataatcaaggggagttcagacgctcattattgtcatataatggtccttatcctttcatctccactttgtggcactatttctatcgtatggaaacagggcatatcggactgttctcgccgggaactgatagtttcttatcgtttatagatgattcattaagagtttctgctactattgattgtgcccaacgcactccggcttcctttccgggtgtttcctcctgctgggatgtgaaggaggatttttacaatctctcttgattcgtcaatggggataaatggttgttgatgtgctactcacactttaaaaggagcaaagcttattacgctttgtattccaaagcagggaaagaatgtgaaatttataaaattttatctattgatgtaggttgcggccagttgcttgggcatccggtttcctctaatatgacagactgtctggttacgatagttgcaaatgactatttaagtatggcatatgatatgatgggaaaaaagatgccggaggaagataccaataattcttccttgtcttatttgaaactgaagatatattatttaaaatagactggaatggcaactttgtgcattcttataaatttgctgataaggtatcaaggcaatttttttgttgatgaagatactgaaaaaaatatacattatacgcaattatgtaaattcagatggcagcgaaatatttgctgctgtatcctatcaactattgtctattaaataaaatgaagtataaactcatgagggtcaaaaagtgggtgcaaagaaaatcattttctttgcaggaacacctattctttttcaccctgtggctttctctaaagtaatagatagaaaaggatatgatagaatctaaatagctaaaatatggtatctttttatcagcgtgataaattggaacggatggtgagcatcgttttagaaaaagaaccgaaagtgcaatccacagcagtgaagcagatgaggcaaaggcggaaaaactattggagggcgtaaaagataaggattcggccattattcatcccgaaaaagaagaatgattatggaatgtccattgccttttttatgtaaagtgctaataattaatataataattcaatgatatgcttatgatttgtccatcctattttagcaggtatttcatattatcacactatatttgcagggtaatcgattgcaaaacacacaatgtttgaaacctaaaaaagaaagtagaatgaaagtaaagtatggtatgataggagcaatggcagcactgcttgtttcttgctccggaggaaactcggcaaaaaaagaaaaaggagaattagacggatcgcctgtggtggcccataaagtaaatgtggacggacaagacttgaccgtttgcgaactgagtttactgaaagattctgtgcgcctgccattgagttatttggcagaagatttgcagatagtgaaactggaacggggagacgaggctttggtaggtagcggaggagtatatctatccgataactatatggtaataagcagaagcaataacatcccttgcaagctgtttgggaaagacggtaagtttatagggaatataggagccataggacaaggccccggagaatatacaatgatatatgatattcagatagacgaagcaagtcaacgggtttatc

SEQ ID NO: 1143 - DNA, 24512 bp, synthetic construct
  misc_feature 1..24512: note = Synthetic
  source 1..24512: mol_type = other DNA
tacaaatagccactattccaacttcctgctgtccaagtatcaggacttaagttgaccattccaaaaggcctgctcgctgatgagaaataaaaccaacgactcttatgcgtatcgacaaaaggatttacataatttaccaggcgttcttgaacctcatttttacaggcaaagaataaagggagtaaagcaaaaatcaaatgctttagcttaaacatatattaaaaggtcggttttgggttaattattaattgatgcaatgaagacttagtccttggtgacttttgaaccccaccaatctggattaggttgccagtcttccttgaacatattcatcctttgcttttccaattgggggagtctgacctcttttgccctatttaacacttcctgctctttatcagcatcatacataggatcttttttcggcatattggctgaagttctgtccagcctttttaaaagcttctgctgcaatttctttgtcatcttaggctcaagcgaagccaaatctttatgttcaaaaggatccttttccaaattatagagctcggcttgattattctcccaataatgaattaatttccatttgccctctcttatgatcgaacttggatcgcctccctggttcccataatgtggataatgccaaaaaaggcttctttttttcatggatttccctttcattacaggcagcaaacttatcccctctactctttcatctttgtctttagctcctaccaagtccagtatcgtcggataaaaatctattccactggccggataatcaatcaacatagatggattcattccgggaactttgataaagtaaggcactcgaagtcctccttcccactgatatcctttgcctcctcttagcggtaaattggaagttgaaaaattatctcctgaagctactccaccatgatccgaagtaaatactatgattgtgtttttatccaaacctgtttcttttaaggcatccatcacaatacccacagcttcatccatcgtctctaccaagcctgcataaaccgggttatcctgtacctctctgataggcagtcttctttccatagaataagcgctctcagccactccattctctatagctttctctctgtacttgccccatttctcttctgtagtttgtataggaccatgaacagcataaaatgccaacatggcaaagaaaggcttttcgtgattccctttgatatactgggcagtttcattggctagtctaatacttaggttttcaccatcagggccctgctccaatttaggatttacatagggtgcaaaataaccacccataggactacccttatcccatccacctttattaatatcaaacccatgatcttcaggataagatccttcatctcctaaatgccacttacctgcataaaaagtcgcatatccttcatccttcaaagcctctgggagtgtaataaaatcactgttcaattggtgttcataatgcggaggcaatagcttggtctccctaccataattcctccatttttctccttccggtgcacctatccaatccgtgattttatgaacatcagggctcactcctgtcatgatactggctcttgctggactgcaaaccctcgctgctgtatatccttgtacaaattgaaaagatgacctggccaactcatctatattcggactttcataaaaagtacttcctgtaactcctaaatcatgataacccaaatcatcaaccaatacaaatactatattaggcttctcttgggcacttaattctgaactcgaacctaaaacaaatagccccccaattactgaagctaaaataaatttcactctactcattctgtaatatttcaaaataatttacttatgaattaagctttaaaaatacgaataattattaaaaccaatcaatcacaaatgaaaaacaagttttcgaaaatatccttcaaaaattttatatcaaaaaacaacagttattaccaaaggcaaatggatcatgtattagggattgaaataaaagaataattcttaatatgtatatccgcaattgtaccagtaagttttaccattcagaacatttgctaaaaatagaacacatatctttcagaaacactaaattatatctgtctagatccgtggaatctcccgataaatctggacaggctgtgagaaataagtttactggtgttaaaacggataatcataattcttaatttgtttctgagaaaagctaaatataaaccagtaatttttaaacccggattatccattgggaatcgtaatacttgtgcgccgcggcgtagataggctaagcatatttccggttaaacataaaaggcctccccaggtcaatggggaagcctaaaatactaagaatcctcaatcattattaggattcattattaacgatggtttcttttttcatcttgattttctgtgaaagctcattgatagaacctttcaattcatcaaacttcttgtccattttaccatttaaggaatgggctaagtcttcaccttgcttttgaactttttttctagtttttccaccttcatctggagcatacattactcccaaagctacacctgcaagcaatcctgctgctacgcctaacaatacttttccttcacccataattttacaaattttagtggttaacaatttgattaaacatttatttcatcaaaacatctgcttaatataaaaatcaaatatcttgacactcattaacttcgcaacaaccatgctaaactacctaaatatccagttttaaatgattattcttcgtttccctctacttgaaatcggtctaatccctcctctaccaattgaaaaataatcctttttaattttctaaaatccttagcaaggatggataataaatattctaattcttcatgattggaaacaatagtttcgctagctgaattattatttttctttaattgctcactaattgctttcatttgacggcctatcttaaaatcaatttcctcccttcttctatccaaaatcataagcctattctcaattcggcgcacatggttaatatcaatatcctcaataaaacggtagaaatacttccccaatagccctcttaggaacctgacttcatctttatagaaagccatatctgaacgccaatgttcccctagcgcataataactcgttaaaacatccccattaaggttaatattaaaccctattcctgtccgcgttcctactagccctgccataaccaaagcttttgctcctttaaataacttccgctgtcaatacaaccaacagcattatatattaatttgcacaagccattaaaatcagcttatacccttaacatcaaagaatataatcattctttgcaccaggcaggttggacgtttgcccattcctgctttgctttatcttaatttaaccaaatacactgctattggcaatatttttatgaaaaatatccctatttctttatataaacctgccctctaaacatttagctcattaggacatggtttattcttatcccaacaatccaaattaaacgcagttacttcagctattttctccaaggcttctttggtgagaaaagcctggtgactagtaatcaacacattttgaaaagtcaacaaacgagcaattacatcatcttgcaggatatcttcagaatgatcttcaaaaaacaaatcctcctcctcttcatacacatccattcccattgcccctatttgtccattcttcaacccctctattacatccacagtatttactaatgccccccgactggtattcacgagcatcactccttttttcattttcttaatactttccttattgaccatatatcgcgaggctggactaagtggtaaatgaaagctgatgatatgggacgattgacaaagctcctcgaaatcaatatatttgacgccatatttctttaccagtgactcattcacataggggtcatacgctaaaatatgacagccaaatccatgtaaaatagcggctactttacttcctattttccccgtccctactatcccaactgtctttccttccatatcaaaccctactaaaccatccaaagaaaaattaagatccctaatacgatgatgagccctgggtaattttcgattcaaagccaacatcaaggcaacagtatgttctgcaatagccgcaggggagtattctggcaccctagccacctttatacctaattcttcggctttttgtaaatccacatgattaaaccctgcagatctcaatgccaaatacttcacgcctaaacgacttaacttttccaataccggtgccgaggcatcatcacttacaaaaaccgatacagcatcgcagccttctgcaagtcctgctgtattggtagttaggcgagtttctatcaaacgaagttgatgattgtgaacagcttcttctagatagctttgttcaaatttatgggcactgaacacacttactttcataggatgagattaaaatttatattggaaccttgtataaatcaatcaccaaaaatggaatcctgaccttaaagattgtttataaaattaagtgatttttgatggcatgaaaatgacatttgtcaatagacaaaacattattctacaggtcaatgaaaagtatggctaaaaaaacaaaaatccatactttttaaattaagtatggattcttataatatcaataatttaccttagaaactcctatagattaggactcattacccggtcaactgccaggtgtagcgatttgaaagaaaaaggtttttgtaaaataaaactatttggaatcctttttatcagcttttttatagattcactggtttcatttgtacttaaaaacaacaaaggacaagaatgatcttttctgatatccctggcagtttcgatgccatcctttcccccattcaatcttgttcccaaaatcacaaaggaaggtgaaaattgattaatcaatgcttttgaattgatccccgaaccaatactgcaaacctcatagtccttataactaaggatttctttaatattgtcagctagatcaaaatctttctctagaattacgactttagacatagtttttctggtgtgtgtggcaacagattttataaaagttattaagtgaacaattttaataccaaattgtttgctggtgagacaaacgcaagtatcaaaaccctataatcacttgatatacaacacttatgatctaaatttatttcaaatttagataggaaaggtattacaataatttcataaagccaaaattaatcaacctacttattttatagattttattcagtgctcaacaaatctaacatgatatttttaaattaaccctaaaaacctgcagcccaatcatcaccgcgtggatctccagcaccctcaagaagtcctttttcgtttacgagtatggcatccaccctaccaatactacctctttctttaatagtatgtcccatttcttccaaagcagatttagtagtttcctcaagccctcccttttcagggaaaataaaattaggtttccattgatgatggacccttgctgaggaaacagcttccctcatgtccattccatgatctacgacatttaatatagtctggtacactgaggtaataatcgtgcttccaccaggagtccctactaccataaacaactctccgtctttttctagtatagttggcgtcatagcacttagcatacgtttttctggctgaatcgcgtttgccttcccccctaaaaggccataaacattgggaactccaggtttactgctgaaatcatccatttcattattcattaaaaatccagcacctgtaacaaataccttcgacccatatccagaattgatcgtggtggttactgaaaccgcattcccattggcatctacgatagagtaatgcgtagtctcttcactttcctgatgatcaaaattcatagccaatacttgctcactatccgtagcattagttaaatggatttcatcgaccctactttttaaatatccatcatccaacaaatcatccttaggcacatcccaaaaatctgaatcccctaaatgttttgctctgtctgcataaacccttctttccatttctgtcatcaaatgaatggtcttagcttgatgaaagcccaaatcacccaagggaaagtgagctgacatttttaatagttgcattagcgctattcccccactactgggaggtcccatactgtacacctttaacccccggtattcacctgttatgggcgttctccatttggcttcatacttggccatatcctccaattctatgattccatttcctgctttcatttctgccactaaaagttgggccgtttctcctttataaaacccatcccgaccattatcctgaatccttttcaatgtgcttgccaggtcttgctgaaccagtaaatctccctcctgccattttctgtcaaaccttaccaaaggaatattagtactgtcctgattctgctcgatgaaaaccgatttatatcgattataatttttagcttgcttctctgttatgtaaaagcctttcttggccagtttataagcgggtgctatcagctcctttaagggaacagagccatactttttatgggcctggatcatcccatccacggaaccaggaacacctgaagccattggaccggccaagctcaatccatctataatttccccattttcgtcttgatacatttcctcaaaagctgcaagaggtgccttctccctaaaatctaaactggacacttcgccatccacaggccggtaaatcataaatcccccgcctccaatatttcctgcagcaggatataccacagctaatgcaaaatgaacagctaccatggcatcaatagcattccccccattctccaaaacctctattccaaccctgcttgcttcgggatgagcagttaccaccatggctttattgccaatcactgtttttccttcttcataactttttgaacaagcaaaaaaatggcttacaaaaactgctaaaacaaataccctcactaaataaaaccgggaactgtaaaatcttttcgtggacataaatcaaattttcttttgtaggatcaattattcatctctttaatataggtcagcttatccagctttttcctcctaaaaacaaaatacatcaagccaaaaccaaggccatatctcacattaaacgcatcgaataaaatagtacttcctcaaatataatatcaaacaaataatttttcattttccttgtcatatcgtaaacttactcaagtattcgactacacaaacataatgaaacccctattattcaaaatcgccaaaacagaggaagaatctgtcagaattctgcaagaagattacccttatttttatgataatcttcattaccattctgaaacacagatcatggttattttggaaggagagggcacctatttcgttggtgatgccatcggtaatttcaaagcgggtgatatttttatcttgggttccaatctcccccatttcttcagaagtgacaaaatctattatgaagaaaacaccagtttaaggtctaaaaatatttcaatcattttttccttagaaagcctaagtgaaggttttttggaaatacctgaatttcatgccatcaaacaattattatattacagtaaaaggggcttgatggtccatgggaatgctagaaataaactttttaaatctgccaataaattggcgagcaaaaaagggatcgatagattgatttatctcctcaaacaactacaaaaattatctaaaagcaatgaactgcttgccttaagccatatagattttgatcatgaacccaagcccacagacaccaagaaggtgaatattgtcatcaatttcattatggaaaattttgctaaggacatatccctctcagaagctgcagatgtagctaacctaagtatcaacgccttttgccgttttttcaagcagcatacaagaaaaaccttttcccagttccttaatgaaatccgtattggccatgcctgcaaacaactcatagaagaaggatatagtgtaaaagaagtggcatttgatagtgggtattataatatttcctatttcaatcgtcaatttaaagccattaccggttataccccctccgaatacataaaaacccacaaacaaaatcataatagggcaagttaacttaaagctttatggcatttcataaaattttaggactaaagcattccaaaaaataaggtgataacatcatttgagtttctcagaaaaatataaatacatctagctttttgctttaagaaaacacccattttcaagatcaatattttctgataatttatattcacttttaacactccactgggcagtactttttactgtctagtgaagcatgggaaacgcgtgatttttatacctacaatctacgacctccctccaacctttgtacaattactcctggatatatccattgccctatttactttctcttggatcaaacatgatttccacccaaattatcttcggattttacacggtatgttccgagggtaatccgaaggagatcctaaggtgatccctgagtgatccgaagaatattttgttttacccctaactaaggttaagacagaccaaagtcagtataaacagaaacaggcataatagaccgaaccacctaggtagaaccatcaatgagacaggaaactgttggacgtttaattacaattttacaagttcaaataaggactgcttgaaaagctatcaacgggatgatttattttggaatcattaaggactgtatatgaaaaaagataaagctcgtgatttgtactttatacagaattgatcaatcttaataaaaatagccgtctctaattactcctatcccagctattcggttagcacacccttcagtcattttttagctcttttcacagagaaccatttataacttattaccttatttgattaattcatttcctaaaaaacgatattaatatcaaaaaataccataattaaggtatttcttgtcagctttttaattactattttagttgtgattaaaatgtaaaactattttcctcattccacacactaatacctaaaatgccattccttttaactaatagacttcctattttggttatgattttttgctatttcaagcgaaacaactttgtaccactgataaaattgaacgaccacaaatactttaatttcatttttaggataaggcatttcctaatgaataaagtttatcgcattgatctaagcaataaacagtcaagctcatatttcaaaaagtacggttaccatagaattttcttagatccaaattctatgttagggattttcaaaaaaaaacagaaaataaaaaagccccgaagatagtcgaggcactaaatgttttcacaacggaataatccttattgtgaattgctttcaggcaagaaagatacatgatcttcccaaaaaaccaaagcattatatgaaaatagacagaaaagaatttttaaaagtcgtcggtttagggagcgccaacctaattctccctccattagctgctccatccaacttaagtccccaactactttcccagtcaataaaaatttatgacaactatatcaaaggggtacaatattatgatttgggtaaatgcatgaaactgataaagccaggagataaagtagacctaaagagatttgcagatcataaatacgatcgctttgccattagcgtggaatgggagaaatatttcttgggctatctacccgcttatgaaaatattgttttggccaacctgatggatgccggtggaaaactagaaggaatgatcacttcaaaaggctctatctatgaagtcagcattgggatttggacagaaataatcatcaattccaatgccgccacatcagaaaaactcaatgaactaccagcagataaggtagatgatatttatagaagcaataatttttatgatataaaagtaagataatatgaaaaggatattaggactggatttaggaacaaatagtattggctgggcattgatccaacacgactttgaaaacaaagatggtcggattcaagatattggcagtcgcattattccaatgggccaagatattcttgggaaatttgaagcgggacaatctatttctcaaacggctgaaagaactgactacagaggcattaggagactttaccaacgagacaaattacgtagggaacgactccaccgtgttttaaaccttttaggtttcctaccacagcattatgctgatgccatcgacttcgataggaaattgggacaattcaaaccagaaactgaagtaaaactaaattatataaaaaatgctgatgggaaatatgaatttatttttaaagattcatttgacgaaatgcttcatgagtttaaggccacacagccccacatatttcaggcaaaccacaagggaaaaacacctcaaatcccttacgactggacaatttattatttaaggaaaaaggcactttcaaaggccatttccaaagaagaattagcttgggttattttaaactttaaccaaaaaagagggtattatcaacttcgaggggaagatttggatgaagataagaataaacaattcgtccagttaaaagtaaaagaagtaatcgacactggcgaaaaagtaaaaggcaaatcactctatgatgtcctctttgaaaatggatggaaatacgaccgccaaatcacaaaaacggaggactggatcggacgcacgaaagagtttatcgtaaccatttcaacgttgaatagtggtgagactaaatattcctataaagcagttgattccgaaaaagattgggctgcaattaaggctaagaccgaaagagacattgaaaattcccaaaagacagttggggagttcatatatgaaacattgcttgatcgtcccaaccaaaaaatcaggggagagctggtaaaaaccatcgaacgaaaattctacaaagaggagttcaaaaaaatcatttcaaaacaagtctccttacaacccgacctattctctcgggaactttaccaagcctgtattgaggagctttaccctagaaacgaggcccatcaatcacagctcaaggatcaagattttatccatttattttcagaagacatcatcttctaccagcgaccgctaaaaagcaaaaagtctgatatttcggcttgtccctatgaattcagggtgttcaagaaaaaagatatcgaaacaggagaaaccgaaatcgtccatcaaggggtcaaagccatccccaaatcccatcccctattccaagaattcaggctttggcaatggctccataacatacgaatccatcaaaaaaacagaactactggagacaaaatcgaaatcgacgtggatatcacttccgaactcttgaagactgaagaggattggtcaaacctatttgacttcatgaccagcaaaagggaagtcgaacaaaagcatatcatcaaatattttattgataaaggactactctcaaacaacgctaaagacaactaccgctggaattacgtagaagacaagaaatacccggcctatgatacccgctcccaatttatatcgcgcttaaagaagataaaggggatagagcccaccgattttctcacagaaaaaacttgtttaggcaaaaataacagcggccaaatcctcagtagagaagaacagctctggcatattatatattccgtaacagacaaaaaggaataccaaagtgcattgggaaaatttgcccaaaaacacgggatcgatgtagacccattcgtggaagccttcattaagtttcctccttttgacagtgattacggcagctactccaaaaaagcgataaacaaactccttcccctcatgcgacgtggaaagtattgggatgaaaacgccattcttgacacttcaaaagaacgaatagatgagattttggaacgagtcaattcattgaagctgaaagagggctactcaaaaaaagagctagcggagaaactggaaaaagtaagtgatgatgacatccccaaacaggtcgtcaaaagcttcgtccccttatcaaaccaaccatataccggcttaaacacctatcaagcatgctatgccgtgtatggccgccattccgaagtcggagacattcaatactggagagcagctgaagacattgatctatacctaaaaggattcaagcaacattctctaagaaatccaatagtcgagcaagtagtctgcgaaaccttgagagtcgtgcgcgatatctggaaaaaacaaagatctgaggacccccactttcaatttgatgaaatccatttggaattgggcagggaaatgaaaaattcagctgagaaacgaaaacaactgtctgataaaatcaatgaaaatgagaacaccaaccatcgcataaaagaaattctaaaagaactcacgaatgaccccatgattgaaggagatgtgcggtcttattcccctggacagcaagaaattctaaagctatatgaagaaggtatttatcaaaacccaaacacaacatatgacaccgtaagtgaggatgaaatcaaaaaaatcagaagaaacaacaatccttcaaaatcagacattctccgctataaattatggttggaacaaggctacatctccccctatactggaaagccaatccaactttccaaactcttcacaacagcataccaaatagaacatatcatccctcagtcccggtattttgacaattctttcgggaataaggtaatctgtgaaagtgccataaatgaagacaaggacaataaaacggcctacgaatatttaaaagccaaaggaggcagtatcgtcgatggacatttattatttaaactggacgaatatgaagcccatgtaagccgctatttcaagcgcaataaaaccaagcttaaaaacctactgagtgaggatattccagagggatttatcaaccgacaacttaacgacagcagatacataagtaaactggtaaaagggttactgagcaatattgtcagggaaaacaatgaaaaagaagcaacttcaaaaaatctaatcccagtaaatggagccatcacctccaaattgaaaaatgattggggattgaacgacaaatggaatgagctgatcacaccgcgatttcagcgattgaatgaattgacaaagtctaaaaattttgggttttgggataaggatataaacgcctatcgaatccaagtcccagatgaaatcagtaaaggattcaataaaaagcgtatagaccataggcatcatgccttggatgcgctggtcactgcttgcactacccgaaatcacactcactatttaaatgcactaaatgctgaaaaaaagaatcataatttaagaagtaaactattaatccaaaacgaacatggccattataccaaaacatttcaaatgccatggagttcattcccggtggaagccaaaaacaaactggaaacaaccattatcagttttaagcaaaatctgcgggttataaataaagccaataataaattctggtcatataaagatgtaaatgggaaccttaatattggcaaaaatggcaaaccggagaaaaaactcagaaaacagaatatgggtgatcactgggccataagaaaatctctacataaagaaactgtatcgggcatagtaaatggaattgatgtacccaaagataaaatagctgtttccgtccgtacctccctgacagaaatcaaaacccaaaaacacattgataaaatcgtcgattcccgcatcagaaatatcatcatccccaaccacctaaaaaactacatcgatgaaaaaggtaaaataaattttcccgaagcatttagccctgccgggatagaggatttaaatgagaacatcacccatctaaacgaagggaaacctcatcaacctatattaaaagtcaaactttacgaagtaggtaataaattccaaataggtgaaacagataataaatccaaaaaatatgtagaagcagccaagggcaccaacctgttttttgccatttattgggatgaaaaaaaacaaaaaagaacgtttgaaacggttccactaaatgaagtcatcgaacaccaaaaacaggtggcgcatttaccaaaaagccaaagaacacctattcagtccaacccaaataaaggaaagcttctttttaccttgtcacccaatgacttggtctatgtacctaccgaagaagaaaatgaaaatcctggtttgattgacttttctaatctgaataaagatcaagccagtagaatttataagatggtgagcagtacaggaaatgaatgccattttattcaagctagcatagcatctttaatcaaaaaatatgatacgaaaagtagatttggagaaatgggaagtttaaataagcttgaaatcactattgatattgatgctcctattagaataaaggagaattgtatcaaaataaaagtagacaggttaggcaacattcagaaatctatcttatgatcaaacgcacgcttttcttcggcaaccctgcctaccttagcaccaaaaacgagcagctaattgtcagtttcccggacgaccaacctgataaaacggttcccatcgaagacattggtatggtcgtactggaaaatccacaaatcaccatcaccaatgggctgatgggaaaactggtcaacaataaggtagccctggtaaactgtaatgggcaacatcttccagatggcctactcctccccttgcatgggcattcggagcaaaccgagcggatcaggcatcagatcaatgccagtcaaccattaagaaaaaatctatgggctcagaccatcactgccaaaattcaaaatcaaggagcactcttggcagaaagggatattcctattcaaaaattaaaacatttggccaaatcggtccaatccggcgataccggaaacaacgaggctcaggctgctgcttattattggcagcatatctttgacctaccagattttaaccgagagcaaaaaggactgccgcctaacaacctcctgaactatggctatgccatattgcggggaattattgccagggcattggtcagctctggcatgctgcccactttgggcatctggcatcgaaataaatacaatgcctattgtttggctgatgatatcatggaaccctatcgtccatttgtcgataaggtagtacggcatttggtagaaacaaaagaccaaatagatgaactggacattcatttgaaaagagaacttctcaccatccctgcattggatgttaggattgacgggcaaaaaagcccattaatggtggctgccagtagaacgaccaattcattatttgaatgctttgcgggcatcagtagaaaaatcatatatcccgaatatggatgaaagcttttattcaagacttaaccaatatcgaagtttgtgggtattagtattctttgatctccctaccgaaaccaaaaaggatcgaaaaatagccagttcctttcgtaaaaagctgctggatgatggcttttctatgttccagttttccatctatatgcgtttctgtgccagtcgtgaaaatgccgatgtccatatcaaacgggtaaaaaagaacctaccgcccaaaggaaaagtgggcattatgtgtatcacggataaacaattcggtatgatggaacttttctatggtaccaaagtcgccgaaaaagaaacaccttcccaacaactggaattattttgaatttgagaaaagatatctgacaggttttaaaaacctgtcagatatcttggcttttttccaaaaaaaccttccgttttttaattcaaaaaacacacataaacaacagcataccaaccacttgacatggggtatgctgtgattaccattgcaaggtacaagtctgaaagcaattcacaacgctctggggacaacccataggagcacagcggctgtgattaccattgcaaggtacaagtctgaaagcaattcacaacacttgtcaacaaaaggttgaccgagcacatgctgtgattaccattgcaaggtacaagtctgaaagcaattcacaacatcaagagaagaatggaatgattacagagagctgtgattaccattgcaaggtacaagtctgaaagcaattcacaacagccggtatctcttgatgaattgcatcagagctgtgattaccattgcaaggtacaagtctgaaagcaattcacaactctccatggatagtttagaaaatgaattccgctgtgattaccattgcaaggtacaagtctgaaagcaattcacaactgctttggccaaaggcaatcgggtaagtccgctgtgattaccattgcaaggtacaagtctgaaagcaattcacaactgggtgtaatcaattgagttggtgttttttgctgtgattaccattgcaaggtacaagtctgaaagcaattcacaacggtttttagccttaaaatcattgggtgcccgctgtgattaccattgcaaggtacaagtctgaaagcaattcacaacaaggttgacatcatagtaaaatgacctgtcgctgtgattaccattgcaaggtacaagtctgaaagcaattcacaacacaaaaacaaaagggttgatacttgtcgaagctgtgattaccattgcaaggtacaagtctgaaagcaattcacaacatagtcggggtaacaaaatatttcatcctgctgtgattaccattgcaatgtacaagtctgaaagcaattcacaacaaggaaacgaagaccaaaagaccgaattcgctgtgattaccattgcaaggtacaagtctgaaagcaattcacaacggacttcaggggagaggtaaccaggtcattgctgtgattaccattgcaaggtacaagtctgaaagcaattcacaacaggtgatcatggatgcacctcatgcggcacgctgtgattaccattgcaaggtacaagtctgaaagcaattcacaacggtggcatggtcatattctacgatttcaaagctgtgattaccattgcaaggtacaagtctgaaagcaattcacaacttccagcttttggaaggtggtggctttgttgctgtgattaccattgcaaggtacaagtctgaaagcaattcacaacgtagccttgatgatttgttgaatgtcgtttgctgtgattaccattgcaaggtacaagtattcgtgaacttttgtttttcaatggttctcatgaatgcttacgcatttctgaaagcaattcacaagaccatcctcttacaccaaccatatattgcgcctcaaacaatacataatacactgtccgagttagcaaaaacaacggtaattctccaaattaattccctctgcctgaaaatagatcctggcacaacttgaaaaatctgatcttgtcttttatcggtatttaagccataagctcacaaacatgaattcatcttcgatttatcttatatcttggttctttgttctacttatggcccccataaatgctgacgcatttccgaagacaatttaccaaatgtacacgcggaaggattcgaaccctctccctgtgatggtcattacaaggtaccaaagctctcggcactaactttcagagatgttatgtttgaaatttatcagaaacattccttggtaccttcatcgatcaccaaaatcctaagaaaaaccagaatgactttgaaatgtccttcaaactatcattaaagtcatagcaaagctagggtaaagctatatcatagctggggtaaagttagggtaaagtagggtttagctagccaaatcaaaccttaaacgccaagccacaaagcggatggccagggaaaaattttctatcaacttgtccatccggattaacttaaacccgccttatacattaacctatctattacgacctgaaactacttaaaaatcagtcgcttcgctgctgttttcgatttcaccataacgatgctatgattcaatctccaaacagcctgattttcttgtagtttcaattctcataacgattcctaatgcataaagcgggttaaaagcaaaacattcacctagcatatcgatccactgcaaatccttccaactttacttctccttctttccctttgccaagatctgcaaggatttttccagttgcaggagctaaactaagccccatcatactatgtcccgctccaaaagccacattcttccatttgggtgccttaccgatatatggcaatccatccggggaacaaggccgcattcccttccatatttggtcttcctgaggaaattccgccttaaattcaggataataggctttgatggattcaaatatccccttaaccctgttgaggtttacatgatcagccttattggatatttccattgttcccccaaaacgcaccttttctccataaggactttgtgaaacccttgcctcggtaagaatacttgattgcatcaattgaggattattgggcaaaacaaagctatagcccttccctcccatcataggtaatttaaaaccaagcattttggctatctcgccggaccaggaacctgcgcagaccatcacttgcttacagtcaattttgccttctgaagttattacagcttttactttatctgctcccttttcaaatccagtaatacgcacacctgactttaggaccacaccattcttaaccaaatattgctttaaatactggtacaagtcctttggagataaatgggcatcatcaggaaaaaatattccacctcgcacatctacttcctgatgcggttcgagttttcggatatcctccttacccagcacctccacctctatcccacttttcttggcaagatgactaaattcaatctcctcattttctccttccctactcttataaagcatcaaaaggcccctgtcctgaaaattgatattaccattgtcatgttcggcaatgaattccatatacaattgcttgctgaacaaacttatcccttttaaaaagggaatggatttttgaacatgctttgaattggagttcctataaaacaacaaacaccattcaattagctttttgtccagcctcggctgaatataaaaagggctttttgaagacagcatccatgatattcctttggaaatcataccaggagaagctaatggcactatatgacttggaacaaccattcctgcattgcctgttgagcaattctcttccatatcacccttatcgatgacgatcacttcttctccttctttttgaaggaaataggcggtaaaaagaccgactattcctcctcctataacaatcgttggtttcataaacgctttctcatcattatttgaagtatttagaaaaattccgaatactaaatgggtttttattcaaaaagggttactgtcccaaatgggataaaagacatttcaattcttgatcgtattgaaccatctgtctcccatctcatgtctcaagtctatatcaaatcacttgaaaaccatccatatagggatcctcgtcatccaaaaagatggtattataacctgtgattttagcccaaccttcaatagtaggtataatagccggaatatctccaacttgggtggtattcactatttcaccagtaaattttgaccctatataactttcattgacaaatggttgatgggcctgaagtttacctctcgcgtggagttgggccattctagcggaagtcccagttccacatggtgagcggtctatggccttatctccgtagaaaacagcgtttctactgtctgaattttcatccaaagttttaccaatccactgaatatggctaagtccattgatccttggattttccggatggataaactcatacttctcattgatggcctttctcaatttccggctcatcacaataagttgttctgcactaaaatcctgaagtccagtaaagttcccctgaggatctatgatcgcataaaaattcccgccataggaaacatcaaaactcaattcacccagttcttcacaatggatactcaggtccttggcactgacaaaactggccacattggtcagctttactgatttaacatgctttccttcctgtacatagctcaccaataccaaacctgctggagtctctagccttagtttgccaggtgttttgggcacaatcaagccctcctcaatcgctactgttactgttccgatcgttccatggccacacatgggcagacatccactggtctcaatatatagcactgccacatcattttctgggtcatgaggcggatagagcatagatccagacatcatatcatgccctctgggctcaaacatcagccctctgcggatccaatcataatgttccatgaaaaactgtcgtttttcgaacatattttccccttccaaaaagggaatcccacctgtaacgacccgcacagggttgccacaggtatgggaatcaatacaactaaatgttttcttcattcaagtatttagaacctaatattaagacaccaatttaccatccattgttctaggaatccctagcggattagcttcttttaaagcctcgggtagtaactcatcagggcaattctgtaaagcaaaaggtcttacaaatcgcttgatggcataaactcccactgaagttgttctgctatcagtagtggaaggatatggccctccatgttgcatggcatagccgacttccacccctgttggaactcccccaaacaacagtcttccacatttttcctgaagagtgctgatcaaatcatcttgccctactaactcagattgatcagcccaaagggttatggtcaattgcccctgaagtgattgggcaacttccatcagttcctcctggctgttataagaaaccacgattccaaatggaccaaaaacctcttcttgcaaagatttatctgccaaccatgatgttgtatccgtcaaggccaaagcagggtatcctttatctgattgctcggcttttttggaccaagtgacagtactaagcttttccatttcagatagactttcactgtagacgcgctgaataccggcattcaacatcgtctgaccttcaatggcttccaatttttctcctgcagtttgtgcaaatctttgggcaaatttttcaggaataaagatgaccccaggattggtacaaaactgccccactcccatggtaagcgactgggcatacagtgctgccaacttatccaaatcacccaaaggtttctctgtgacaaaaatcggattggtactgcccatttctgcataaactggaataggttcctcacggctgttggccaaatcaaacaaggctttgcctcccttaaaagagccagtaaagcctactgccttggtcaaaggatgtttcaccaagtcctgtccttctttgatacctccttccacgtgttggaagactgctgttggcaaaccagatttttccaaagctttcttaatagctccatataccaaaagagaagttttgggatgggatggatgacctttataaactacaggacaacctgctgccaaggcagaaacagtatccccaccagccgtagaaaaggccaagggaaaattgctggccccaaagaccaccactggacctatgggcaccaaatacctgcgcaagtcaggcttaggtactggagtcctatcaggatttccatgatcaatagtcgcctcaagccaactcccctcttcaatataatctgcaaaaaggttgatctgtcccgtggtcctacccaattccccagtaattctaccttcaggcaaatgggattcttcacaggctgttgggatcaactcctcttttatttcacccaaggaggcggccatgtttcttaagaaactagctctttctgccaaggatgtttttttataagtagtaaaagcttgagcggattgttctaataccttattaatttgcattatacgcttgtttttaaagatgctagttctggtctgttatcaataccagtttgaattatcttttcaattctttctctttcctcacctatcaaagtcaatctaggagcccgtacattttcagtacctataccaaccatttgttcagcaagtttaatgtattgtaccaatttaggatggatatccaattccaagagtggaaggaaccatctataaattgctaatgcttcatctattttcctggctttgatcaaatcaaatagcactacagtttccttagggaaagcacaaaccaatccagctaccaacccatcagctcccatcaaaacactctccatggtgagggtatccactccacaaaggattttgtatctgtcaccaaatttggtcttcattctggtcacattggaaacatctctcgtagattcctttacagcttggatattctcgcatgccgtcaattcctcaaacatctccaaagtcacataagttttataatccactggattattatagatcatgatcggtaaggtggtcgcatccgctacggctttgaaataggctactgtttctctatgatctgatgggtatctcattggaggcaataacatcaaagcttccacccctaattcctctgccttcttggcccaatgaatggccttggctgtagctccttccgcaatattcaatatcacaggcactctccccgcaagcttttcaacggtcttttgagtcaattcaattttctcatcatcttctagcacacttgactctccaagcgttccacctaagatcacaccttttactcccccttcaacctgcgcttccagattcaagaaaaacgtatcataatcgatgctgccatcagcgtgaaacttagtagtgacggcaggaaaaactccattccaattcatagttttcaagtttatgtttgaaacaaaggtagtatagctcaaaatgagaatattgcaccaaattagtgattaatgatacaatattgcttagcctgatacttgattgacattttacgagtacaaccaagtataaattattccacattatcgatgaatttggaatttaagcttttatcagataaaaaaatcactgatttttgaatccctgataaatctttaccatccagataatttttttcatcatttgaaaatttattacaattaagtttaacctactttgacactatgaaaaaaacgcttgcggtattcttcattctctttgttccattattgattagggccagcgatctatctgaatctatcatgagcttccaagctgaccgggcagccctgaaccggaaatacagtaaccaccttagtgaagagtattttcaaagaatgaataactttttcagtaactggctacaaaaggtcaattccatcgattataaggaactcagtgctgacggaaaaattgattacttggccttcaagaactatttggaaaagcaactttattttcaccaggcagatcatgaaaaattccttgaaattaaagaagtactggaattttcaagcgatttagaagctttttatatcgctagaagaagggctacaaaaccagatgccaaggccattgccaagcagttcaatgaagccaagctagccattgacaaacaaatagcgcaactcaaagacagcccttatgacaactggcaaaaagcagatttagctgcaaaagccataaaatccctgcagaaggaagtaaaggaatcatatgatttctactatgattatgaccctgaatttacttggtgggtagccgacccatgggaaaagcttaataaaaaattaaatgcctatactgaattcctagaaaaaaacttcgaaaacaccagcgtgaaagatgacggcagcggcatcatcggccaccccattggagcaaaagccatacagaaagaactggaatttgagcttattccttatactgccgaagaattgatagccgaagcagaaaagcaatttgcatggtgtgagaaagaaatgctaaaggcctcagaagaattgggctatggaaaagactggaaagcagcccttgaacatgtaaaaaacacctatgttcctgcagggcaatggcctgaggatgttgctaaaatggttacggaagctacagcatatgtagaacaacatgatttgattaccattcccgaattggccaaagaagtatggagaaccaaaatgatgtctgcagaacgtcaaagggtcagtccattctttttaggtggtgagaccatcattatttcttatcctacggctgaaatgagccaagaagaaaaattgatgagcatgagagggaataaccctcacttttcacgcgcagtagtgcaccacgaaatcattcctggacatcacttacaaggattcatgatccaaaggcacaagccacatagaagaatgttctatacaccattctggatggaaggatgggctctttattgggaaatgaacctttgggacaaggaattcccaagaaacacagaagataaaatagggatgctcttttggagaatgcacagatgtgccagaatcattttttctctgaattaccacttgggcaatatgagtcctcagcaatgcatcg

SEQ ID NO: 1144 - DNA, 24512 bp, synthetic construct
  source 1..24512: mol_type = other DNA
  misc_feature 1..24512: note = Synthetic
gaatggatgtaccgggcaattccctccagcccgtttggaaaacgctgcggatgcgtgtgcattcgtccggtactgtcgcggtaaccgaaaaatccgtcatcgatgttgatgtagccgtatccctttgctttcagcccattgtctattaaggctttggcttgttttcttatcagcgaatcgttgatgtttacccgatacgtgttccatgaactccaccccatgatgggagggttaaacggttgttccgttttcgggttggttgcatttcccattagcgggagaagacaaagagctgttgctgccagtcggataatagtgcttgttttcatacctgcgtgttgttaatcggcggtaaatatagaaagaaatattgaattgagaggtgctttagagttcgtttaaattttgctcggcaaaacaacttattggaaaatttaaacaggctcttaaatgcaattccaaacgcaagccgtagcactacccaacgcaagccgtagcatgggctgacgcttgcggtagaaatgcttggtacatgcggtagcgtttttgtgttccattccgatgggttttccggtacaaatagagtaaaatccgtgaagctttgggcagggtatgacgtaatttcgttatttttacgcgatgaatccaaacccgaacagaaacagacgatatggcgcagtctctttatctttttaatccggaacatgatatggctttggctaactttacgccgtactataaagctccttccgaaatccggcgtatggcaaacgacttgtcggtgcttccggcgtggtatgccgacgaggaggatgaggcattggtgaagattgattccgccggacgtgtagaggggtgggagtctccgctttatccggagaaagtggcgtggattaccgggtggagggatgccgattaccgtccgtggggatggaatccggcgttgctgcacaggcttcgcgaggcgggagtcggtgagggatgcctgctctccgatgagcgcatggagcggattcgccatctttcaggcaggcaacgctgtgtggatgtgttggacgggtttcgggggatgcctttcgtatgtgggcaggcagtggtttgccgttcagtggacgaagtgaagaaacgtgtctcggagtggggtacggcggtactgaaagctccgtggtcgggcagcggcagagggttggcacgcgtctcggaagcgcagtggagtccgtcgttggagggatgggtgtcacgcatactccgcacgcagggagcaatcatggcagagcctttctataataaggtatgcgatttcgcaatggagtttcgggcagacggtagcggcagggtggactttgtcggctattcattatttgaaacggatgggtttggaaactacaaggcaaacctgctggctgcggatgcggagatagaacggcggctgtcccgatacgttccggtggaacaactgaatgccgtgcgccgtgagttggaacgctggctttcgctgctgttagcgtcagactacgcaggttatttgggagtagacatgatgatttgctcggacaacggcggtctgctgattcatccgtgtgtggaaatcaaccttcgcatgaacatgggagtggtgtcgcacgtgctttccgtccgttacctgcatccgctcgctacgggcaggtatgtggtagagcattattcagccgacggggaagcatgggctttccatcagcagatgagccgtgatttcccgctggagatgcaggcaggcggtatcgcgaaaggatatctctcgctcactcccgttcgggaagatacgcgctatcaagcctacatcacggtggggtaagcggaagaaaatcgttatactttcccctccaaccatgcgtctatcagccggcgggctatgctcagtttcttgggaatctctggcagattgtcgcgggtataaaacgctccggcactcagctcgtcgtcttgcagcttgatggttccgctttcatactcggcggtatagcccaccatgattccgctgggataaggccacggctgactgccgaagtatctgaggtttttgatgcgcagttcggtctcttccatcacttcgcggcacacacattcctccagcgtttcgcccggttcgagaaatccggctaccagtcccttgaacgttccccggaagttacgcgcgtgtaccagcaggatgctgtctcctttcttaatcagtacgatgaccgccggagagatacgcgggtaaatttcctgtccgcacttcgggcaacgtttggcaatggggcctacctgtacggtggcaactccgcaggcgggacagtagcggctgttcttgtcccacgtcaggatttgtgaggcttttccggcaaggtcgtattcacagcgcggaagcacatcgaacgaagcccgcaggtctttcagcaaatacggcgtaccttcttctgctatcggtgcatcgagcgcatacgcccgtgcggtaagtccgttcaggctgcctatctcgtgtacggtgtttcccgcagggacggctacgggaggcttttcccccgtgggaatatgataaccgtctgcctgtttctctatcaatacttgtccgttgtaaaaagcgaaccagccgtatgcagcggcttgtttcatgtctttttccataatcagttcagtcctttcattgttagttggatgcgttttcgttcgcggtcgatgctcatcacacggacacgcacgtgctggtgaatgcttaccaccgtggaggggtcggagatgaagcggtcggcaagttgggatacatgcaccagtccgttctctttgatgccaatgtcgacaaagcaaccgaagttggtgatattggtcacgatgcccggcagttccataccctcctgcaaatcatcgagcgtgcgtacatttttgtcgaactcaaacatctctatcttccggcgcgggtctcgtcccggtttatccaactcctgcatgatgtcagtcagcgtgggcagtcctaccgagtcggtgatgtaattttctatctttatccggctgcgcagttccttattctttatcaagtccgttaccgagtagccgaggtctttcgccatacgttccaccacagaataactttcgggatggacggcagagttatcgagcgggttttccgctcccggaatccggagaaatcccgcgcactgctcgaaagccttagcccccatgcgcggcactttcagcaattcgcggcgcgagcggaacgcaccgttttccgtgcggtaatccacgatgttctgagccaaagccgcacccaaccccgaaacgtatgtcagcagatgcttgcttgccgtgttcacattaacccccacaaggttcacacagctctccacagtctggtcgagcgaggctttcagtttgctctggtctacatcgtgctggtattgccccacgccgatagacttcgggtctatcttgaccaactccgcaagcgggtctatcagacgcctgccgatggataccgctccgcgcaccgttacatcgtagccggggaactcctcgcgcgccgtcttggatgccgagtaaatggaagccccatcctcgctcaccacgaatacctgtatctcacggtcgtaccgctgggaggtgacaaactgttccgtttcccggcttgccgttccgtttcctatggctatcgcctctatcttgtattgctctactaattgggtcagcttgcgtgccgcctgcttatattccgacttgggcggatggggataaatcgcctcgttatgaagcaaagccccttgcgcatccagacacaccaccttgcaacccgtgcggaatccggggtcgatacccatcacgcgcttttgtcccagcggcggggcgagcaacagttggcggaggtttccggcaaaaacacggatagcctcatcgtcggctttctctttgctgatggcagcgtattcggtctcgatggaaggtttaagcagacgcttgtacgcatcgttcaccgcttcggctacctgatgtgcgcactcgttattggtttttacgaacagccgctccagccgttcgccgcattccgtttcatcggcaggtgtgatgcttaccttcagtatgccttccttctcaccccggcggatggcaagcagacggtgggacgtgcatcgcttcagcggctcactgaaatcgaagtaatcgcggtacttggcagccgcctcgtcgccttccttaccctttaccacctttgccgtaatcacaccctgacgctcaaactgccggcgaatctggttgcgggcacgctcgtcctcgttcacctgttcagctatgatgtcacgcgctcctttcagcgcatcctcctcgtctttgacatcgcccttaacgaaagcgcgggcctttgcagcaaggttgttttcgcgctgcatcagcaacagaaccgcaagcggttccaatcccttctgtcgggctatctcggcgcgcgtcttgcgcttcggcttgtaagggaggtaaatatcctccagctccgtgccctcccaacagtcggcaatgcgtttgctcagttcaggagtcagcttcccaagctctctgatggtcgatagaatcgtttccttccgtttggcgagttcgtacaacttttcgtaacgggcgtttatttcgctgatttgtacctcatccattccgcccgtagcctctttgcggtagcggctgataaaaggaatcgttgccccatcgagcaacagtttaagcgtattctgtacgcgatgttccggcagcttgagcgcatcggaaatcatccggctaaattcttccatgtcttgtttctgttcagattcggaacgcgaagttagcgaatccttataaattgcggcgataatatatagaatttaacaaccggatggtgaggtgtcagtcttagcgtattttcgttcaaacagttcggtgttgttgcttccccattgaatcatggcatcgataatgggaatcagtgtttgccccagcggagtgatggcgtattcggaacgcggaggcaattcgggataaatggttttggagaccagtccgtcttcaaccagctctttcaactggaggtcgagcacacggggagtagcttctggaaaaatcttgtgcagttcactcggacgcaacggcttatggcgcagttcgtccaagatacacgatttccatttcgcgcctatcagactaatggtcagtcgcagcggacaacctaaatcaatgggtatctttctttcgtacatggcatgacgttgttacttggttaatacggtgcaaatataatgatacttattcggaacaagcagataccgaataaattatcagtacccgaataattaatcagtacttgtatttgtaggggctgttccgtacttttgcatcagtaaataacctattagaaaacatattattatgagagcgagtatcgaagaatacaaggcagtagaggctgctgcgatgaagtttgtaagaagcgtggcagaaggcaacagtaagtatgccaaagaattgtttgtcgacgaagccgttttgttcggttatttggacggcaggttggaacacggaagcattgagcagttctaccggaatgtagacacagtgagcgcaggcaatgatttcaaggcgcgtatcgacgtagtggatgtggaagaatctcttgccgtagtccgtgtgttggaggagaaatggggtggaaggatagactttaccgactaccttttactgatgaaaatggatggcgaatggcggtgtgtggctaaagcgtataatcagaactctgatacgatacaaaaataaaagtacattatgcaaatagtagttattaccggaagtccccgcaagcggggaaacagttttgctatgacgggggcatttgccagtgaagctgaaaaactggggcatagcgtgcgtcagtttgatacagcgtttatgaagataggcggatgccgtgcctgtcagacttgtttcaaaacgggcaaggcttgttcgtttgacgatgatttcaacctcatcgcgcctgccatgttagaggcggatgccattgtgtttaccatgcctacctattggtattccatcccggcacagataaagggtgtgatagaccgcatgttttctttcgtggtgggagggaaaaaggtagcaggtaaaaagtgtggtttgatagcctgctgcgaggaagacgacccagcagtaatggacggagtgcgtatccccatagaacgctctgtcgctctgttgcagtggaaaatggtgggcgaagtgctggtgaccggtgtgatgaacgaaggtgacattaacagcaccgacggatgtgaacgggcggcggagttagcaagaaagtttggtaaagctgattgattcagagtgtattatactcacatggaggtgcctgcgccaacacctgaaaattctacccgtaggacgatggagttctatgggtagaatgagtgtgttcttccgcatgggatgggtgacgctaaccgaagcgttttttgtaggataactgttgcggttttcttggatgattggttggggttatcattcctttccgtcggaatcagggctgctcaacttcatccgcagtatggggaacggattgccttgatcgtccgtttcatcgcgacggaaagtttcgaagccgaggtgacggtaaaaacctgctgcatggggattctgttcgtttacgtctacgtaagcaacttgatagcggttgacggcaagatgcacgagctgttttcccaatcctttcccgatgcaggagggagcgagaaaaagcatctctattttccggtcttgtatgcccatgaaaccgacgggcacatcggcttgaaaagaaacgagcaaggtttctgtttccttcagggcaggagctacccacgggctgaggcggcggatgtcctcgcctgtaaggaagtgatgggaggcgcgtaccgaggcttcccatacccgaaccaactgttccgtaaattcatcggtacgttcagtccgcccgatttcccgaatcagccggagcgattgccattcttccgctgtaatccgcatgaaatgttccgtgcgcacatcgccgagcggagagacattgccggtttcggtgtgatgatacgtcagtccgcacttctccatcacccgcctcgaccggttgttgccgtcataatatccgcaccatacagccgatactcccaaatcgatgaaacatctttccagcaggcatctcacagcttcgggtatcagtccttgtccccaataaggtacgccaatccagtaacctatttcagcctcgttgtcctgcatggctgcactgtgcatcccgtcggtaaacatgacgcctgcgcttcctaccggctcgcccgtttctttcagcaccacggcgtaagtttcgggagcggcgaaaacggtgcgtataatctccagactctcggctacggaggtgtgcggatgccatccggctatgggaccaatggcagggtttttcgcatacttatataaagcctccgcgtcggcttcctgccacgggcggagaatcagtcgtgaggtttcaagatggttgctcataagtaataatctttctttggatggtttgtatgaattgcagtgctttcgttgcctgtaaagtcagttcttatttttcctgcttcaaaatctcctgcatacggggacggaaattgttgccccattcttccaacatgcggatgataggtattaatgtcaaaccttcgtcggtaatgaaatattccacgcggggaggcatttccggataaatctttttccgaatcatgccgtggcgttccagctccttcagttgctgattaatgacacgcggactggtgtcttcaaaatggcggtgcagttcgctgggacgcttgcagcctttttccagctcgtagaggatacatgatttccactttccacccatcacttccattgccacagccactccgcaatcaaggtctaaaggtatcttctttttatacataagttccgttgaaaatggttctgccaacaaaaataattgttttgcccgaatataaaaaggagaaatttatctctatctgaataattcgaccctacttgacctgctttttccaatcgtttatttttgcgggtaaaagaacggacgtatggacaggcgcaaatttttcaaaacggcaagcatacttgttgcggcagcgggcacccattgtctgtctgccggaggcaatgagctgttctataatgttattcagacggaatcattgaatcattataataaaaaacgtatgaaacacaaatgtaagataaccgtattaaagcgagaatgttacaaaaacctgcaagctgagtatctggcagacccacagtcgggaccctgtccttattttcatgaaggacaagaaattatcgtagacagcgacaactttttccgtatgctgaacggaggattctgttcggaagcatgggattgcatcagccggtatgtttatgctgccttgcaaggcggctcgattatgcgtggttggacaaacgacgagaaagtcatgataacctgctgtaacgacggcacacgctcggttatcttcaagctcgaacggttggacgaagaagaataacaccgagtctctgcaacaggcaaaccgacccgaatcgaaccttcggaaatttattgtcggtttgcctccttgatgctccaaagcgaaacatgctcgttacggtagcgggcgttaggatttatctcgccgcgtgcaagcaacgggtcgtcgggcagcgatttgaactgtattgctttctgcgggcagttctggatgcaggcaaaacaaaaatcacagtcgccctccgtcttcactccctgcgaagtcagcttgtaattacctcgcggacaaacctccgtacagattccgcagtcgatgcaggcatctgttactgcaaagtatttttcgctccgcatcaggaatcctacctccgggtcaagccccgtataagccatgaatccctcatgttggcgacgttcgtcatcgctgaaaggttcgtgccagtggcgtttcgcctgaaggtcggaggtgatgcgcttcagactttcgggaatctgtttgtctaatttcatctcttccgccatatcaaaattcggcaaccagttatccaccataatcatcgtagtgatataatcgaaaggacatccggcacgttgagtaatctcatcccatatccccacggcattacatttgcgcctgccgtaagtcagcacggcaaacttatatcccgccgccagtttcgcccgtttgatgtactcgcgcaccatgttgggcggcatgtgtccgtagataggataaacgataccaatctcgtccgcctccagttcgtaacgcttctcctttaccaactgcggaatactgagcagctcggtatgctcgtcagctaactgacgtgccacatataaacaattccccgtccccgtaaaataaagaatgatacgtttcttttccgttttgccacacccggtaagcgaagtcattccccatgcagccgttccagcaataaacgcccccatccgcttgagagcagaacggcgagatattcctccggtatgttctttttccatagacacttgtttttagtttttacaaatgtacgccgaatcacatactccattaatacacaaattacagaataattcacctattttacagtaaaagaaaggcagaaatgcggtaaatcttgtggaggttggcaaacgacttttctgtaacaatggaagtaattaggtttttatgcttgcggtatgctttccgttgatagaaagattaataattgaataggtaattcaaatgcttatttttcttgagcgctgtaaaatgagaggaataaaaaatcccccgttaaggtcgagggaaacctaatgttttcacaacggaataatccttattgtgatttgcttcaaaatagtattgcaaatataatataatagttaaagatagccaagtcttttgcggaaattttataactttgaaaaataagagaatttttatgctataaaaaacacgttatgaagaatattttaggacttgatttaggaaccaatagtattggttgggccgtaattaaggcttcgacaaatgaagaagggaaagaacaattacataatatagacagtgcaggttcgcgtataattccgatggatgcagcaatattgggcgattttgataaaggaaattcaaaatcgcagacagccgaccgtacacaaagccggggtatacgccgtttgtatgaacggtctaatttacggcgtgaaaggttacatcgggttttgtctttgcttggctttttgccagctcattatgctcgttatatagaccggtacggacggtttattgattatgcagagcctaaattgtcttgggataaggatgaacaggggcatcccgtttttatttttcaagattcgtttgatgaaatgttgaatgattttcgtcagtttcagccggctttggttgataacggtcggaaagtgccatacgattggaccatttattatttgcgaaagaaagcacttacccaaaagattcggaaagaagaattggcatggattttgcttaatttcaatcaaaaacggggatattatcagttgcgtggggaagaaaccaatacatctactactgctaaaagtcgtcagtatttcgatagtcagatagttattgatattattgatacaggacaactttataaagggatgaaagttcttaccgtagtattggaggatggctcaaaaggtaaaatttttaagaaagaaattccagactggattggtcagaaaaaagacattatagcatctgttgatattgataaggatggtaatgataaatacgatgaaaatggtgaattaagttgccgtttcaagattccttcagagcaggaatgggatgaaaaatgggaattgataaaaactaagacacagcatgatttagatgtgtcagataaaacagtgggtgcttacatctatgacactttgttgcaaatgccttgtcagaaagtacgtggaaaattggtaaggaccatcgaacgaaaatattataagaaagaattgtatcagattctggaaaaacagaaagagtttcatgaagagttccgtaatcgagacctgtatttggcttgtatcaatgaactctattctctgaatgaagcacatcgtaatgaaatagccagtcgtaatcttgtttatctgttcattgaagatatcttgttttatcaacgtccgttaaagagtaaaaagtcattgatcgctgactgtccttacgaggaatatacttgtacaaataaagaaacaggagagatagagcatttcggagtgaagtgtattgccaagtctcacccattgtatcaggaattccgcttgtggcaatttctcgcgaacttacgtatatatcagaaagaacaagtagacaatggaaaaacctgttatgatgtagacgttacttctgattttttaaagacggaagatgattatacagaattattcgattggttgtgtgagcaaaaaagcataaagcaagacagtatattgaaatgcccggttttcggcttgaaaaagaatgatattaataagtatcgttggaattatgtggaggataaatcctatccatgtaatgagactcatgcacttcttcttgaatggttgaataaagcaggcatagcatcttcttttttgaactctacgaccgaagaagatttatggcatattctttattctgtttcggataaaaaagaattagaaaaagcattaaacaaatttgcagaaagatatggacttgccgcaaaatttgttgaagtattccagtctgttccgccttttgagaaagattatggagcttattcagctaaggctataaaaaaactgttgcctttaatgcggatggggaaatattggagtgaagataacattgatgaacagacacgcaggcgtattgataaaatgatatcgggagagtatgatgataccattcgaaatcgggtaagagaaaaggctattcatctgacggatgtaacttcattcagagggctcccgctgtggttggtctgttatattgtgtataatcgtcactctgaagcacgagatgtcaaaaaatggacagaacctgccgatattgatgattacttgcgtaagtttaaacagcattcgttacataaccccatcgtagaacaaataattcttgaaacattacgtacagttcgtgatatatggaggcaagtaggacatattgatgaaatccatgtggagttagggcgtgaaatgaaaaatccaaaagataaacgcgctaaaatgactcgccagatgcaggaaaatgaaaatgcaaatctccgtattaaagcgatgcttgtagagtttatgaatcctgaatttgagattgaaaatgttcgtccgtattctccaagtcaacaagagttgttacgaatttatgaagaaggggttctcaatagtgtaagtgaaatatcagatgaaatagctaccatcattaagaaatttaatgaaagcgatataaagaaacgtcccactacatcagaggtattgaagtataaactttggctggaacaaaaataccgttctccttatacgggagagatgataccactgggtaaattatttacaccggcttatgagattgaacatattatacctcagtctcgctatttcgatgactctttcagcaataaggtgatatgtgaatcggaagtgaataaattgaaaacaaatttactcggtcatgaatttatatctaagcatcacggtgaaaaggtattattggcaaatggcaaatgtatcaatgtcttctctgttgaggattatgaaagatttgtcaaggataattattctcgcaatccggtcaaactgaaaaaattgatgatggatgatattcccgaacaattcattgctcgtcagttgaatgatagtcgttatattagtaagttggtaaaatctttactttctaacattgtgcgtgaaagcgacgagcaagaagatatctcaaagaacgtgattgtttgtacgggtggtgtaacagaccgattgaagaaagattgggggataaacgatgtatggaataaaattattcttccacgctttcagcaactgaataaattaagtggcaatacttgttttacatctgtcagtgccaatgctcatattattcctactgtacctttagaatttcagaaaggatttaataagaagcggattgaccatcgtcatcatgctatggatgctatagtgatagcttgtgcagggcgtaatatagtaaattatcttagcaatgaatcggcttgtaaaaattcaaagatttctcgttatgacttgcagcgtcttttatgtgataaacaaaaagtggatgctcagggaaattattgttggatgattaagaagccgtgggattcatttacacaagatgtatatgctgttttgcggaatgtaattgtcagtttcaaacagaatcttcgtgttatcaataaaacgacgaattattatcaacgttatatagacggcaaaaagaagatggtgaaacaaaaaggaggagataattgggctattcggaaatccctgcataaggagactgttttcggtgaagtgaatttgcgcgacataaaaacagtggcgttgaaagacgccataaaaaatccgaatgctattgtagaaaaagatttgaagaagaagttgaaggaattgttgcgtttgcatttcaatgaaaagcagataaaaggttatttcgaagagcataaagatgtttggcaagatgtggatttgaagagaataaaaatctattatttttctaacgagacaaaagaccggttttttgcttctcgtaaaccgttggattcaagtttcaatcaaaagaaaataacggaaagcgtaacagatacaggtatccaaaagatattgttgcgtcatttggaagcgaatggaaatgtagcagacaatgctttctcaccggaaggtatagaggaaatgaataagaatatagtcttgttgaataatggtaaatggcatcaacccatccgtaaggtacgcgtttatgaaaaagcagataagtttgcagtaggccagaaagggaataaaggttctaagtttgtggaagcggctaagaatttattctttgccatttatgagacggaacaagaagatcccaaaacaggtgagataacccgaaaacgaagttatgcaactataccattaaatgtggtaataaatcgcctgaagcgtgggttatcacctgcaccggaagataaaaatggcaattcgcctaaatatgtattatcgcccaatgatttggtgtatcttcctacgcaagaagaattgaagagcggacatatttgttacccgttagatgagaacagaatttatagaatgattagttgtacaggaggcagggtttactttttaccatattttgtggccagtatgattgttgataaatatgaatataaagatgaatttacaaaagacaaacagtctataaaagagatatgtattcctatcaatgtagacagattaggtaatttgattaaatagttatgattaagaaaactctttatttcagcaatcctgcttatttgtcattacgtaacgcccaattagtaatcaaacttccggaagtggagaataatccttcgcttccggatacaatgaaatgtcaatctttggtaacgaagccgatagaagacattggattggtgattttagatcatcggcagattacgattacctccggtgttattgaggcattattggagaataatagtgcattgataacatgcgacagtaaaagtatgcctgtaggattgatgttacctttgtatggtaacactactcaaaacgagcgttaccggaaacaattagaagcctccttgcctctgagaaaacaattgtggcaacaaacggttcaggctaagataactaatcaggctgcagtattgtctgcttgtacaggagacatgtcaaaatgtatgtatatatgggcaaacgaagtacggagtggtgatcctgaaaatttagaagctcgtgctgctgcttattattggaaaaacttattttcagatataactggttttactcgagagcgtgaaggagttccacccaataatttactcaattatggttatgcgattctacgtgcggtggtagcgcgcgggttggttattagtggattattgccaacgttaggtattcatcatcataatcgttataatgcctattgtctggcagatgatatcatggaaccttaccgtccatttgtagatcggttggtttttgatctatatctcaaatacggagctgatgttttgttgacaaaagaaattaaaatagctttactttcaatcccaactattgaagtaaatattaataggaagcgtagtcctctcatggttgctgtatctcaaactaccgcttctctttacaaatgttttacaggcgaattacgtagaattgtttatccggattttaatggatcgttttagtgaatatcgggttatgtgggtattggttctttttgatttacctacggaaacaaagaaagataaaaaggcttatatggattttcgcaagaatttacagcgagatggctttactatgtttcagttttccatttacgttcgtcattgtgcgagtagtgagaacgcagcggtacatattaaaagagtaaaatcttttcttcctgagtttgggcaggtaggtattctttgtataacggataagcaatttgcgcagatagaagttttttacggaaaaaagccgcaaggagtaaagactccgggacagcagttagaactattttgaaatcataaatcccgcctctttagacgggatttatgattggaaacgcatttttttctttttctaaaaatacttgtaatagactgaatattagtgtattctttatattcagctgtttccaataggacaaagatactaatttgaaagcaaatcacaacctcaagactgtcgtatatcaccctgccgagctgtttccaataggacaaagatactaatttgaaagcaaatcacaacatgtgtatgtacgtgaaattttcgtttccgctgtttccaataggacaaagatactaatttgaaagcaaatcacaacttctgagagctattcaaggcaggaacttaagctgtttccaataggacaaagatactaatttgaaagcaaatcacaacacctacacggcatgggtgagcggcgtgcggctgtttccaataggacaaagatactaatttgaaagcaaatcacaactcaggcgtgagtttcagtacctccgatacgctgtttccaataggacaaagatactaatttgaaagcaaatcacaacagataggcggaagaaacctgatacccgacgctgtttccaataggacaaagatactaatttgaaagcaaatcacaacgaaattccctatataaacgtgcccgtatttgctgtttccaataggacaaagatactaatttgaaagcaaatcacaacaaaaagctggtgttaatcgtcaacttgctggctgtttccaataggacaaagatactaatttgaaagcaaatcacaaccagaattatcagcgtctgcaacaagttacggctgtttccaataggacaaagatactaatttgaaagcaaatcacaactatttatccaatccgctatcttcgtgaacagctgtttccaataggacaaagatactaatttgaaagcaaatcacaactcgtactttctctgttcccgttctaccttgctgtttccaataggacaaagatactaatttgaaagcaaatcacaacatttggatacactattgaatatcgtaattcgctgtttccaataggacaaagatactaatttgaaagcaaatcacaacccggcaagcctgttcttgttccttgtggtgctgtttccaataggacaaagatactaatttgaaagcaaatcacaaccacttttcccgaaagggttgcgggtcttcgctgtttccaataggacaaagatactaatttgaaagcaaatcacaactatgcagaggtacttcacaccgtcctgcgtgctgtttccaataggacaaagatactaatttgaaagcaaatcacaacccttgaaaaagtgacacgcctatgtacgagctgtttccaataggacaaagatactaatttgaaagcaaatcacaacaaaacttacctgagcagattaagttggattgctgtttccaataggacaaagatactaatttgaaagcaaatcacaacggtctcacagagtgagccgaaatctattgagctgtttccaataggacaaagatactaatttgaaagcaaatcacaacgattgatacctgttatacgttcaagacctgctgtttccaataggacaaagatactaatttgaaagcaaatcacaacacagtttcttgaattctgaaatattcatggtgaattgtttgataattggtttttaataactatatttgcctacacagaaggcattgcccgcagttgtcccgcgcgaaagcacacagggaagagacggggcagtgcctttttacgttatagcagcctcatgaaatgcagggctgtttccaataagacaaagatactaaattgaaagcaaatcataactatatgaaaaggaggatatgagaccaacgttgatggggctgctggcaaaaaacgctgagatatgtccttgcgtccgtccggcccgtaaagggaagccagcccgtggctctccgccagtccggattggatagccggtgtcatatctcaacttggggttcatcctgcctgtgcgctgacgaaagcagcctgcacgtgcgcccatccacccccgagagctacaccctttattaccccgctcagtcaggacttcgtcacaaatatacaattttaaaattgaatgacaaatgaataacaccgaagatccgtgtatatgaagttcttttcaatgaagttaaaggtggataagtctatcatcccctccctccagcttgttcgagagcttgaaaaacgctaacggtagaacggggtaacagtatgggtagaaatgggtaacgcatccgcatggaatgggtaacactaacggttgcgtttttgagggggatatatacggctttctttttgtttttcctttgataatcgttacttttgcttttggtaatttttgtaaacaaatgagttatggatgtctcaagctggtttaaaggttttgaaaaaggattggaaaaactgtcgggtgaagagagggagcggcttttttttgaatgtggtaaaaattgtgtgaagaatggcgtactttctgtttatgaagaactttacgagaaggctgggggtgatatggatgttttctttctgaaagcaaacgatttatcgggagtggaaagtgaggtggtagagaagggtagggtgtatggtcttactttcttggaatgtacttgcgggttatataaggaaggctatgttacttcgcctttgttgtgtgaatgttctcgtcaaagcgtaatttatgctttgcatcatttgtggaaaagtcaccagtttcgtgttacgctttgtcagtctattttacaaggagcaaggtgctgtaagttgaaaattgaggttctgtgattacggaaaaacacattttactgatctttatacccattttactgaaaggctttgcggatgtgcctgttaatcagggaaaatcaatatctttgggatgatttcatgaaaaatgcaggacgttatgggcgaaatattgaatttgaatacgatacacgattataatgtgtttttgggactggaaacgttgaatccgctggtgagttttgtggatttttcgagagtagaagtgttggttcaccgccgcaagtgtttcaacttttacggcatctttctcaaggagaagattcacggaccgctggtttacggacgaagcaagtacgattatcaggaaggtacgctcgtgttcgttgcgcccggacaggtggctggcattgacgacgacggggaaaccatacatccgcaaggttatgccctgctgtttcatcctgacttgattcgaggtacgtcgcttgcccgcagaatgaaagagtatactttcttctcatacgaagtgaacgaagccctacacatgtcggagcgtgagcgtcagaccgtgttcaactgtttcggcgagatagaagaagagctgcaacacaccatcgacaaacacagccgctccatcatcgtctccaatatcgaggtgttgctcaaccattgcctccgcttttacgatcgccagtttgctacccgcgaagccatcaacagtgacgttcttacccgcttcgagacgctgttagacggttatttcgatacagagaaaccggttgaactggggctgccttctgtggcatggtgtgccgaccagcttcatttctccgccaattatttcggcgatttggtgaagaagcagacaggcaaatcagcgatagaatacatccatcttgccattatcaataaggtaaaagaccgcttgctggaaaccaataagacggtgagtgaaatagcttacgaaaccggctttcaatatccgcatcatcttagcaggttatttaagaaagtggcaggatgtactcccaatgaataccggaatagcatcgttcgtggcgggatatcggaaagcagatgacttgttttccattgatgaaccggcagtgaagctggtggcaacccttgctggctcatcaatgggaaaatggtcttatttgattctcaggttcggaataagcggttgggtatcggtaagtaccaagtcttctaccatttctattgtgccctgcttgtatttttggaaatgaggtgttttcagatgactttcgtaagctgtacggttggcatatatttcgagaatggtaatccggttcggtgcatctttttctgccacagcgtaaagcgtgagtacacccggctctaacctcatggatgcttctatttcttccttcaagtatgcgttatactcatccaaccggtcggcatcaacggttatttttgagaggcggactacgttttcttccctcgaagaatcggttctctccatttcttgtttgatgatacgtaatgcttttattgcagccggaaagccgatataaggcaaggtttggataacggccgaagcaaccgtttggggcgaattgcctgcctttatgtttccgtggaaatgtgactgcaactggctttctgcttccagtgtggtcaggatgcagtaaccaagcagttctttggtaggaatatcgagtgtaccgcgggtatagatttcgccaaagaaataatctgttagaaagcgcgatacatcttcatccagatttccgggtattccgcttaatactccggaaatgcctccgtgatacagtttgtcttgaatggcaaccccttgctcatggcgattgtcttcggtaacagtcgtctgattttctaacgggagagatatacctctttccttgaacacttcgtttaccgtacttacagcgttcagcattttggggaaaccgataaacggggcggtgagatacatggcttcacgcagttcgagaggagtgacccctacattgagtgcagctccggcatgagcttttagctgtggaagtgtctgcattgtggcaagggtaacacaagttatcatctcgcgttgttttaggctcaggccgcccgtggtaaacacctcgccgaatatgaatttctggagaatatccatcatttcggggtctgagccctgtcctgtcaatgcttcgcctctgaaaagagtgcgatagttttccttgcatgtctctatcctgttcatttgattgtcagtttgagcctttactgacaccattcctgtcagaaagaatacgattgcgataatatatttcttcattatggtgttggttatatacttttccctaattgataagcctgttctccgtaatgcgtgttgcgtattgatcctgccgtccatacgcccgaagctactacctcgcccacgctttcccatccgagatattccatcagcgtgtggtaatgtagaagcataggctcggcttctttcttttcggtgtcggcgtaagtcattaagaaagcagctttcttgtaatgacctttaatctgtccgttgatggcataaaagcggtctatcacccgtttcatttgtgccgaaataccgaaataatacattggcgtggcgaataccaccatgtcagattctatcaggtgcggacgtaactcgttgaaatcatcttttatgatacacgggccgtccattccgcagcggttgcaggcacggcatggctctacttgcttaaatgcacagtcgaaacggaatatttcatgtcccttttcttgtgcccctttaataaactgttctgccagataagcagaatttccattccggcggggacttccggttaacactgttatcttcattttgccattatttttagtattcaagttttctacagctttcaccaagccgctgcccaagacaacacttccggcagccgcaagcagtgatttgcggaaaaagtctctacgttccatcagttcaggttgtatttcatggtcggtttgtaagaaactatcggtttaatgagagggtaacggtaacgttgccatttcctaaagccgattttaagtacgcagcgttagcgttgtctatcttacctatccgtgtgaaattccacgaattggtatcgtaataaattactaaatatttgccttgataaagaatgatatcgccgggaccggttgtcgtctgtcggtcattgcgcggaaggtttgttcccagcggtccgactttttccatattcccgtaatcttccatttcgattgtgatatctccttttgaaagcagttccattaagccttttgccgacgaattgtcagtgagtgtagcggtaaatgtttcgccgtttttgatcgttagtttgattgaatttctttccatatatttgtgatttttgtcgtttattccatccgatagtccgaacaccgatgaacttattgatacgatggtgaacaataatattattactctcatgaacttcataaccttgtgtattttttaatcctcgcatttctttgagtcttgtagatttattttcccatagtcttttttacttgcttcaataagttgggaatatccaaatgctgcggacacggtatgcaccggcacaatccgccgcttgtttcgatagcttttttagccgcccatacatttactttgtcgccgtgtacccgattcatgcagaaactaccgaaacattttcatattatcttccatcgtcttatcttttctgcaaagataacccacattcaagttcaggtctgtaacctatttactgaggtttgtacctcatttacagattatatctttcaggtgatgtggtaatatttgctcaaagtattcggcattttaatagccttctcctctgtttcttcgtttgagtatgccgatcctttgctaaagcacacatagcctatctcttaataaattctccgccgctatgccctgaaaaaacgctaccgttagtgttatccatcccatgcggtagtgttaacaggttctacccatagcgttgcccggttctacctatagaatttttcgagcctccggataggctggagaaggcttaataaactgttttcattttcgtgtgtgcttcacatgataacgagccaagacagctgctgaacgcagctcctttaaaccttgaattagaatcttgagtataagggtgctgtcagatgtacatcggaaaacaatataacattcttatttttagagatataacaaaagaaaatgtacatactccatattttaagagattcttatatcggtttatatttgttacgataaaatcaaatatgactgactgtatgaataatcttataaaacattactttttctcacttgtctttttaggtttgtgcttcatgatttcttgtacagatgacgacgagatgatacgtgtctcagacagtatcaggtttatatcggatgttcagaatacatggttttccgtcggaacaaggggaacaacagaagacacgcatccgtctgcctctctcttgaagactgacggcatgaatctcctttacctgcacaccctctatactgacagcatagagcctctgtctgcgaataatacaattccgttcacccgtgccactccggtaaatgtcggcaacatgtacgaaacgttcggagtgtcggcctattcctatacgggtgaatggaacggcacgcaaacccctaattacatgtatgacgttcttgtcagcaaaaccggagacttgtggatgccatcatccagcaattactggcccggcagtgcctataagatgaaattctttgcctatgctccgaagggtaatgaggcttaccgtctttccggtcgggaagcatccggagcaccgaccattacttgtacgatacctgatgatgtgaccaaccaacaggatctgcttgtggcagcatccgatgagctcccgggcaattccaacacttcggtcgctcttactttccgccacgcattgactgccgtgagattcgtatgcggtagcgacatgaaggcgggtactataaaaagcgtaacgctgaaagaagtgaattccacaggtacttataacttcggcacacatacatggagcggtatcggtgcggtgaaggacttttcccaaacgctgggcaaggcttccagtggaacaccggacgaagccatcaccacagaggcgcaaaccttcatgatggttccgcagacgctccccgacggtgcggtgatcgaggtggttttcaacgacggaacagaacataccctgaccgggaatataggaaaacaagtgtggccgatgggaaaaactgtaacctacaaaatatccaccacttccgtcaactgggactacgtgctcaccgtcaacggtcctgccgactttacctatgccggagagacgaaaacctatagagtgaccagttaccggcaaaacagtcaggggaaaaaagaacccgtaaaatggaaggcacagttctctaccgatgatggaaagacgtggagcgatgcaagacccgactggctcaccgcattcacggcaagtggtgtgggcagcacgaccgcagcatccctcaacgcgacggttggcgcacagacaggcacaacggatagtccgcatacaaggatattaagagaacagagggtcgggcagggaacggaaaaagcaccgtacaacttggcaaacgggcaaggtggacccgcgattgaaaatactgccaactgttatgtgatagatgctccgggatattattcattcccgctggtttatggcaatgcgatcaaagacggatcgaccaatagttccgcgtatagctctgctgccccatcaagccccaacattctgaacccgctcatcaaccatgcaggagccggtattaccggcccttatctcacggacaacggatgtgttcccgcaaaagcggaactggtttggcaagatgccccctcgctggtcagcgaaataaaatacaatgccggaagcaatg

SEQ ID NO: 1145 - DNA, 24512 bp, synthetic construct
  misc_feature 1..24512: note = Synthetic
  source 1..24512: mol_type = other DNA
gaatctgagagctttaaagattttctaagaaagaaaacggataccagcgttctgagcattgaacatatacagatagaaaataatctggacagcttaggtcttcttacgatagaaggggctcatccagaaaaaatagattctataatacaaagccagcagcaacaggcacttaccaagcactttgaatcaaatagcgcaaacacctcaacatttgtcattaatggaagctcaaataaagacactttaaaaaacaacagtaatatgttgcagcgattctttacaaagcaacgccttaaaacagatagtgtcgcgaggtatgacacactagcctctggagaattaaagttgcgcgatagaaaaaacgctctagaaacacttacctctaaaatagttatatcatttaacgatgacaccattgacataaaaaaattagatacacttgtaaaacagcaattactgacattaggaatagatcgcgctgcgcatagtcttacatatagcccaaagggagacaccatctcacgccccatttcaggggttcccaaaaacctcagccctacctatgattttaatgtagttgcaaattcaaaattactcccagcagaaagtatactctctctaggctttaatgacattaccaccatcatcttaaaacgtaatctggcaggcatagtactttcgtttattctaatcatagcagtaattgctagccttctctatctactcaaaattatacgagaacaaaaacaactcgccgagattaaaaatgattttataagcaatatcacccacgagtttaaaacacctatagccaccataagcgcagctattgaaggcatacagcattttaacaaagaaaacgacaaagaaaaaacagagaaataccttgccatgtctaccacacagctaggtaaacttaataccatggtggaacgcattctagacaccgcaacactagataaagaagatttatcgttgaaaaaagagcgttgcaacctagtggaagtgcttgaacatttgattaaaaaatataaagaaattgcacctgacattcctataacacttaaaagttcaacatcttccatatgggctacggtagatgtttttcatctagaaaatgctattgataatctagtagataatgccactaaatacggtaaaccaccagtaaccatagcaataagtaatacaaatagtaacatccacttgtcaattacagatacaggaaaagcacttacaaaggatcaagcatctcaattatttgaaaagttttaccgtgtacccaaaggaaatacacatgatgtaaaaggttttgggataggactatactacaccaaaactattattgaaaaacacaatggctccatagaggtgtctactgttccacaaacttcatttaaaattacaattccagatggcaacaaataaaccttatatcttactcgcagaagatgagccagcactaggactcattgtaaaagaaagtctggagagtcgtggctttaatgtaacactctgcacagatggtgttcaagcgataaatcaataccaacttaaaaagcctgacatcttagtgctcgatgtgatgatgcctaaaaaggatgggtttactgtggcaaaggaggttcgtgaacaagatgatgagattcctataatatttctcactgcaaagtctcaaacggcagatgtggttgaggggtttagtataggtggtaatgattatctcaaaaaacctttcagcgtagaagagcttattgtaagaattcagaatttactacaacgtaaaacattgcaacaaaaggctgaggctataaccatcggtagttatattttcgatttcacaaggcaagaattacgctttcgcgaaagcgtacaaaagttaacccacagggaggctcatttactatttcatcttcataaaaatcgcaatgccgttctagaccgatcacttattcttaaaaaattatggggtgatgatgatttcttttctgcaagaagcatggacgtctttatatcaaaacttagaaaaaaactaaaggacgaccctactatagaaatcgtaaacgtacgtggatacggatataagctcatctgctagtgtgaaggctttgcttgaaacatatttactagaaaaaaggtgccaatcttacgagctctaaactttgccatctctgccagttcgccctcatatagctcatctaccgtttgtacccagtgattaagccatacaccaaagtgttgctcatttatagtgtagccttcatccctatctacacgtttgtgcgtttgtaaaggtcttcccgtaaaaatttttttaaagaataaattgccttcccaaaaatctgtaagatgctcaaagtggtgtggccaatctgtaatgtgtttattaaaaataggtcccaaataaacatcactacgtatgcgaccataaaaagtggttacaagtgtatatacatcttctctattttcaatctcttttttcaccttacaaaggtattaactataacggctagatttttgtactttgctcgttaatgcataaactgattaacatattacttttacttgccaccatcacggcagctagccagagttacaccttagaaaagattaatgaggtgacaatcgaggcagatatttttataggtattgatgctttcaatgcgctgtaccacatcaaaaatgatgttttatataaagatgatgttaatgaaggttatcaatttacagcactacagctaggtgctatcacttcggtagacattcttaatccgcttaaaataagtgtgttttatgaagctacaaataccgcagtaatactagacaatacattgagtgagattactcgtataaatttttctaccatagatgattttagaaacataagtcatgttaccacaaatggtgatagacgtttatgggtatttaatacagacctgcaacaacttgagatttttgactggaatacaaatcaaataaccacacaatttccacctatgccagtgaacgctataacggtagcaactaattataattttgcatgggtagtaaatgaaactgggttatttcattataataactatggaagttttttaagtaaaaaagactttaatgacattacactcatttcccaaagtgacggcgctcttatcttattctcacagggtaaattatactataagtcaaaagaatctaatgaattcatagcactgaaaactccagattttaccataaaacaactttcgttgaatggcgaaatcctgtatctttacaccggtcaaaagttagctgctttccgactaaaatttcctaaaaaaccttaacatgcacattgcaattgccggtaacatcggagcaggtaaaactaccttaactaaacttttatctaaacattttaaatggactccgcaatatgaagatgtagtggataatccatatctagatgatttttataatgagatggaacgctggtctttcaatcttcagatttactttttaaatagccgttttagacaattgctagacataaaagatagtgacaaaacgattatccaagatcgtactatttatgaagatgcattcatctttgctcctaaccttcatgcgatgggtcttcttactaatcgtgattacaacaactacaagtctctttttgatctaatggaaagtgtggtagatgcaccagatcttatgatttatctacgtagctctattcctaacctcgtatcacaaatacataagagaggtagagattatgaaaattctatctctattgactatttaagtcgtcttaatgagcgttatgaagcctggatacatggttataaaaaaggaaagcttctcattatagatgtagatgatattaactttgtagataaccctgaagacttaggagatattattaatagaatagatgctgagttaaacggccttttctagagttaaaacaacactactactcgcttaatttcagttatttacacagagtaaatgtatttctttacatctacaaaatgcttttctaattgaattaaatagtctagttttgcgccttcaaaaactaacaaatattatgaaaaatcttaaatttattttaatccttgctatttctataatggctatttcttgtggtaatgatgatgatggtggtccagcagaacctacactaacaccagcacttcttgaaggaacatataacctaaacttttctgtgagtgaagaagttatagaagaagtagtaacgggaggtacagcaactactactataactaaagtaggtgatacatttggatcatcaaacatagtgtttaatgctaatggaacttttacgagaagctatcaataccgcgttgagacaacgactcaatttgacaataatgaaactacagactcacaaatcattacagagtctaacagtggtagttattcagtaaatgatgatgaccagacaataattatggatggtaaaactggagacgttactgtattcaacaacagccaattaagaattgagttcacagatgttgatgtagaaggcaacagaacaactacaactaatgaggaattacgttttacaagacaataggtaatttgttcttaacatattaaaatcggctgctttacataaagtagccgattttttttgtatcactttataagtcctatggaccttgcatgctcctctgcaaaggagcttttttctactagtactgcaggagtagtctcatactgactcaaaacactttttactctaagcacctttttcttgtgctttacactacgcaaatacacggctattatttgctctggatattcccttgctacttctagataaatatctacatcatgctctccactatctcctataagaacaaacttaagattaggataagtgtttaatatatttctaatctcatgttgtttgtgaggcttttctggtttttgtgttttttcaaaaggaccacgtaagtctcttaataatattgggcctttgggaaatttttgattcctcacaaaggactcgagataactatataaattccatggactgttactcacgtaaaacatcgggtttgcatcttcaccagacttccctctatgtaattttctatagagttctggtgctccctccagcgaagtgcgcttccctacatttttaaaaaacgtatttataattaccctccattttaataaagaggcaacaccagtgtgtaagatagtgtcatctatatcgcttatcaccccataagaagctgtctctgcaggaataagcatctctataggaaatctgttctctcctagcacagtaattcccttttggacatcatcaaaacttaacaccatttgcaaccagccttcatcatttgctagagctcccagtccttcaacttgttcgtcaattttaaaatacccttcggcgtctgtaatagtataaaatgatctattatctggtaaagtcacctttaactttgtatgtcgtaactcatcactagcaaactgtttgtaagcatttttaaatgcagaaagaaaactggtcttcttgaggtctactccctcatgctcaagcgctctacctattaaatacaagtgatttgaagatccgtaagattggtatccgtctatctgtatgggatcagactttgatgaaaaaaacatagtttgtggttttttatgaaattacgctttcgtacttcggcaggctcagcataaacttcagcacactgaaagcgtaaactaaacagttcacaaaaaaggcgtacacataagatggtacgccttttaatattttaggtatggattttactttgctgctgtaatatcttttacctctcctcttgcaggataatcttttttcataatgaaatcaattcctcctaaaagatcatcaaattgcggtcttgcaaatggcatagactgcactgatgagaagaaaagtgtaccgtctggcttgatcaaaaataacccaggctctgtaaagtaatctggttctttatctgaaattgctttagaaatatacaatccgtactctctagctttttctagtgataagttatatccaataggcagtgatggaatgtcccaatcattcccagcgatttttgcacgcttttctgtatcaccacttatagcaattacattaattccacgctccgtaaatttatctaattgtgacgctagatcctcaagctgcgctttacacacggggcaatgcaatcctctataaaaaataatgagcgtgaagttttctgcattttgctcacttaatttccagtttgtatcatttattaaaggcacttctagtgaaggcactttagtcttaggtaatatcataatcttgttttttataaaaatacctgagatgaaggttaaagtatattaatatgacaataaaggtttgttaagaaattatattacacacactattatacctccataccaattagttataaaaaaaagcgagcctaattggctcgctttagtttttaattatttgaatgttagtttcttatttccttttcataatcatccatttgctgtttaacctgagcttctgtacccgtaaattcttttacctctgtagttacatccccattatcatctgtaatagtggtgactgttcctacaaattgtccattttgttcggctatggagaagcgtacttctttttgtacctctctagattcttctatacgaccatcttgagtaatctcaacaacggctccatcttgagtagtaatagcaagcccatcttcactatgaccacctaaaataggcgcaattactaaacctatgaggcaggttaattttattaatatattcatagaaggtccagaggtgtctttaaatggatctccgactgtatcaccagttaccgcagccttatgcgcatctgaacctttatacgtcatctcaccattaatttcgactcctgcttcaaaagatttttttgcattatcccatgcgcctccagcgttattctgaaagattgcccatagcacaccgcttacagttactccagccatataaccgcctaacatctctgcgattgctttatgctccatgccaaatagcataggtagaaaagctattactaatggaaaacctatagtaagtactccaggaagcatcatttcttttaaagaagctttggtagaaatagcaacacatttatcgtactctggcttaccagtgccttccatgatgcccggaatatctctaaactgcctgcgcacttcctccaccatttccatagcagctttacctacagcattcatcgcaagcgcagaaaatactacgggcaccataccacccacaaataacatcgcgagaacaggcgccttaaaaatattaataccatctatatctgtaaacgttacataagctgcaaataaagcaagtgatgtaagcgccgcagatgctatagcaaaaccttttcctgttgctgctgtagtgttacctacagaatctaaaatatctgttcgctcacgtacgataggctcttgctcactcatctctgcaatccctccagcattatcagatatagggccaaaagcatctattgctagttgcattgccgttgttgccatcatggcagaagctgctagagctacaccataaaatcccgcaaaagcatatgatgcccaaatggcacctgcaaataacagcacggatgggaacgtagaaatcatacccgttgcaagacctgcaatgatatttgttccagctcctgtgctagattgttgtacaattttaagaataggtgacttacctaagcccgtatagtactccgtcacagatgatattaccgctcctacgactaatcctacgatggttgcataaaaaacacgcatagaagatatttcttgtaacccttctccaaagaattccatttgcatagtttctggaagcatccacttacaaagtgcgaaacaagcgatagcaactaatactatagaagtccaattccctatattaagtgcgcccatcacctcggactcttttgcatcgttagttttaatttttacgagcatggtacctatgatagaaatgataattcctacacctgcaattgccataggtaataaaataggccctattcctccaaaagcatcggtgatgcttcctcccatatcttttatcacatagttcccaagaaccattgctgcaagcacagtagctacataagaaccaaataaatctgctcccataccagcaacatctcctacgttatctcccacattatctgcgatagtcgctggattacgcggatcatcttcagggattcctgcttccactttacctacaagatctgcaccgacgtctgctgctttggtataaatacctcctcctacacgggcaaataaagcgatggactctgctcccagtgaaaaacctgctagcgtttcaagaactactgtcatatccattgtattagtccaaacacctcccataaagaagtgaaagaaaaagataaagaaagccgtaagacctaatactgccagtcccgcaactcctaatcccatcaccgtacctccaccaaaggagattttaagagcgttaggcagactggttcttgcagcttgcgtagtacgcacatttgttttggtggctattttcattcctatatttcctgcaaaagcagaaaaaacagcaccgcatataaatgcgattacaatgagccagtgtgtagtgggtactacaaaagatacaattgcaagtaagacacttacaataattacaaaaatagtaagtagtttatactctgcatttaaaaaagctagcgctccttcatagatgtgatcagaaatctctttcatcttaccgtctccggcgtcttgtttcattacccaagatttttttacgagcatgtagatcaacccgagtaatgctagtgcgataggcacataaatcattattgattccatatattattaggtgtttttataagggattcttaaataaatccttaaaatatttaacaactactaatgtagggaataagatagaacaaaaaaagcagccataaaggctgctttttttgactattctatactataaaaaagtatctatttgatagtaacttcttctacaggaacatcagattcttcgtaacgttcgatacatttttggataatagcttttgcttcatgaacatctccccatccacctacatctacttttttctcttcaaggtctttgtatacctggaagaagtgctcgatttcttttattaagtgtgggttacagtcagaaagatctgtaagcttactagccgaaggatcacttacaggcacacagattactttttcatctggtcctttctcatctgccatgtgaaatactccaataggctttacttcgattacacaaccaggaaaagtaggctctgtaactaatactagtacatcaagaggatcaccatctagcgcaagagtttctggaataaaaccataatctgctgggtacatcatagaagagaaaatcatacgatcgtaacgcattctctttaatttaaaatcgtactcatacttgttacggctccccttaggaatctctactaatacgtcaaatgttgttactttatctgctgtcataatatattatatttcaaatctcatgtatttaaatacatgagagatgtgtcaattaattcacaatttcttaagcttacactttattaaacagctgcataacaaccatttactttaaaacatatttcttaaggcgtgcaaaaatacgctgaaatagcgatttagccaaatattgatgcgttaagattaggttaggtgtttaattttcaaagttataaatcttcaaaaaagaaaggtgatactaattaaagtaccaccttcaatgttttcacaacggaataatccttattgtgaattgctttcaaaattataaagataacaaactttttttaatctcccttacgggaaaccgcacacttcgtgaatttctttttaatagctttataaaaatttcttacaagacaggtactatgaaaagaatattaggattggatttgggaactaactcgattggatgggcacagataaatttagattttaaaaataaaaaaggcggtataactggtataggaagtagaataatccccatggatgcagccgaattggggaaatttgattctggacaaaccatatctcaaacggcagatagaactggttatcgttctaaaagaagattatatcaaagagataatctccgtcgagaacgattacatagagtcctcaatgttctaaattttcttccacaacattacagcgaaagtatcgactttgataaaaaggtcggtcaatttaaacctgacactgaggttaagttgccttataggatagacgacaatggtgaattccactttgtttttcaagattcttttaacgaaatgattgaagaatttcgctttaaaaatccaaccttattttatgcaagggaaaatggagaagaaacaaaggttccttatgattggacgatatattatttacgtaaaaaagcactcacacaaaaaataacaaaagaagaactagcttggattcttttaaactttaatcaaaaacgtgggtattatcaacttcgaggagaagaagaagcagataaaaataagaagtttgaagcacttaaggtgtcaagtgttattgattctgggcaaaaggtaaaaggaaatattttatatgatataacttttgagaatggatgggagtatgatagccaaataacaaaaaaagaagattggctagacaaaaccagagaatttattgtcacaactaccacgagaaaagatgggagtttaaaacgaagttacaagaaagttaattccgaggaagactggctcgctataaaggagaaaactcaaaatgaagtcgacgtctacaatgacaaaaatcaaacttacggtataggctcttatatatttgatacactacttaataacccaactcagaaaatccgtggtaaactagtaaaaaccattgaaagaaagtattataaagacgaattacagaaaatacttgataagcaaattgaaatacatcaagatttatttactgatgaaagtcttaaaaattgcattgaagagctatatcctagaaatgaagcgcatcaaaatctattacttgccaaagacttcaaacatttatttgtagaagatattattttttatcaaagaccattaaaaagtaaaaaatcttctatttctgattgtccttacgaagtacgtttttataaaaaaggagaagagctaaaaaaacaatcgttaaaatgtattcccaaatcaaaccctatttttcaagaattcagattatggcagtttatccataatttaaaaatttatgaaaaagctggtgataaagaaggaatgcctttaaaggatgaagaagtaactactcagtttttatcaaatgacgatgattatacatcactttttgaaaaactaaacaacagcaaggaaatcaatcaaaagcagtttctatctcattttaagctcaaagaaacaacgcatcattggaactttcctgaagataaaaaatatccttgtaatgatacacgcgcgcaaattgcaaataggttatcaaaaataaatggtgtaaatgttgactcttttctaaccagcgatatgctccaaagcttatggcaccttatttattctgttactgataaaaaggattatgaaaaggcactccacacttttgcagagaagaatagtttatccattgacggctttatcgaaaactttaagcgcttccctccttttgaaagttcgtatggtgcctattccgaaaaagctataaagaaattactgccattaatgcgaatgggtaaccattggaatatatctaacattactacagaagtgcaagaaagaatagatagcattgcttctcgcttaaatgcagttgattacaatgttgaaaaaatagaagctatagcagatgatgatgtacctatgagacttctaaaatcttttgcaaaagagaagaataaagaaaaccctctaaagggacttaacacttatcaagcttgctatgcggtctacaatagacattctgagataggcgatgttttacaatggaaacaacctcaagatatagatacatatctcacaagttttaagcaacacagtctccgtaatcctattgtagaaaaggtaattctagaaacgttacgagttgtacgagatatatggacaacctatggagaagaagaaattataaacgggaagaaacaatacaaaccactttttgacgaaatacatgttgagctaggtcgggagatgaaaaatgataagaaaaccagagaacggatttcaaaatcaaatactgaaagagaaaatacaaatgaacgtattaaggcaattcttgaagaattgaaatctgacccaagtgtgacagatgatattagaccatattcacccagccatcaagagatcttaaagatttatgaagatggactcttttctagtcttaaggaggtcgataatagtattgaaaaaataaggaagaataataaacctacaaaaggagaaattataaagtataaattatggttagagcaagggtatatttcgccatatactggtaaaatcattccacttacaaagttgttttctacagcataccaaattgagcatgttataccacagtctcgctattttgacaactcgatgaataataaaatcatttgtgagagcgctgtaaacgaagaaaaagacaataaaactgcttatgaatttttgaaagaacgtgggggatctttagttgatataggccatggaaatacagtgcagttatttaccatagaaaattacgaaaagcactgtcaaacatattttagaaaaaacaaaaccaaactagagctattacttagtgaagatattccagagggattcattaatcgccagcttaatgatagtcgctacataagtaaagtaataaaaggactactgagcaatatcgtacgcgaagatggtgagctcgaagcaacatctaaaaacttaatcccagtaaatggtgcaataacggctaaactcaaaaatgattggggacttaacgataaatggaatgagattatagcacctagatttaagcgtttaaacgagcttactaaaagtcaagattttggatattgggacgagaagattaacgcttttaggatacaagttcctaaagagttagaacgcaattttagcaaaaagaggattgaccacaggcatcatgcgcttgatgcacttgtaattgcttgtaccacgagagaccacattaattacgttacttccttaaatacatcgcgcaaaaatcataagcttgtaaataaacttagagcgacaaaaacaattacagataataaaggaaagacaagaactgtagcaaaagagtatcataaaccgtgggaaggttttaccgctgccgcgaaaacatcacttgaaaagacaattgttagttttaagaagaataatagggtgatgaaaaaggctaataataaattttggtcttataaaaatgaatacggaaatgttaatctaaataaaaatggaaaaccaataaagaagttacgggcgcaaataaaaggacaaaaccgttctattagaaagccacttcacgaagaaacaatttcaggtttggttcatttaccttgggttaaaatagaaaatggaaaatttacaacagctacaagaaaagaattagacaaaagtttttctttaaaaaagattgaaaaaataacagatacaggtattcaaaaaatattacgtaactatctaacacaaaaaaagtttgaagaattagataaaaacggaaatgtagtttataataccgaaatagcatttactcaagacggtattgaagaaatgaataaaagtatcaagacttttaataatggaaagaatcacaaacctatttataaagtaagaatttttgaaaaaggtagtggaagatttgcacttggctcaaaaggtataaacgataaaaaatatgcgcaaggagcaccaaacttattttttaatatctataaaaatggagattccaaatattacgaaacagtgcctttaaatgaagttattttacatcaaaaaaataacacaattttacctataaaggaaagaacaaatgttcccataaaaaatgtaattattataaaaggaaaggaaaccattgttgattttgtggattgtctatctcccttagatttggtctatatacctacgaatgaagaattagaaaatttagaagatatagattttgagaatttaaatattgagcaactgaaacaagtttataatgtaaatgatttctctggagttacttgttatttcacgccaaacacgttagcaacatctatttgtccaaaagaagtagatttgaaatatgatgagaaaaagaaaaaaactactggttcatttgatactaaaacggcaagcttaaatggcaattccataaaagaacgttttataaaattaaacatagatagattaggtaatgttgcaaaagtaggaatatgataaaaaaaactctattcttcggtaatccagcttacctcagcacaaaaaatgaccaactggtggtttcttttcctgatgaagatagagaacagaaaacgattcccatagaggacttaggttacgtagtattagagaactcacagataactatcactaatggcttactcatgaagctagtacaaaataaaaccgccctcattacctgtgatgcccaacatttaccttgtggttttttacaaccgttggtgggtcatacgttgcaaacagaacgcatgcgtcaccagcttaatgctagcttacctcttaaaaagaatttttggcaacaaactgttgctgccaaaatttacaatcaagccttacaccctgaagctagaggcaataatggtctcaaactacgcaactggagtactgccgtaaaaagtggagatgcagataatcatgaggcgtatgcagctgcctattattttcaacagctatttagcgaggtagaaggttttagccgtaatcaaaaaggagtagctcctaataatcttcttaattatggatatgccatactgagagctattgtcgcgagagctttagtgagtagtgggatgttgccgtctgtgggcatcttccatcgcaacaagtataatgcattttgtcttgcagatgatattatggaaccgtaccgtatttatgtggatgccgtagtctatgaactagtagaaagtggttgcgacttgaacgaactcaataccaagttaaagtcagaactactattaattcccgcgctagatgtatatatagatgggtcatggtctccacttatgaatgccgtaagtagaacaacgagtagcttatatgattgttttgcgggcactaaccgtaaagtgctatatccagaatatgccttaagcagacgctaacatcgctcaatgtcaaacaattttacacggcttaatcaatatcgatctatgtgggtacttgtattttttgatttacctacagaaacgcggactgagaaaaaagtggctgctcgatttagaaaagagcttcttaatgatgggtttgccatgtttcaatacagtatttatatgcggttttgtgcgagtagagaaaacgcaagtgtacatatacgacgcactaagaataatttacctaaaaaaggaaaaatctgcatcatgcagattacagataaacagtttgggatgatggagctctttcatggtcaaaaagaagttgcaccagaaactcctagccagcaattagaactcttttagaaataacaatctcgcctttaactagttaaaggctcaagttaaacctccatttttttaatgctatacatagacgtaaaaaacagtataccagctttttatagcgggtatactgtgattacctatctaaagatataattctgaaagcaattcacaactctttcatctcgcacatattaatcattcttactgtgattagctatctaaagatataattctgaaagcaattcacaacaagccattgcggcagccttgataactcacgactgtgattacctatctaaagatataattctgaaagcaattcacaacaacaagccacacaatgacgattagatgtaactgtgattacctatctaaagatataattctgaaagcaattcacaacagtatgcgagcattttgggcaagtgtgcgactgtgattacctatctaaagatataattctgaaagcaattcacaacggataaagcttttttaaaaacaacactaaaactgtgattacctatctaaagatataattctgaaagcaattcacaacagaaagctattgatttaagtcctaatgctactgtgattacctatctaaagatataattctgaaagcaattcacaacaaactatcaatcaaatgctcatactctggcactgtgattacctatctaaagatataattctgaaagcaattcacaacatagggttactttttgttcttctctcttagactgtgattacctatctaaagatataattctgaaagcaattagcctaaatggtttgaggctacatcataaaaaggatagtacattttcgcaaaagcgtaaaaatctccttaaaaataaaacccaaaactaccggttactcctattttcctcgcatctggaacagaattataatttcctctgaagttaaggtcaatacggaacactttaaatatattacctactcctacgctatactcataataaggctctacagatggagctatcatgctcggagtaattgcagtaataggttgtccttcttcaaaaagtaaactctcaaatgctggacggtttaagtcaatattcctttgagagatattacctatcaccccacgcacgcttacaatctcacgtaaattcaaatttttaagtaatggaatacgattaaaaatacgccctccaaaattgtgttctagctgtagtgaggcatactcatctgtagtaaactcataaaagttaagctggctaaaggtattaaagattgaaaataacgactggttacctggtactggacttaatagcgctagtggcacctcatcaaatgttttacctatttctgtagaggctgttaatgtacctagacctccaatacggattgccttctttgcagaaaattgcactttatcataagcaaagtcactatcaagtgttccttctaggccacgtgtgtaacttgcataaaaactaggaaaccattcattagttactctacgctctactccaaaacctgaagttttctttcctggctcccagatagtggtaaggaccacttctgcttgttttaactcacctgtggtagtggtttgcgtagcatctgtaaaataatcaaggctaaaggtttctgaagccgactctaacgttctcaaagagaagtcggctctcacttgaaggttgcgcacaatctctacctcggctgcgatatttgctagcttgatagaggtgagtttatcattggtcgcagtatttactagtgaggatgatgctagatttcttcctagcacatctctagatgtcgtaagacttgctcctatttgctccacgtcttgtctataaccaccagaaacaataaacctgctttttttatctagcagccattttcctgaaaccccaaattttccttttttatccttaaatccgtatgctaaaaatccttctaatctccatggatcattctgtgagaaatatgttcttcctcctgtgcgcacacgtaatccttctacctcgttaaatccaaaggttgaaaatataggcccgtaatcaaagtttaaacttgggatttcatagtatccagatgcaagaatggaacctagattataaaggtttttaaatttctttaccgtttttaaggtgtcaagcatcttataaactcctagctcatctttactaagtgcctcttttctattttcttgccagaactcatcactacgattaaaaacatctttatcatagttatacacttgtctgtcgtaaaagtccttttctagcttattgtcaaagttatgattatcgtacaatgtagtgcgcttaccgtacatacctctagattcctccttttcgcgcaaagcgaaatcagataagaaataatctcttgaaagtaagaaggtgctatcatttacgatatcaaattcttgctccatataaatctcttttacccagtttacatttgcacttttagaaagctgcatattgatttccttaatggcccatgtagagtcattcacccagaaatctcctttaaaggtcagttcgtttttacgtctagggtagtaaataatattgtaacaccacttattattgatgtaagcactatctgcaagtacgtagttataggtttggatacctgtacgagaaattggacttgtaaaactcttgtcaaaaaactgtaaatagttatcatagatgtcataatcactatacagactttttacaaaacctataatcgtttgattctcactaaaaccactgtttttattcccctctagaatctctttttctttattaatttcattatcaccatatacttttgagaatgcctcatttacaaaaataggtaggtaggtttttccagtaatacggcttgtgtctgtttgctcaaagatgaactccatccctctaaaaatgcggctgttaataagcgaactatcaatagtgttaagatcaaactctagcttttcatacttatcataagcatactgcttgtactgtcgtaatccgttctggcgtttatttgcccatattttacgaagtatatctaccgctgggttgtttttcttgtctgtttttcctgtaaatatgactacctcgtctagcgctcctgcctcttcctctagcgtcactttcatctcataatttaccttctcacttaggtctatcaccttatttgaaaagcctataaaagaaaatcgcacttgaccccatgtctggtcagattctaggtaaaaacgcccgtcttcattagttatcgtcccctcattagacccaacaaatatgacatttacaaaaggcagaccattaccatctgcgtcaaaaatctcaccactcactttggtttgaccaaataaatttgcagcgcagagcacgctagcaataatgagtaaaaaattatatttcataataaataatctatgaagatagcctataaattggggacatcatcggtttataatggtgctacatcaagcatttgacatcatatctatcacaaccttacttaagattataataaattaaaaaatcccttccggttaagaaagggattaaatatggttccgctttcgcgaaaatattatttatacatcacctttttaactgcatttactacatcgtcactgttaggcaaccactctttaagtaatactggtgagtatggtgcaggtgtatctgctgtatttatgcgttgtataggagcatctaggtgatcaaaacaatgcgcttgtacttggtatgtaatttctgttgaaacgtttccaaaaggccaagcctcttcaagaatcacaagtctgtttgtttttcttacagactcaaaaatagcttctttatctaaaggtcttaccgtacgtaaatcaataatctcacaagaaattccttcctctgcaagttggtctgccgctttgtaagcttccttaataatctttccaaaagaaacgatagttacatctgttccttcacgcttaatatctgcaacacctattggcaatacatattctccatcaggcacttctcctttatcaccatacatttgctccgattccataaaaatcacaggatcgttatcacgtattgctgcttttagaagtccttttgcatcataaggattagaaggcactactactttaagacctggcgtatttgcaaaccagttttcaaaggcttgagagtgtgttgcacctaactgtcctgcagatcctgtaggaccacgaaaaacaataggacaaggaaactgaccaccagacatctgtctaattttggcagcgttatttataatctgatcaatacctaccagtgagaagttaaaagtcatgtactcaataataggacgtaatcctgtcattgtactacccacacctattcctccaaaaccaagctctgcaataggagtatcaattactctatctgctccaaactcgtctagcattccttttgacgctttataagctccattatattctgctacctcttcacccattaaataaacagattcatcacggcgcatttcttcgctcattgcctcacaaatggcttctctaaactggattgttctcatagtatataaaccgctctggcggaaatttaattaaggcttctcataacattgaaaattaccttattaatattgtattcttttaacaagcacaaaaataagcatttccaaaacctcaataaattacatttttgtaaaattttactatgcacgcacagtaaattatacttttttgtgttatttttgttacgaaaacgaaatagtttaggattacgctttcgcgaaagcgtacctttatataaaatataaattctatgaaaatattagtgtgcatcagtcacgtacctgatacgacatcaaaaattaacttcacagacggagatacaaaatttgatactaacggtgttcaatttgtaatcaacccaaacgatgagtttggattgacacgtgctatgtggtttaaagaaaaacaaggagcctctgtagacgtgataaacgtaggaggaccagaaacagaacctacacttcgtaaagcgcttgcaataggagcagatactgccatccgtgtgaatgtggaagcaaaagatggttttcaagtagcaaaggaacttgcaaaagttgttcaagatggagggtatgatctagtaattgctggtcgtgagtctattgattacaatggtggtatggtacctggaatgcttgctggacttacaggagcaaactttgtaaacacatgtatctcactagatgtagacgggacaacagctactgctactagagaaatagatggcggaaaagaaactgtaaagacttcgcttcctctagtaataggaggtcaaaaaggtcttgtagaagaaagcgacctacgaattcctaacatgagaggaattatgatggctcgtaaaaaaccattaagcgtagtagaaccttctggagctggaaccgaaacaaatgctgtttcttttgaaaagcctgcacctaaaggggctgttaaacttgtagaaacagtagacgagttaatcgacctgttacacaacgaagcaaaagctatctaagttacccttttataaaggcaacttgttaatctaataataatcccgaatagtggaacctcgtgttcttctctttggaaattcttataaatatgtcagttttagtatatacagaatcagaaaacggagtgtttaagaaagcttctttagaagttgcttcttatgcaaaaggaattgcagatatgatgggaacatctgtaactgcagttgccgtaaatggtggagatactgcaccattaggaacttacggagtagataaagttcttaacataaaagacgcaaagctagatgcatttaatgctgcagcttatgcaaaaggaatcgcagctgctgcaaaggcagaaggtgctcaagtagtagtacttacacagagcgcaaatgctaagtatcttgcacctcttctagcagtagcgctagaggcaggatacgcatcaaatgtagtatcacttccagaaagtgcttctccatttactgtaaagcgtactgcttttacaaacaaggcttttagccacacagaaatctctactgaaattaaaatagtaggacttgggcaaaacgcttatggccttaaagaagcttctggagccgctgcaacagaagacttttctccagagctcggagattttggtgtagaagtacaatctgtagataaagcaacagataaagtgtctattgcagatgcagaggttgtagtatcagcaggtcgcggacttaaaggaccagaaaactgggggatgatagaagaaatggcagatattcttggagcagcaacagcttgttctaagcctgtgtcagatttaggatggagacctcacggtgagcacgtaggacaaactggtaagccagtagcgtctaacctgtatatcgcaataggaatctctggagcgatacagcaccttgctgggattaactcttctaaagtaaaagtagtaatcaacaacgacccagaagctcctttctttaaagcagcagattatggaatcgtaggagatgcttttgaagttgtcccagaacttaacgaaaaattaagagcgtttaaagctgcaaatagctagataacgactctataaaataaaaaatgagcttaaatatttttttaagctcatttttatttaacccttttcatactgtaaatctgatagatagctactatttctaagagtccaactctagacagataaacttctttacttatgcagcctttttcctatttttgcaacttatgagcttagtgcgtttaaatataaaaggaatatcctacagccagactcagaatggagcatatgctttgattctcactgagcaaggaggagagcgtaaattacctatagttataggagcctttgaggcacaatctattgcaatcgctttagaaaaagaaatcaaaccacctcgtcctcttacgcacgacctgtttaaaaactttgcagatcgctttgatgtggttattaaacaagtgattattcataaacttgttgatggcgttttttactctagcattatttgcgagcgtgataacattgaagaaataatagacgcgcgtactagtgatgctatatcactagccttacgtttccaagcgcctatttttacttataaaaacattctagacaaagcaggcattttcttaaaaggaaacacaaaccctgaagagtttacagaagatgacgaaatcctaatggatgaaatcttactagaagacgagacatcttctagcgatagtgattataacaaattgtcacttcaagacttacacaataaacttgatcaagcggtacatagtgaagactatgaaactgctgcccagttaagagatgaaatctcaaaacgcaactaacttacttattatatgcgcaaattactacttaccctattggtattattaagttcatttaccgcatttgcgcaagaggcacctcaagccattatggatgtggttccttctcaaggattttctcttgaaagctttggacgtggtgtattagggatgtgctctcttatactaattgcttttttatttagtagtaatcgcaaagcaataaactggaaaacggtagccgtaggcctcgcattccaacttgttattgccgtaggagtacttaaggttgcttttatagaaaagatttttgacttcattggaggaatctttgttgctatattaaactttacgcttgctggtagtgacttcctgtttcaagggctggtaagtgacacctctacctttgggtacatatttgcttttcaagtattacctaccatcatatttttctctgctcttacctctgtcatgtattactttggagtaatacaaaaagtggtaaaagcttttggatggttattatctaaattattaggcatctctggagcagagagtttgagtgttgctggtaacatcttcttagggcaaactgaggcaccacttttaattaaagcatacctagaaaaaatgaacaagtcagaaattctgcttgttatgataggcggcatggcaactgtagcaggagctgtacttgcggcatacataggattccttggcggtgaagatgaagctttacgcctcatatttgcaaagcacttgcttgctgcctctgtcatggctgcacctggtgcaattgtaatatcaaaaatattatatcctcaaaccgaagaggtaaacacagacgtgagtgtatctaatgataaaataggagcaaacgttcttgacgctatcgcaaatggtactacagaaggtcttagacttgccgtaaacgtaggtgctatgcttttagtctttgtagcttttatagcaatggcaaacggtatcttaggttggataggcgaagtgaccacaataaatgattgggttgcagcaaactctacataccctaaactttcacttgaggccatcttaggaaccatctttgcccctttaatgtggcttataggagttgcaagtgaagacaccacaatgatgggacaactactcgggatcaaactagcagccagcgagtttgtaggttatatccagctcgcagaacttaagaatactgcaaatgcaattcacctcaacaatgagaagtctatcattatggcgacttatatgctttgtggttttgcaaattttgcctctataggtatacagataggcggtattggatctctagctcctggacagcgcacgcagctgtctcgtttcggattaaaagcgcttatcggagggtctatcgcttcattaatttcggctac

SEQ ID NO: 1146 - DNA, 24506 bp, synthetic construct
  misc_feature 1..24506: note = Synthetic
  source 1..24506: mol_type = other DNA
tgcgctatcagctgctcgttagtgaaaaagccaagtgcctctcttacctggctcaatcttttttcaatactgctgaggcccgaagggtgtacccggtttgttttcaggtagtccgaaatttcctgttgcctttttccttcagccatcagggatagaacagttatatcgaatgaggtaaattcatgtgcttttttatattttacctggtctttgaaaaaagccggtgtataatactcattgttattgatggtggctaaagcctttgatagttcgcgggcatctcccctggcttttcgaacgtatccatcaatatgtaaatctttaaaaagtgtttcgacaacagcgggtctgctttcggcagaaaataccaggatcttaatagccggctgaacctgtcgggctgcttcaataagcgctttaccaccagataggtattgttcccgatgatctttatcaaaatagaggtcagtaataagcaaatcatatgcactatcctgctctatcgctttttttattttgagcaaggcatcatcacagtaatacacgtaatcgggatgagcgatacccaactcttccagcgttttttgcacagagatactggcactttcgtgatcttcggctatcaatactttttgtatcattcgggtcatgaaatcggaataaatatttgaatgtttaagcccgctgttgacgggtagttaaaagtaaactgtccgccaatacttttgatacggttttccgtattcctgagcccattgccataatggaagtctgcaggtacccctttgccatcatctgtgtaccggatatgcagcccgttttttccttcatcaaattttactactacattctttgcggcgctgtgttttttcatatttaccatcaactcctgcaatgcacgcttcagctcggtccgggcactttcgttcagcccgttccagatgtgatggttattgcctacaatagaaatacttgtatgttcggtggaaaaagatttcagcagttccgctatttcgtcattgaagctttgctttggcgcgtctgttgtttcataagaaatgtcgcgcgactgttcatacaaaacctccatatcatctaatagctgttgcttttctataccaggctggtattccattttgatcattatccggtataagccgttagccactacatcatgtactttttgtgaggtttttagctgttgctcccggagggattgctgtttttgccttctgtaccagaataaaattgcaaaagaaaggattactatcccgccaagaatcacctgctgccctataatccgtacttttttttctgcattttctttttgaagtaccaggttttcagatttatgtttttctgcttcataacgtataagcgcaaactggtttttggcgctgttacgggccgtttgtaagctgtcgtttaactgctgataccgcgcaaagtatttttttattgtatgggcagggcttagcgtaattaatttctgcaatgcctctgcttcatcatcagggctattaagctgttttgcgatgttaagcattttattggcataaattaaggctgaatctggttgagtctgcccataataatctgataaatgtgaatagctggcatttaagccccaggtatcgttttcgtttttccgggtttgaagggcttcgtgtaattccggagtagcattgtagtctgggtcattaagccattttgttttggccatattggatagaacacgggcatattcccgattgttgcttctgctttcggataaaatggaatcgtaaatggcaatcgcctgattgtattgtttttttgcctggaatacaacagctttattgtttaaattagtcaatctatactgttgatccttagaatacaccaatgccaggttatagtagtgaagtgcttcgtcaaatttttttaaacttcggctattattaccaagttcattgtagtttgaggaaatgagaccttgctctttttcacttttttcatcaagatgttttagggataaaagcagactttcctggcttccaaaatagtctccaaccttatgttgaataatgcccatatacgtataagctgcggctgctagcaggttgttgttcgattcagatgcaactttattaaaatagtaaaaagcagaatctttttcgttttcaaatagagactctgcctttacatataaaccggacggaataaccgatttggaagaatcgtttttgttacatgctgttaggcaaaatgctgcaatcagaattggtataagcaggggcagcttcattaaacaggaatttgcccctaaaagtaaagcaaaaacgagtattttttgcatagatagttggcaaaaagagaaagctcttattgcaaaaccggatgcaaatgcacgcttccagactctttatcaagtagaaagaagccgtcccgtaagacagcttcttatttgagcagatattatggccgtgtaggtagtttgggtggtgtatgccccgtttccccaccggtatcatccatagtagttattatagtattgttattatcatttgttgccgtatggtaatgaccaggcagtaacgacaacaggaatgcgagtattagctctatcattgttttaatttttaaaaaagtgattgaatgctgctcccatttttggggcagtgtttaagtgtgcggtaagaagcgcttcttacacgtttgggaagtggtgcgggtattgatcgcggagccgttaaacgcttcccaaagccggtcaacagcaaccgctttcaacacccggggaaatcagctctgtacagtgtgctcttagcaagggagcttttttaactgattgcagaaacaaaggtggattgagataatgcgctggttcataatggttccggtaattctggtctttccattggaattccggtaatgcttacgggattccgtaaattcctttagctttagtacataatttttgtaaaatgtttgatgtataccaggaacttgttttacggttttatctgcgtaagcagcaggaaaatgatttgtcgctgaacctggtaaacccaacgccggcaaaaattaaaaagcaatgtgaggctgtttgcagcaaaaaattttccagaaaggatggaagggtattggaggctttttttggggaagggaatgatcaggccgtaatactaaaggcaatcagaaggtgtgatgcggacaggtttaaacccctgataaaatttctgaggaaggaaacggctgcaaccagcgaaaacaacatcgagctcctggcctggctgatagactttaatccgaggccttttgagctggggaaggattatacttgtttgaataatacaaacgactttgaaattgttgatgccggagaaaatgttaccggcacatccggagttgagaataaccgggatctggaagagcaggaaaaagttgagcatcaacccggtcagtctccaaaagaaccgccagccctaccggcaaaaaacgaggatttaaaattatcgcaggatcgtctatagccgttgcattggctttatcgggtgtatttattaacaagataaaaggtgacccggatgctgctttaactcaatccggtcattgtatgtactgggcaggcgatcattatgagcccacgccctgtatacccaaaagaggagatactttactgattgaactggattcagcaaagctgttccggtttaaaaaaatagcggctccaggaaccattaccaaggatgatattgggagagtaacgtatataaggttggacggaagaagagaatattatacggatacaggagctcacccggtttataccaataaaaagctgaagctattaacaaagtttatttatgaaaggcatatccttccgctgaagcagtagcttttatggattcccgtaatgatatatacgcgctcattcctattattgcactgcaattacaatttatttaaatgaacaggtacgtgatattgctgatggtgctgtttgttgcctgtaaaagtactgtaagcgatacatacggtagcactcaactatatgctgctgtcagtgaacgggcaggttacaaagtgattggcataaaagatggcgacacttttgtattgctgataaatggcaaagaacaggttgtaagactggcacatatagattgccctgaaaagaagcaaccttacgggaataaagcgaagcaattcgcttccggtgcgtgttttggaaagagtgttacccttgtgcataacaataagtatgacaggaataaaaggctgatagctgaaataatgcttggcgatgacagaaacctcaacaaggagctggtgaaaaatggactggcctggcattttaaaaaatattcaaatgataatgcttatgctgcacttcaggcagcagccagaaagaagagggtcgggctttgggcagacaaagatcctgtagctccgtggagctggcgccgtaaataaaaagctgtccatttgaaaaacgccttttctttttggtaaaaatcttcccacttacggtttcccgtaatttattgggacagcgcttgtttattttagcacctgttactgctaaaataaatgtccccgatatggaaaatgatttaaaattaaagctggaacagctgcaccaaagagtagatgcattaaaggaccagatcaatacagaggaagccaccaaaaatgcctttgtgatgccgtttatacaaataatcggctacgatattttcaatcctacagaagttattccagagtttatttgtgatataggaaccaagaagggggagaaaatagattatgtgatcaaaagagataatgagccgattttaataatagagtgcaagcactggaaagaaaatgcagacgcacacaactctcaactgcacaggtactatcatgtttccaaatccaggtttggcgtattaaccaacgggcatgtgtacaatttttatgctgacctggaacggcccaacattatggatgataagcccttttttacgttggacctttccaacctgaaagacgccaatattaagatacttgaaatgtttaccaggaaagggtataatcttgaaagtattttagattcggcagaagcacttaaatatattaaagctatccgaaacgagtttgaaaaagagctcagcgaaccttcggatgacctggtaaagcttttggtaaacaggttttttgagaaaccgttaactgcctcccggttagctacttttaaagaatataccaaaagggccatttctaattccattaatgagtctatcagcttccgtcttaaaaacgcgttaagcattaacgaaaagatccccaccgtgcaggaaaatgaggaagtggaccccattgatgaaaatacagaagctcctaagtgcatcacaaccgaagaagaaatagaaggttcacaaatcataaaagccattttaagggaagtggttccggctgcacggatcgctttcagagatacgcaatcctatttcggtattctgctggacgataataaccggaaaccactggcgagactacacttcaattacaccaaaaagtacctggagcttttccacaacggaaaggataacggcgagaaaaaactgttaaacagtcttgacgacatatacaaatacaggaaagaactgttagcaacagtcaataattaccagcaaaaagttgaaacagaggaggcttccaatgatagataaagtatattatggggaaaaactttttgatcccaggtggattgaaaaaaggaagcgtattttacatagggataataacaaatgtactatatgtggtaaatcagagggaaaactccatgtacaccataagcagtatcattacataaaacgactacaaaaacatgctagcccctgggattataacgatagtctcttaaccacactctgtgagagttgtcatagccggggccattacaggtataaaatacctatcaaatacatttaataataacttttactttaaactaattaacacaatgggattctttgactttttcaaaaagaaagcaccaactcctgtagagatgcccggggaaatgcggggtacgatacttcctgaaataaaggaggaagattttattgataattcggagccggcagaagaaagcacttcaacatactcggtagaatttggttccaaattgccaatagacattatttatagctttttgaaagaagactatgaaaataaagcatacaatgatgctttaacaaatccagataaatcttacaaggaaacaaacctggcaattgtgcgtagtaaccttgagattaaatttaagcaggtgtttttgagatatgaagatatgttgcgtgagattgattttcatattcattcccgtgggcaggcagggttaactgatattgttgagctactaaaatcaaaaagaaatacctacgaaaagcacctggatgagctgcaaataatgaaaatagacctggataagggagaaccctatatgatgggaatattcaaatcgtacgaagtaggatttacccgcgggttggcctccatatctctgcataacttaaaaattgacaacagtttatgaaaatcaattggtggaccaaaacaggttgcttgataaccggatggaattacgagatattgggaacctgtacagaggcgagcaggaagcagctaaaaaaatattcttcagcgattttaatattgatcattctttgggccttgatcgggtatctatttgcccaaaggtatgtaggtgctccctggtggggatgtataatagctgctgttatttttgttattatcattgtacaaattgagcgacagattatccttactgtgggaaaaaataaatggctcggcttgttccgctttgttattgcttttattatggcgatactggggtcggctatcctggaccagattattttcaaagatgatattgagaagaaaatgatccagatagtagaccggcaggtgaatgaacaattacctaaccgtttaacaattattgataaaaagctacaggagttgcagatcgaaatagattcgctggaccgaaaaaacctggaactttatgacgagatatccagacgtccaactattcctacagtttccagaacaaccacaacgatacaaatgaagcaagcagacggaagtagtattaccaaacctcaaactactatttcaactacgccaattcccaatccaaaggtgaaagaggcagaggttaatacccagcatttagacgagcttcgaaagcaaaaggaagcatatacacaacgtaaaatgcaggcagaaacgactttgaggcaggagttaaaaactaaacagggttttcttgaagaactaaatgcaattatagaaattttggcggaacgaaaagtggcccttttcttctacctgattctcttcggttttttaatgtttttggaattatttgttgttgtaagtaagattggagataccaagtctgactacgatctggtcgtggaacatcaattaaaacaaaaaatcaagacgctggagcaactggtaaaataaatttttgttttatggcatggagttacaggcggaggataaaaataatcccgggtgtacatttaaactttagtaaaagtggcattagtacatctattggtgttaaaggcgccagtttaactttaggtaagaaaggagcttatttaaactcaggcattcccgggttaggtatttacaatagacaaaaactttctggaagtaataagcccagcatagatatagttccaacaaacgataatcggccacaattaaattatgcactcaatttcgcggttgacaatattttcagtgctgaccctcaggaaattacttcccaggacatgcaaggggttaaggaagccatacttgcagcccatgcacaaagaacatggcttaataatgatttgcaggatgttcaaaaagccttgtccaaatcaaaaactaaactaacgattagttatttatttctttatggacttatcaaaaagtcgatttcacaaaagataaaggaaaatattttcagccaaaaaattgcaattaataaaattcaggaggaaattgaaaatagtgctgttcgacttgactttgagtttgaagatgattttctaaaaagctatagtggtgtcgtggactgttttaaaaggttgtgcacttccaataaaatttgggatgtaacaagtgcttataatcaagacagagttattgctagatctgccgcatcaaccatagtaaataaaaaaatggttcggcttgacataaaagcaattcctgatattaagtcaaactttaatccactatattttcagaatggtaatggagcagacatatacttttatccaaactttattattgtgtattcgtcaaggcagaaatttgcaatcataggtttgaatgaactacagtttaatttcacaccagttcgcttcgtggagaccggaacagtaccaaacgacagcaaaattatcgacagaacatgggctaaagttaataaaaatggaactccggataaaaggtttaaaaacaattatgaaataccaattgtgcgttatggtaacatttcgcttcaaactccaaccggattaaatgaggaatatgaattcagtaattatgaatatgcagaaacctttgccaacgcatttttgaattaccagcatgcaatcaaaactttacgaaatatttgaatgatgaaggagacgtttccactctgatgggatattctgctttcttccagaacaaacatattctctgttacagtttcctgtaaaagcaacatgctgcccgcatataaatttgtataaagcaaaaatataatactatataatgaaccggatttttataatcttactattgttattttatacgcaggtgtcttgcgctcaaagaaccataaagcatattgtaaaaactacggaaggcgttactgtaaaattatatgacgactatacctgggaatacaccagccagcagcaatcgtcttatggtaataagaacagcagaaagacatacaacgccggcttaagcagcagtaaaaaaagcagcacggttaagaaggaaaccactacccgcaaagccagctccggtagggtgtatcatcgtggccccagaggagggtgttattattatactcctggtggcagcaaagtatatgtggacaggagctattgtaattaagaagaattattttttaaagagttaggagcgctgtgcctgtgtttttcgtaactttataggatagctaatatgattataacacttaaatttgcctatgaactccgccgcacacactaacaagatacatgaaggacgaaatgtaaagcgtttccgcgaaatgctgggtataaaacaggaagccctggcttatgaattaggtgatgactggaaccagaagaagatatctgtactggaaaccagggaaacgattgatgtttctttacttcaacaaatatctgctgctttaaaaattccggttgaggcttttcagaattttgatgaggagcaggcagtgaatgtaattgctaatacttatacttttcaggattttaaagataatgctgttgcttcgggatttagttatcagccgtcctttaatcctattgataaaatggttgaattgtatgaacgtatgcttcaacagcaaaaggaaatgattgagaagttgcaggagctgattgaaaagaaataacctaagtaaaaattgaaatgaaaagcaaggtcgcaaaaaggattcagaaagaaacgccggaagaagtgcgcttttttgttcgccaatatgcagacattattgtgcgtgctaatgatttgctacagcaaaaggctatacaaagaaggaacttgtcgaaggggatgaagtaagtaaggcctcatagaaaaaataattacacattgaatttacagaacagctccttggatagcatccggggatcgacgctccgggaacggggcgttttgtgttttaggagtgaaaataaaaatgccccgcaggtaggcgaggcgctaaatgttttcacaacggaataatccttattgtgaattgctttcagatacaaatatagagtatattttatttggccaaatacggaaacccgtaaaagcaataatttatatttattattttagggctattaatttaactattatgggtaaaacgattcttggtcttgacttagggactaactcaatagggtgggcgctcatccaaaacaattttgaaaataaagaaggaaaaatacgtgggatgggaagtaggattattccgatggggcaggacgttttgggagagtttgggaaggggaattcggtttcacaaactgcggacagaacaaggtttagaagtacacgccgtttgcgtgaacgtcatttgctgcgccgttcccgtctgcaccgcgtattgaatgtgcttggttttttacctgaacattacacgaaagagcttgattttgaaaacaaggtagggcagtttgttgaggaaacggagccaaaaattgcctggaagaaaaatgagataggaaaatttgaatttctttttcagcaatctttccatgaaatgctggaagatttcaaagctaacggactgtatattaaaataccttatgactggacaatttattatttacgaaaaaaagcattaactgaaaaaatatcaaaagaggagttggcgtggttgatattgaatttcaatcaaaagaggggatattatcaattgcgtggagaaggagaggacgtaaatgataatgtaaaagagtttgtaattgctttaactatcacaaacgttgaaaagggtgaggttgataaaaaaaacgataagcgaacctggtacaaaatggcgttgtcgaatggttgggagtattctgcaacgttcacaaccgagccgaaatgggaaaatacagaaaaagaatttttggttgtagaagaatatgatgataacgggaatattaaaatcgtcaaagataaaaaatcggatacgacaggaaaagaaaaaagacggattacaccattgccgacttttgatgaaatcaatttaatgtctaaaaaagaccaggacaaaatttacggaaaaataaaagcaagaacagaattaactattaacaatagtagaacaactgttggcacatacatttacgatacactgctacagaatccgaagcaaaaaataaaaggaaaactggttcgcaccattgagcggaaattttataaaactgagcttaaacagattttagaaaaacaaaaggagtttcatcccgaattgcaaagtgaagatttatataacgattgtgtgagggaactataccgcaacaacgatgcacatcaaataacactgagcaaaaaagattttgtgcatttgttattggacgacattattttctatcaacgcccattgcgaagccaaaaatcctccatttctaattgtacactggagttcagaaaatacaaagatgcaaacggagtggaacatacggaatatttgaaggctattcctaaatctaatccatattaccaggagtttcgcatctggcaatggatttataacctgaatatctacaaaaaagatgatgacacgaatgttacacagggatttttaggcacagcagcagattttgaaaacctgtttgattttctgagtaaccgaaaagaagtagagcaaaaggcggtgatgaaatttcttttggaacaaaaaaatttcaaaggaagaatgctgaatacagaagttgaaaaataccgctggaactacgtagaggataaaaaatatcccggtaacgaaacaaaaacgatgattgcaacacggttagggaaagtggaaaatgttcctgccaacttcttaacaagagagattgagcagcaattatggcatataatctattccgtaaacgacaaggccgagtatgaaaaagcattgaaatcttttgctgcaaaaaataacttggatgaaaattcgttcgtggacggctttagaaagtttccgccttttaaaagcgaatatggatcgttttcggaaaaagcaatcaagaaattattgcctttaatgcggttgggaaaatattggaattggggagaaattgataccctatcaaaggaccggattctaaaaatcatcaatggcgaatatgatgaaaacatcaaagataaagtaagggaaaaagccatcaatcttacttctgaaaaccattttcagggtttacagttgtggttggcacaatatattgtgtatggacgccattcggaagcggcaatggccggcaaatggaatagtgcaggtgatttagaagactttttaaaggaatttaagcaacattcactccgcaacccgattgtggaacaggtggttaccgaaacgcttcgtgtagtaaaagatatttggcagcagtacggaaacggcgttaaggatttcttttccgaaattcatattgagctgggtagggaaatgaaaaacactgccgaagatcgcaagaagattaccaatatggtaacggaaaatgaaaacaccaatctgcgcatcaaagcattgctggctgaaatgatgaatgacaaggaagtggaaaacgtgcgtccgttttcaccgatgcagcaggaaattctgaaagtgtatgaagatggagttttaaactccgatatcgaaattgatgatgacattttgaagatcagtaaaacagcgcagccttcatcatcagatttaaagcgttacaaactctggctggaacaaaaataccgttcgccttacaccggtgccattattccgctcaacagattgtttacgccggaatatgagatagaacacatcattcctcaaagtcgttattttgacgacagtttcagtaataaaatcatttgcgaagctgctgtaaacaagctaaaagataattatatcgggcttggatttattaaacagtttggtggcaccattgtggaatgcggaatgggaaaaacggtaactgttttaaagcagggagaatacgaagattttataaaaaaacactatgccaaaaataggggtaaacgtacaaaactgttgctggaagacattcccgaaaagatgattgagcggcagatgaacgacacccgctatatcagtaaatacatttcgggcatactttctaacattgtaagaaccgaagacggaacagatgagggcataaactctaaaaatattgttcctggaaatggaaaaattactacacagttaaaacaggattggggattgaatgatgtatggaacgaattgattttgccacggtttgaacggatgaacactttgaccaattctaaggattttacagcatggaatgaaaactatcagaaatttttaccaactgttccgatagagatttctaaagggttttcaaaaaaaagaatagatcatcgccatcacgcaatggacgctttggtaattgcctgtgctaccagggatcacgtgaatttgctcaataatcaatctgcgaggtcggatatgaaaaggtacgatttgcaaaataaattaaggcggaaagaaaaatatttcaatcaaaaagaaggtagagaaaaggatgcatttaaagaattctataaaccttgggaaacttttactcaggaagcaagagcggctttggaaaatattgtagtgagctttaagcaaaatctgcgagtaatcaataaagccactaaccattacgaaaaatgggtagaaaaagacggagtaaaaactaaacagcaggtaaaacaggaaggtacgaactgggcaatacggaagccaatgcacaaagataccgtttctgggaaagtccatctgccttggataaaagttccgaaaggaaaaatccttacggcgacacgaaaaagtttagatacctcatttgatttaaaaacgattaattctgttaccgatactgggatacagaaaatattgaaaaattacctagcagaaaaaggcagtccggaattggcattttctcccgagggaattgaggatatgaataaaaacattacaaagtataacgatgggaagcagcaccagcctatcaacaaagtaagaatttttgaattgggcagcaaatttccgctcgggcaaagcggaaacaagaaagataaatatgtagaagctgccaaaggaactaatctttttttcgctgtttacgaggacgaaaacggtaaacgtggctacaattctgttcctttaaacgaagtaatagaacggcagaagcaagggttgagtgtggttgagctaagaagccaccgggatttttatttatgcccgaacgatttggtttatgtcccgacagaagatgaattggaaaaccccaccgcgatagatttcagtcagctttctaacgagaaaagaaagaatatttataaggtggtgagcttttcagggaaccaaatattctttgttcgtcaggatatagctacttcaattgtaaacaaagctgagttttctactttaaacaaaatggaaagagcgatagatggaagtatgattaaagagaattgcattaaacttaaagttgaccgtttgggaaatatttcaaaagcgtaggcaatgatcaaacgcaccctatacttcggtaacccggcctatcttaaaaccaaaaacgaacagcttgttgtagagctggttgatacgggcgaggtaaaaacagccgctatggaagatataggggtgctgatcttagatcatcagcaaattaccattacgcacgcggtgattgccaaattattagaaaataatgtagcgttgatcacctgcaatgatatccatcatcccacaggtttaatgctgaaccttgacgggcatacactgcaaagccagcgtttccagctgcaggtagacgcgtcagtgccgcttaagaaacaactatggcagcaaacggtgatcgctaagatcaccaaccaggctaatttgctgggccaatatcgtattgccaacaaaacgttgctgggcctggccgcccgggtaaaaagcggggacagtgataattgcgaggcgcaggcggccaattactactggaaaaatgtgttcccgttatttcccggctttaaaagagccagagagggagaacatcccaacaatttgctgaactacggctatgctattttgcgggctatagtcgcgagaaatttaattggcagtgggctgttgcccacgctgggtatttttcaccgtaaccagtacaatgcctattgcctggccgatgatatcatggagccttaccggccttacgtagataaaatagtgtgggagatagtgcgcacaaacggaaaattcctcgaaatgaccccttccatgaagcagcaactgttaagtattcctgctatggatgtgatcattgatgatgagaaaagtcctttgatgaacgcggtacaacgaaccacggcaagcctggccaaatgttttgagggaaacagccgcaagctgctctaccctgttctgccatcgtcattcagttaaaatgaattttgaacggttaaatgcttatcggattatgtgggtgattgttatgttcgacatgcctacggaaacaaaggctgaccggaagcgttatgcgaaattccggaagcagatccttgacgatggatttaatatgttccaattcagtatgtatatccgtcattgcatgagccgggaaaatgccgaagtgcatgtgcaaagggtgaaaaagatattgccacaaaagggacatatcggcattatgtgcattacggacaagcaatttgggcagatggaaatatttaacggtaaagaagcagcagaggcgctggttcccgcacagcaattagaattgttttaggaatttggtagagtagtacaaaatgaaggtatagaaataaaaaaacgggcggaaagcccgtttttttattctgttgacaacctgaaatcctttgctgttgcgggttttgacaaaacgcgttgtcaaagaccaaagttaatttgaaattgaaagcaattcacaaccgtactcgttaagcgcaacttttgaaatggttgtcaaagaccaaagttaatttgaaattgaaagcaattcacaaccaagtacaaataaaacgtaaaccgggtgtttgttgtcaaagaccaaagttaatttgaaattgaaagcaattcacaacattgttgttcaatttgttcaaccttatcagttgtcaaagaccaaagttaatttgaaattgaaagcaattcacaacttaaaaactcattcatttcgttaatccagtgttgtcaaagaccaaagttaatttgaaattgaaagcaattcacaactttcttcctgaactcgttaattcagcattagttgtcaaagaccaaagttaatttgaaattgaaagcaattcacaacagtctcgtaaatcttctgcaacgttgtgttgttgtcaaagaccaaagttaatttgaaattgaaagcaattcacaactatgtcctgtagggaacggagtttaaaacagttgtcaaagaccaaagttaatttgaaattgaaagcaattcacaacctatccgaatatgagatcaccgagcaaatggttgtcaaagaccaaagttaatttgaaattgaaagcaattcacaacgaaacgacactatacgttacaccggatgctgttgtcaaagaccaaagttaatttgaaattgaaagcaattcacaactgatgcactcttttggagttcttttaatggttgtcaaagaccaaagttaatttgaaattgaaagcaattcacaacaatgtaattaggaactcctctctgatctccgttgtcaaagaccaaagttaatttgaaattgaaagcaattcacaacaggttttatatactttccgcagcaatcatggttgtcaaagaccaaagttaatttgaaattgaaagcaattcacaaccagatgatgtttatattatagttaaaggaggttgtcaaagaccaaagttaatttgaaattgaaagcaattcacaactcatactccaaagctctgaaacaaatgcggttgtcaaagaccaaagttaatttgaaattgaaagcaattcacaactaacatgccgtattacttgaacgtttggaagttgtcaaagaccaaagttaatttgaaattgaaagcaattcacaactaatgaggtgaatatccagccaaacgacgagttgtcaaagaccaaagttaatttgaaattgaaagcaattcacaactatgattctttcagacgtttcagagggttagttgtcaaagaccaaagttaatttgaaattgaaagcaattcacaacaccatcaagaaggtctttgtaatcctgcgggttgtcaaagaccaaagttaatttgaaattgaaagcaattcacaactaatctcaatagcgtcaaggtgatcgttaagttgtcaaagaccaaagttaatttgaaattgaaagcaattcacaaccgtactgcggatattgctgatagtcctttcgttgtcaaagaccaaagttaatttgaaattgaaagcaattcacaacaccatccatgtggacgcgaatacagtcactgttgtcaaagaccaaagttaatttgaaattgaaagcaattcacaacaattgcgccttctggccaacaagagtggggttgtcaaagaccaaagttaatttgaaattgaaagcaattcacaacagcccggagacgaagagaggctgacagctgttgtcaaagaccaaagttaatttgaaattgaaagcaattcacaacaggagcttcccataaggtagagggtctgtgttgtcaaagaccaaagttaatttgaaattgaaagcaattcacaacaggctgaatatactgaagtttcctttggagttgtcaaagaccaaagttaatttgaaattgaaagcaattcacaactgtgaactgctgtgttgtctcgtttgggaggttgtcaaagaccaaagttaatttgaaattgaaagcaattcacaaccaatctctacttttactttcttggcagggtgttgtcaaagaccaaagttaatttgaaattgaaagcaattcacaacaatttcacatcggtggtaaaaagttagagtgttgtcaaagaccaaagttaatttgaaattgaaagcaattcacaacaggctccgttaccgtaaaaacagcggcattgttgtcaaagaccaaagttaatttgaaattgaaagcaattcacaacagtttcgtaaatcttctgcaacgttgtgtgttgtcaaagaccaaagttaatttgaaattgaaagcaattcacaaccgcttttctgcggagctgccgcgctttgcggttgtcaaagaccaaagttaatttgaaattgaaagcaattcacaactaaacagtatcttcgttggcctttaagaggttgtcaaagaccaaagttaatttgaaattgaaagcaattcacaacatacatcatctatacccttaccacctctcggttgtcaaagaccaaagttaatttgaaattgaaagcaattcacaactactggtcatcggtcagtatctctttcaggttgtcaaagaccaaagttaatttgaaattgaaagcaattcacaacaatagtggctatgcggagctgtgtttcaaagttgtcaaagaccaaagttaatttgaaattgaaagcaattcacaactagcgtcacccccggccccgcacccaaaggttgtcaaagaccaaagttaatttgaaattgaaagcaattcacaactaaggccatgaatccgttcaaaatatcaccgttgtcaaagaccaaagttaatttgaaattgaaagcaattcacaacctggggtgacagttgcaagaaaccctcaaggttgtcaaagaccaaagttaatttgaaattgaaagcaattcacaacagagcaccgactatgcctgccataaccattgttgtcaaagaccaaagttaatttgaaattgaaagcaattcacaaccaagaaacatcgagctgcagaaccgtagcagttgtcaaagaccaaagttaatttgaaattgaaagcaattcacaacaatatagctcctgtatcacctggaagaaaagttgtcaaagaccaaagttaatttgaaattgaaagcaattcacaacaagattttaaaaggttaatatctacaatgcgttgtcaaagaccaaagttaatttgaaattgaaagcaattcacaacgggatctctccgccacactttgggatcaaagttgtcaaagaccaaagttaatttgaaattgaaagcaattcacaacaggatggagagtaggagttgattttaaagagttgtcaaagaccaaagttaatttgaaattgaaagcaattcacaacaaaaataatgcaatgaagaaacgaatttttgttgtcaaagaccaaagttaatttgaaattgaaagcaattcacaactataaatttgcattctcaaaaaaagtaacgttgtcaaagaccaaagttaatttgaaattgaaagcaattcacaactggcttgcaattgtgctcatcatgaggaggttgtcaaagaccaaagttaatttgaaattgaaagcaattcacaaccataatagttgcattttgaaatagttttatgttgtcaaagaccaaagttaatttgaaattgaaagcaattcacaaccaaagtgtttacctggtaaacagtgctaaggttgtcaaagaccaaagttaatttgaaattgaaagcaattcacaacagactttattaaattaaaataatcatgaaagttgtcaaagaccaaagttaatttgaaattgaaagcaattcacaacaaacaaaaacgatataatagacaaagccgcgttgtcaaagaccaaagttaatttgaaattgaaagcaattcacaacgatgaaggtgagcccttcccggatatttcgttgtcaaagaccaaagttaatttgaaattgaaagcaattcacaactagtatacgtgtgaagcctccgcaacgttcgttgtcaaagaccaaagttaatttgaaattgaaagcaattcacaacgccgtcaggctctactcattcaatctatggttgtcaaagaccaaagttaatttgaaattgaaagcaattcacaaccatacactcattttagaacagttgccccccgttgtcaaagaccaaagttaatttgaaattgaaagcaattcacaacagagcaattagaagaatcagatttgagcatgttgtcaaagaccaaagttaatttgaaattgaaagcaattcacaacaacaggcacaaaatcactcttaaaagccccgttgtcaaagaccaaagttaatttgaaattgaaagcaattcacaaccgatgtggttaattccaggctattgataggttgtcaggtggttggagaaacggcaaaaagcctatcggaacgcttcggtaaagtattgcagaaacgccaaagtatgacgattaaccgcaacgataaatctacttcaatttctacccaattagacagcttaattccggcttccaaaatatctacgctcacacaggggatgtttgtcggttctgtttccgataattttgacgaacgcattgagcaaaagatatttcacgctgaaatcgtggtagatggtgaaaaggtcgctgccgaaacaaaaaactatcagaagataccgcaaatcttatcctttgttgatgagaacggaacagacaatatgaaacaagaaatagaagctaattacaggaagataaaatcagacattcggcatattgtgggacgtgaaatggaaagaattaaaaacgacccgaatttgcagcacttgacacaacaaggatgatttttacaaaatattttgacaactattctctaagctcaaataataatcgtaatattgcgatattaaaatacacttacaatgggtgctacaaaaacagaccattttacagaacagcaaaaccagattgcaaccatcgcaaaagcgttgggacatccggcaagaatagccattattgaatacttactaaaagttgatgcctgtatatgcagtgatattgtggatgaattgccattggcacaacccaccgtttcacagcatttaaaggaattgaaaaacgctgggttgataaaaggaaacattgaaggtaacgcaatttgctattgcattgatgaaaaaacattcaacatactgaaagaatattttggaaaaatcattcttaccgtaaccaatcaaaaatgttgttaactcgataaataaaatacaatgaacaataacgaagaaatcaaagaaatggtaaggcagaaatacagcgaaatagccttacaggacaaagacaccaacgcttcatcctgttgcggtgcaggcggttgcagtacagaagtctataacattatgagcgaagattacaacgaacttaacggttacaatcccgatgccgatttaggtttaggatgcggtttgcctacacagtttgcaaaaatcaaaaaaggcgataccgttattgacttaggcagcggagccggtaacgattgctttatagccagagccgaaacaggcgaaaccggcagagtaattggcattgactttaccgaagcaatgattgacaaagcccgtaccaatgcagaaaaattagggtttaaaaatgtagagtttcggcagggagatattgagaaaatgcccgttaccgctaatgtggcagatgtagtggtaagtaattgcgtattaaatcttgtaccggataagcaagcggtttttgcggaaatattcagagtattaaaacccggcggacatttcagcatttcagatattgtcgttaccggaacattgcccgaacaaataaaaacagcagcagaaatgtatgcaggatgcgtagcaggagcaatagataaagacgaatatataaaccacattacacaggcaggatttaacaacgtaaccatccagaaagacaaacccattattgtacccgatgatattttaaaaaactatctgaacgatgaagaaatagcactttacaaatccaatgctactatcattcgcagtataaccgtatatgccgaaaaaccggagagctgttgtacacctaattcgggatgttgctaaacactaaaacacaatcaaaatgtataagaatttagttgaaacaataagcaaagttgtcaacttccagaatatcagtgaagaacgtaaaaccatattacaaccgctgatagattttgtacagcaaaaaacagacaataagctggaaataaatatcaatttcatttgtacccataattcccgtagaagccatttatcacaggtttgggcacaggtagcagcatattatacaataccggatgtacattgctattcgggcggtacagaagaaacggcactatttccgaaagtggcagaaacattgactaatcagggttttagcatcttcaaaattgcagatactaataatcctgtatacgccataaagtacagcgataatgctttgcctgtaattggtttttccaaaaaatacgatagccctttcaaccccgtatcggcgtttgccgctattatgacctgttcgcaggcagacggcggatgcccttttattgcaggagcagaaaaaagaatacctgtcacatttgaagaccctaaaagctcagacggtacaccggagcaatcaaaagtatatgcagaaagaagtttgcagatagctaccgaaatgttttatgtcttttcagaagtcagtcaatagagctccaattaattttattttgaacaatttcaaataacacacttataccaaacacgttacaattttaattaactttgcctcagtgaaaaaagcactcgccatattgtttttggttacttatacgttttcaacaactgaattgtaccagttgctgaaattgcccgtattggtagagcacttttttgagcataaagccaaaaattccgaaatgtcgttttgggattttatggtgcttcattacgacggcaaccacctggaaaaccatccgcacgatgacgattatgagcaagaccagaagttgccttttatggcacacaccaatgtgccgagctactgttttgtacatacaccgcctttccggttcgaaataaaaaataaactttaccaatgtccgaagcagaaaatgccggcatttgacgaaaattatacagctaacgacttcctttcttctatctggcagcctcccaaatcctgttaatttttttggattgattgaattgaatttgcttttgcacgggcatcagctatttcccctataggaaacagagatgctttgcagagagatacgttctgttcaacccgctatgcttttcaggcggcacggtaagaccgtgttgtacctgtaattcatttattccatgaatattaacagaatataataattatgttacataaaatcattgagttttccatacggaataaactcattatcgggctgtttaccttagccctggccggctttggaatttacgaagccaccaaacttcccattgatgcccaacccgatattaccaacaaccaggtgcaggttattacgatagccccttcgctgggagcgactgacattgagcggttagttacttttcccattgagcaggcaaacagcaatatcaacggcattaccgaaatcaggagtttttcccgttttggtttgtcattagttaccattgtttttgatgacaataccgatgtctattgggcaaggcagcaggtggcggagcgtctgcaaaacgttcggagcgaaattcccgaaggcgtgggaacgcccgagctgggacccatctctacggggctgggcgaaatttaccaatacatggtacgccccgaaaaaggctacgaaaataaatacgatgccaccgaattacgaaccatacaggattggattgtccgcaggcagttgctgggcgtaaaaggcgtggcagaagtcagcagttttggaggaaagctgaaacagtatgagatagccgtcaactccaacaagctgcaatcgctcaacctcacgattaacgatgtctttgccgcattggaaaacaacaaccagaataccggcggtgcgtatatcgaaaaagggccaacggtactgtatatccgaagtgagggattaataggcaataaggaagatatcgaaaccatttcggttacttctacttcagacggtatccctgtattgctgaaagacgttgccgaagtaaaaaccggacacgctacccgttatggagcaatgacctacaatgatgagggcgaggtatcgggagctgtggtaatgatgctgaaaggagccaacagcaatgaggttatcaaaaacgtgaaagagcggattaaaaccatacagaagaccttgcccgaaggcgtggtcttagagccgtttttagaccgtaccaaaatggtcaataacgccatcggcaccattgaaaaaaaccttgccgaaggtgcgttgattgtcgtattcgtgctggtgttgtttctcggaaattttagggcaggtttgctggtggcttccgttattccgctgtccatgcttttcgctatcattatgatgaatttatttggcgtaagcggcaacctgatgagcctcggagcattggatttcgggctgattgtggacggagccg

SEQ ID NO: 1147 - DNA, 24506 bp, synthetic construct
  source 1..24506: mol_type = other DNA
  misc_feature 1..24506: note = Synthetic
cctgcaaagccggatttatgcccggaagggacacggatacgttttccgcactgccgcgaataatcctccagtcgcttttcgtagaaccgcaatccgctatgacaagcgtactcacatttcctccaactctattttatacagatacttccaatattttcccgtaacatatacggaaccgtcccgaccgtcaaaggcaataccgttgaaaacatcgtcccttgatgaacgttcgtttttcccgtaaaggccgctgcaatctacgacaccttccacattaccggaatcggggtctattatcaggatattttcagtcatatagacattcgcccatattttcccgtcgatatattcaagttcgttcagataatttaccggcttgccgttcagaaagacctgcaccttcctttcgattgaaaaatccgaagggtcgataaaatagatataggaggagccttcggaagcgatgagactggtcccgtccgtcgtaagtccccagccgtcatgaggatagaaaaactgtcccaggtatttcaagccgtccagttcgtatacgaagcacagcctgttggtccaggtaaggatgtacagccttccgtccaatacgacagagccttctacaaaataaccggcatcgaagtcaagcctctgcaaagcccggccggtctccatatccacttccctgaacgtcgactctccgtactggccggtactctcgtacagcctgccgtcgtggaaaaacagcccctgcgtatatgatgaaatgtcatggggatatctggcaaccatcttcgccctgtaatacacgacaggctccgccgcacgggcggaaaccgaagctgccgacagaagcagcatcaccgacaggaatattttaaatgccggcctcatacgtcagtctttccttttggcggaagcgtgttcgagtgcggccccgacgaaagacacgaaaacaggctgagggttctccggagtgctcttcagttcaggatggaactgtaccccgatgaagaaaggatgggaaggcagctcgactatctccacaagtccggtttccggattctttccggaagcgacaagcccggccttttccagttcgtccagataatagttgttcagttcgtatctgtgcctgtgcctttccgaaatgatttcctttccgtaaatcctgtaagccagggttcccggcttgatacggcattcgtatgccccgagccgcatcgtaccgccctttatggtggtgctcttctgttcttccatcaaatctatcaccggatgggaagtcgaagggacgacttcggtggtcatcgcatccgcataaccgaggacatcgcgggcgaattcgactacgcacatctgcattccgaggcagatgccgaaaaacggaacattgtgctcgcgggcatattttatcgcaagaatcttgccctcgatgccgcgctcgccgaaaccaggagccacgaggattccatccatacccgaaagtttttcctctacattgtcactgttgatatattcgctgtggatgctgtgtacgttcaccttgcattcgtttgcggcgcctgcgtggatgaacgattcgagaatggacttgtatgcatcctggagctcgacatattttcccacaagggccacgtccaccgtactcttcggattgaaaagcctgtcgaggaattcgttccatttcgtaaggtccggctccggcatgtccttcatcccgaaatgttcgaggactatcctgtccagcccctcttcctgcatcttcagcggaaccatgtataccgacggggcgtctatcgactctatgacatgccccggcttgacattgcagaacaaagcgaccttgcgcctgacatcggccgggagcttgtgctcggtacggcatactatgatatcgggattcaccccgtcctgctgcaacatccttacggaatgctgcgtaggtttcgtcttcagctccttcgccgcatcgagataagggacgagggtgaggtgtaccactacgcagtcttcgtccggaagttcccactggagctgacgcaccgcctcgatgaaaggatgggattccatgtcgccgacggtaccgcctatctcggtgattaccacatcgtaattgcccgacttgccgagaaggagcatcctgcgcttgatttcgtctatgatatgagggactatctgtaccgtcttgccgaggtacgccccctccctttcacggtctatgaccgtacggtaaatctttcccgtagtaacattgttcgccttggatgtatacacattgaggaaacgctcgtaatgccccaggtcgaggtccgtttcggctccgtcctcggtcacatagcattcgccgtgctcatatgggttcagagtaccggggtctatgttgatgtacgggtcgaatttttgtatcgtaaccctcaagccccttgctttcagaagtttggccaatgaagcggaaataattcccttccccagtgaagaagtcacacctccggtgacaaaaacatattttgtattcatatctacgaaaaaacgttacacaggggtacaaagatacctaataattccgaattaaaataaattaaaatgctatctttgcatgttaatttgtttttaactgccatgaccacgtatagaatagtactgatttccatgattgtaatcgccgtgatagtgttcttcgcactgtttcacgtcaaggcaggttacggatatctttccaacgggaaatggggtccgaaaatcaacaaccgcctcggatggatactgatggaatccccggtattcctgctcatgctttacatgttcctgaattcgccgcgctccgaattcgcaagcgagaacatcgtattctatgcaatgagcgcaccgtttttcatccattacttccagaggtcgttcatcttcccgctccttataaagggacatgggaaaatgccgttgacaatcatattgatgggagtgattttcaatactataaacgcttacatgcagggagaatggctatactatctgtctccggccgacaggtataccaacgagtggctgtccgacccgaggttcctcatcggaatgctcatattcattgccggattctacataaacctccagtccgactatatcataaggaatctccggaagcccggagacacgaaacactatatccctaaaggcggtatgttcaaatacgtatgctcggccaattatttcggggaactgaccgaatgggtaggttttgcaatcctgacctggtccgttccgggagccgtcttcgcactctggacattcgcgaacctcgcaccgagggccaaggctctggatgaaaggtacgcccaggaattcggaagcgaatataccgatcttaagaggaaatacattttacccaatatctggtaacatttcattataaaatggaacaggacaaacttttcacgccatacagaatcgggccgctcgaaatcaggaacagaaccatacgctcggccgcattcgaagggatggcagaacacaattcgccttcaaagacactttacgattaccatacctccgtcgcgaggggcggcataggcatgactaccgtagcatacgccgccgtatgccgtagcggcctgtccttcgagagacagctctggatgagggaggaaatagtcccggccctgcgcgaactcactgacggaatccatgccgaaggggcaaaggcatccatccagctgggacactgcggaaacatgtcgcacaggaagatttgcgggtgcaggcctctcggtgcaagcagcggtttcaacctctactcccctacattcgtacacggaatgacaaggaaagagatagacgaagtcgtggaggcctacggacatgccgtcgagcttgccatacaggcaggtttcgatgccgtcgaaatacatgcaggccacggctacctgatatcccagttcctctcgccttacacgaacaaaaggaaggatgaattcggaggctcgctggaaaacaggatgaggttcatgaaaatggtaatggaaaaggttgtcgctgccggaaagggcaaggtggccatcttcgtgaaaatgaatacgagggacggcttcaagggcggaatggaaatagacgactgcataaccgtagccaaagagctccaaaaatgcggtgcggatgcgctcgtactttcaggaggcttcgtaagccgcgcgcctatgtacgtgatgaggggcgaattccctgtcatgccgataatacattacatgccgtggagacagtggtggctgaaactcggagtgctgctcggaggaaggttagtttcacctacggtaacatacaggaggctgttcttcctcgaagacgcaaaaaaattcagggaggccctgccggacatgccattggtctatgtcggcggtgtaaacagcaggaaggatgccgacgaagtaatggaagcgggattcgaaatgctccagatgggccgtgccgtcctttgcgaccccggcttcgtgaacaagatgaaagaagacagggaggcatgcagcggatgcgagcactccaacttctgtataggaaggatgtattcactggaaatgtgctgcgagaaagtctgcgccgacatcacgccggcactgaaacggagcgtggcaaggacaaagaaaagaaacgcaaggcgtgaagccgggctttgaccggacacaccggcatctaacatataaaaacttaaggcgggacgatctatcgctgccgggcgctgaaacccggcagaggaaagtccggacaggacagggcaccgcactgtggaaagcacaggtagacggaagtttacgtgcaacgtagaagaaaacaaccgccggcaggccctttgggagcctgcggtaagggtgagaacacggaggtaagattccgtgattccgtatggcgacatccggaatgtacgtactgcggcctgcaatgccaaatatactgacaccaagggctgcccgtccttgtcagggggtaggcagcatagataaatgatagatttaaaaacagaatccggcttacggccccgcctttttttaacagtttttttaatcctaacccataccgaaaacggcattcctactcgtaaaggaaccgtttgatgctcttcttaggagtcttctcgaattccgtagccatgacctcggctttcgaaagcttgctgtaggaaggcagcgatttgttcacctcggccagcagggcatccatggcggcggacaccaatgtttcggtatccggccttgcatctgccggggatttctgtccatgctccgaagcatcctccacgattgcatcggtattaggatatatcaatgcgacgagacgtccctgtctcgatacgacaatcgattcgactacatacctgtggctgttcagcttgtcctctatctcctcggggtaaatattctgcccgttcggcccgaggaccatgttcttgcaacgtccctttatgaaaatgttgccttcggcatccattattcccatatcgcccgtatgcaaccagccgtcagcggtaaaggcagccgccgtagcatccttgtttttataatatcccgacatcacattgtctccgcgggtctggatttcacccaccacttcggtcgcatcaggagaatctatcctcacttccatgcggtccaccggcttgccgcaggaacggaacgcaaagcgcgaatagtgctcatagcttataagaggcgcgcattcggtcatgccgtagccgacacaataaggcaggccgacttttttcatcatttcctctacagcctcgttcagaggggcaccgccgatgatgatatacttgacattgcctccgaaggtagacatcagtttgtcataaatcttccggtagattacagatgaaacaactggtattttcaaggcgcctttcatcaaaggtttgtttacggccgggaagaccgaagaataaaaaatcttctctataatcagcggaacggctattatcatgaaaggcctgacttccgacaaagcatcgagcaggattctcggagtcggggccttcccgaggaaatgcagttcataacctgcacatacggggaacaggaattccaccgccattccgtacatgtgggccatcgggagcatggaaagggccttgtccccctctttcccgaaaatattttcctttatgaaaaccacattggaactgatggccctgtaagagagcatcacacctttcggcgcactggtagtccctgaagtataattgattatggcagtcgcatccaaatcctccgactgatagcggacatcgtcagggcttattccacccggataatcccggtcaaaggcggccgaggcgtcttcgacatgtttcgaaacggcagcgctgtcgacagcatgaagcagactgaagtctttaaggctgaacacagcctccgcctttgtccctacgataccgacctttttccacaggtcttcgtcaataaacagtatccggctttcggaatggtccgtcagctgcgctatgctttcgggatggaagtcattcagcagaggtacggcaacagcgccgtaagcatttgccgatatgaaggcgacagcccagtttgcaccgttcttgccgcatacggctatcttgtcgcccttggcaatgccaacttccctgtaaatgtaatggagacgggctatctgcccggccatctgtccataagtataggagattccgccacggtcgcagagagcgccgcagtcccacttcccctttatggtattttctatgagtttcagataattttccataacggattacattctttattaaaaagaaaaatcattaaaaaagcgaaatgagcacaaaggcccagtgcgcgaacactcccgcaacgagtccgccgacagtgtgcgagagaatcgccttggaagtcaagttcctgtatcccaaggaatcgagcatcgcggtatgcgtgctgagataaccgctccagcacatgcccatcgcagtaaacacggctatcgcattgccatcgagaagtcctgcttcctggaacttcggaacaagtcccatcgcagctccgacggcaccgagggccgtcatcggaaaggccacgagctcagggctcttgaagccgaaaagccagtcgaagacaaaattgattttatcggcgagatatggcaggaacgccactccctgataagcttctccggtgtatcctccttcacccgggccgaaagtaagcatcatgaccgccgttgaaatgacgagcacaccgggaattatggcaaggccgagttccacaccggtctttccgccatcgagtatggcattcaacgccctgaggaatattccgccctcggatttgaaggaaattttctggctgtcaccgtccatattcgaaacgggggcgtccagttcaggatgttttttcaacacaagcctctgcatcatccttgtggaaaccacgcttccgaccacagctccgaaaaggcccaccattgccggcgccgcatatccgcggccaatcatgaagactataagcaccagtcccattccgaacgccgttccgaaattggtaagggagacgagctggtatttcttgaaataactgctgaaattcttatcctttgcaagcccgattattgccgggttgtcggaaaggaaggtaatgaccgctccgagagcggctactcccggaagattgtaaagcggtttcatcagaggcctgaggatgttctcaaggagtctgacgaccccgaattccaccaaaagtttgcccaaagcgcccgacagcacggtgattcccatcaggtagaacaccgtctccagcagaagggagtacgatgtgttcattatcgtgttcagcatgtttggaacccccatgacagagccgatgccaccgaaaattccgaggaacagaaggaggaaaatcaatgcctcgatactacgcttggtagtgaatttcatgtttttaaacagattcagtttcatgatttgtcagattgaaaaacttttatccgccaacggacacctatattaaatgtattcggtacgggtttgctgttgtccgaataccagaaagcatgcacgcgcaaatcctttttgtccttaatcgggaagaactccactccggccccgtatatgaaatacttcgaaccggggactaccatcggatcgtatgggtcttccgtatcggctgcctggccgagattccggtcatagcctcccttgaggaatatattgaattttttggatatggtgcaggtaaccatgcaggtaagggaaaaatccgagaaaaatccacgctggctccctcctaccgcatatctgttggtataatccagatctattgtcaccggattccaggtaaaacggtttccgagcgctatgtaattgagaaaatgtccgcgctccctctcgaccatgtttacggagtagagggtcttgaaccaccccatgtttcctgaccagagaaggttatatgcgaacttgccgtcataggcgcctgtgctgaacggcgaatttgtgacctgggccttcaggctgtggttgcccttgttgtccatatatgtcagcgaaagcccgagctggtagcacgtcacgttgttacagtacatcgaataaaaatacacatcgatagggttcatgtcatactcgaaacctccgattgcgattacgtcctttcctgccgtaaacgtaaagttcttatggaatctgtatttcagataaagccagtccgtagcattgaagaacgaagtcggattcaggtctttcgtaaaaagcctctgcctgtatccgtatgtcaggttttccgtgattgaaccgtccaccacgagggttatgaattttccggcaaaaccgagttcggtacttttctccggggttccggaataagccgttacctgcccgtcgagtctcgtatcgagggctatgttaatcctgaaatcagtctttttgttttccttatcctcactgccggcagcggttgaagccggggttggggttggggttgcatcttgcacagcggttgaagctggggttgactctcgcgcagcggttaaagctgaaacctcctcccgagtagcggcaaaaaccgggattgcggacaaaacggaaaccaaaacaaggacaaaattcctccacataaattctcttttctcaaaacaaagtgcaaagatagaaaactttttagaagcgctatgcttttcccatgcatattgtaaaagaaacgctcaaggcctttaaaaagcctgtatttcccatcacttatgaaaacacttcccctcatttaagaaaatatccgcaaacccgggaacagcccgactcaacattcgcgcccacaaataacggaccagcggataattccggtcggaatcttccgtggcttcatttctcgcccgtggcccgaacaaaatcaactttttctaccccatagccagccattattcttgtaaagtgttgataataagcgatttataaaaatcacatctgcgcttgggtcctttctgaggcacccaaagacagcttacatttttgtaagttattgattatcaatcattacaaaagggaccagatggctatggggtggaaaatgacacgacaaattcctattttttcctcctcattccgcttccatcccacttcctgccattctttgggcagagatgttgtttctcgggtcaccggaaacctatcaaaaatccttgttcccagcgaagtccacgtggatgccgctctgaacaaggataattcactatactttcataaaatattacaaattaataaattacatagatgtaaccaaaattgacctgttcccggttttacaaaaattatccgctgatcccaaagatacgaacttttcagagtacgcactaaaacatcaacaaaagaaagggatgccctatgacacccctttaaatgttttcacaacggaataatccttattgtgaatcgcttcaaattatactcaaaaatataatgtttttatcaaacaacaaaatgttttaagtttttttcataattttgagacataaacaaatttcgcttattatgaaaaaaattctcggattggatttaggaacaaattccataggttgggctataattaatcaagaaaccattaatgataaagacatagtaaatggtattgaatgcacaggaagcagaatcattccaatggatgccgctaccatgggaaattatgacaaaggcaatccacaatcacaaacagcagaaagaacaaaattcagaagcaccagaaaacttattgaaaggagccacataagaagagagagactaaatcgagtcctcatgacaatgggatggcttcccgaacactactctgatagcctcgacagatacggaaaactgtcaaaagggacagaaccgaagatagcatggaagaaaaacgggaatggcgattatgaattcatttttaaagattcattcaatgaaatgcttgctgatatcaaaaccgcgcacccggatatggcaaaaaagggcatgaaagtgccatacgactggacaatctattatctacgcaaaaaggctttgacacaaccagtcacaaatcaggaactcgcatggattcttcatagtttcaatcaaaaacgaggttattatcaacgcggagaggaagaagagcaacagccaaacaaaaagaccgaatatttatcactgaaagtcaaagaaatccgtgaaaccagagaagtcaaaggcagcgacaaatggtttgaactcatattggagaacggcttggtgtataaaaggacattcaaggaaaagcccgactggacaggaaagacacttgaactcattgtcactacagatttggataaaaacggaaatccagtaataaaggaggacggggaaccaaaacgctcaatacgcgctccgaaagaagacgattggactttggtaaaagaaaggacacaatccgatatcctcaagtcaggtaaaaccgtaggatgctatatttatgacactctcatttacaagcccgacatcaaaatacgagggaaattggtcaggacaatagaacgggagttttatcgcgatgaattggaaaagattctgacaagacagaaggaattcaatccggatttacggaacaaggagctttacaacgaatgtatcggagtattgtatccaaacaatgacacgcacaggagagaaatagcgaatagggattttacatacctgttcataaatgacatcatattttaccaaaggccgcttaagagcaaaaaatcacttatcagcgactgtccttatgaagaaagaatttatattaataaaacaacgagggaaaaactgtcatctccaataaagtgcattccaaagtcacaccccgcataccaggaattccgactgtggcaattcctttcatatctgaaaatatacgaaaaagaacgcaccgaattcgggaaaacacagaccgacattgatattacggacattttgctgcctgacaatgaaagctatgcggctcttttcaagaaattgaatgatgaggcagaaataaaacaggacaaaatactgaaatattttccgcaacttaagaaaaacattaaaaatttccggtggaactaccccgaagacaaaacatatcccggcaacacgacaagggctgagatgttaaaacggcttaaaaaagccaatctcgactctgattttcttacaactgaacaagaaaccgcactctggcacatactttattcagtaaatgacaaggtcgaactgggcaaagccttacatacatttgcgaacaaacacggaatagaagaagaaccgttcctcaaagaatttgtaaaatttccgcctttcaaaagcgattacggcgcatactccttcaaagcgacgaataaattgttgtcgctgatgcgaagagggtgctactgggacgaagaaaacatagactgcaacacaaaagaacgaatagaaaaaatcatttcgggcgagtacgaccctgaaatcaatgactgtgttagggaaaaaacaataaatctgaacggcatatccgactttcaggggcttccgacatggctcgcatgctacgtgatatatggcaggcattcggaaatcaaagatattacaaaatgggaaaaaccatcggatatcgacaattatcttaaacatttcaaacaacattcgctaagaaatcctatcgtcgaacaagttgtccttgaaacattgcgtaccgtcagggatatctgggaacaagtcggccggatcgacgagatacatatcgagctcggccgagaaatgaagaactctgcaagtgaacggaagcgcatatccgaacaaataagcaaaaacgaaatcaccaatctcagaatcaaggcgatgctcacagagttccttaatccggaattcgaaatcgacaatgtgcgcccgtactcaccgacacagcaggagatactgaaaatatatgaagacggagtattgaacagcggcattgaactcgatgaagaagtcaaaaaattcctgaagtcattcgacaaagccgagaacaggcctacccgagccgaatttttgaagtacaaattatggctcgatcaaaaatacatttccccatatacggggcaacctatacccctgtcgaaattgttcacatccgaatatgaaatagaacacataataccacaatcaagatttttcgatgattcgttaagcaacaaagtaatctgtgaagctaaagtgaattcagaaaaaggagcccgtttagggcatgaattcattaaaggctgccatgaacaaataatcgatctcggcttcggaaaaacagtcaaaatactttccattgaagcatacgaagagcatgtacggaagaactacggacacaataaggcaaagcaaaagaagctgatgcttgatgaaatacctgacactttcattgaaagacagttgaatgacagcagatacatcagcaaacttgtcaagacactgctttcaaacatagtaagggagaatgatgaagcagaagcgatttcaaaaaatgtaattacttgcaccgggcaggttacagacagacttaaacatgactggggagtaaatgatgtgtggaacggaataatccttccacgattccagagaatggaagaattgccgctaggcaagaaattcacagcaaccaacacgaacgggaaactcattccttacatgccccttgaatatcagaaaggattcagttccaaacgcatcgaccacagacatcacgccatggatgccatcgtgatagcatgcgcaaacaggaacatagtgaattatctcaacaacgaatcggcaagaagtgatgccaagattagcagatacgacctgcgcaatctgctttgtgacaagaagaaacaagacagcaccggaaattatgcctggataattaaaatcccatggaacactttcatcccagatatgcggaaagccctggaaggcataatcgtaagtttcaaacagaatctccgagtcatcaacaaatcatccaaccatataaccaaatatgtcgacggacaaaagaagcgtgtaccgcagtcaaaaggagacaattggtcaatacgcaaatccctgcacaaagacacagttttcggcttagtaaatctaagggagaaaaaaacggtttccttgtccgaagccttaaagaagccggacagaatagtagataaagcattaaaacataaaatcaaggagttcaagaccgcaggaaagactgataaggacatcaagaactttctcaaaaacgggccggataaagttgaaatttattatttttcagaagagaaaaactttggtaaggaaaactccagacactattatgccacacggaatactattttgagtcttggaatggataaattatcatgcgaaaaagcgaaagatacgataaacagcataaccgattcgggaataaggaagattctcaccaatcatctggaagcaaacggaaacgacccgtctaaagcattttccgcagacggtatagatgaaatgaacaaaaacatcattctactcaacggagggaaaaaccataagccgatttattcggtacgcaagtatgaagaagccaataaattcgccgtcggtgaaatcgggtgcaaatcccaaaaattcgttgaagccgacaaaggcggcaatctgtatttcgctgtttataagaaagatgacaactcccgctcattccgcaccataccgcttaatgaagtgattgacagacttaaaaataaaatgagtcctgtcccgggaactgacgaaatgggcaacaggctgatattctggctctctccgaacgatctcgtttatctgccgacagccgatgaagtagaaaacggcagagttacgcttccattggataaggacaggatttataagatggtatcatcctccggcacacaatgctgttttattttacattccgttgcaaagactattgttgaaaaacaagaattcacaagacataataaatctgaacgggcaattacaggagagatgataaaagagacctgcataccgctcaagactgacagactgggcaacatcatcgattttgacggaagaatattatgataaagcgcaccatatattttggcaatccggctcatctgtcaatgagattaagccaattagtcgtcaagatgcctgaaagcggcgatgtcttcaggacaattcccattgaggacatagggattgtcattctcgacaataaacagataacaatgacgcaaggcgtgcttgaagctttgattgacaacaattgcgctgttatttcatgcggctcaaaccatatgcccataggtctaatgcttccgttatacggcaatacgatacagaacgaacgattcaggcaacaaatcgatgtgtctatgccgctgaagaaacaactctggcagcaaaccatccagattaaaatatctaaccaagcggcagcattaagattaactaccggagaagaacacggcaatatgaaaatttgggctaaaagcgtacgaagcggagatccagacaatcttgaagcgcgtgcagccgcatattattggaaaaactttttcccggaaaacccaagattcattcgcggcaggaatgaagacgatccaaacggacttttcaattacggctacgccgtattacgggccatcatcgcgcgtgcactcgtaggaagcggactactaccgactttgggcattcatcaccacaacagatacaatgcttattgccttgctgacgacatcatggaaccctaccgcccatacattgacctcatagtacacagcatcgttaagaaatacggcagcggagaactgactgacgaagcgaaaaaagacatgctttcgattccgactacagaagtggttgtcaatggaaaaagaagccctttaatgattgccgcatcaattacttctgcatctttggccaaatgtttcaatggcgaggtaaggaaaatagcctatcctgaaataacataactgaaaaatgatgaacgacagattcagcgaatacaggattatgtgggtacttgtattttttgatcttcctacagacaccaaaaaggaaagaaaagcagcagccgattttaggaagagactgcttacggacggattcatcatgttccaattttcaatttacatgagacactgcccgagttccgaaaatgccgcagtacatattaagcgcgtaaaatcgttcctgccatcattaggaaaagtcggtatactgaccattacagataaacaattcggagatatggagcttttctccgagcaaaaagaagaaaaacctccagtaggttatgtccaactcgagctattttaaaataaaattcattcaaaatcaataaaaaatccgatagtactatcggattttttattatcgaaaacagcccactaaatcattaacacataaaacattacacacagtctactgttttcaacgaaacaaaattaacaaatttgaaagcgattcacaacgtgttgattctgaagaagatgttgcttatcgactgttttcaacgaaacaaaattaacaaatttgaaagcgattcacaacttactaggcatgatataaaaaatttaaaaactgttttcaacgaaacaaaattaacaaatttgaaagcgattcacaacagacagctatcaataaagaaaaggccgaacactgttttcaacgaaacaaaattaacaaatttgaaagcgattcacaactaattgtttgttaatacaaagataaaaactactgttttcaacgaaacaaaattaacaaatttgaaagcgattcacaaccaactcgcgcaaaatgattcagagctggttactgttttcaacgaaacaaaattaacaaatttgaaagcgattcacaactcttgaacgccgtgataatacgggcttctttactgttttcaacgaaacaaaattaacaaatttgaaagcgattcacaactactgacgaaatctctttatcatcaaataactgttttcaacgaaacaaaattaacaaatttgaaagcgattcacaacataaatctcttcttgatagtggtctttttaaactgttttcaacgaaacaaaattaacaaatttgaaagcgattcacaacaccctatttcttcgtgtaatggtgagatggactgttttcaacgaaacaaaattaacaaatttgaaagcgattcacaacaaccccccctttgacataagagagtttttaactgttttcaacgaaacaaaattaacaaatttgaaagcgattcacaacatttgtgtaagcacatttcaaactatttaaactgttttcaacgaaacaaaattaacaaatttgaaagcgattcacaactggttatggcattggtgctgataatccatatactgttttcaacgaaacaaaattaacaaatttgaaagcgattcacaacttgctgttttagcatcagcagttttgtgtaactgttttcaacgaaacaaaattaacaaatttgaaagcgattcacaacaataccccctttggcatagacaaaataagtactgttttcaacgaaacaaaattaacaaatttgaaagcgattcacaacaagtaaaatctgagtaatctttttatgagaactgttttcaacgaaacaaaattaacaaatttgaaagcgattcacaacaggacgctggcgagactgttgacctggagactgttttcaacgaaacaaaattaataaatttgaaaacaattcatgataacaattacaacaaaataaataattgcaccggctggcggctccggattctcgtgaatgaacaagaatccggagccgtcattttcctaccgcaaaacaacggaagcgcccgagaggaacctcttccttacaggctcagcacgtagccgagtccgaggatatggtcatctggagaggaagtgaaatactgctggtagcggtaatagatgttgagcgtgtgcataccgccgccgaacgggatgcggagtcctgccgtataacgcattatgccgacctcgccggcacggtaatccgaaatgtggaagaaattctcgacatcgaaataagggtcgatgggcatgttttcgacattgagctttatgccgagccgcgtacggagatacgatacgacccgcccggaagaaccttcgggacggtcggtatagtaaatctgctctatgagttccctccaggtaaggcggaacgggccccagtccactccggcagtcccgcccgtataccagcggtgcgcctgctcgtaataatcggaacggtctacattcgaatacctgtaacctatttccgcagtaaaatagtcgttgaatttgtatttaagttccggatttatccaccacagggcgatattgctgacattgctgtcggaacgtatctcgcagttgagcgagccggagaaaccgccgacaaactgtttcttcaacgtcactgaaccccagacaccgaaatcggaatccttatgctgggcctccgccacggaagcgaaggacagaaaagacaaaaataccaatggacagaatcgggatgcgagcctcattttcaaacacatttaaaacacaaagttatgaaaattcagaagctgtttaaaaatttttctcggaaaattcgagacagcatcccagaagccaacaccaaatgtttagaaactacttaaacggcttcttattcttcccctacggacagaaggaagcgatacgcaacgagatatttgttcagacgtttcaggtccttttctgtgacctgtttcaaccgcgaaatatccatattgtcttcgagatcatggattttcacggcacgggccacggcattcaggctgcaacgcctcacataatcggaatatttttcatcatcataatgggtcagcgaaatgaccgcctcgacaatcgttctcggaaaaccctccgcaagcaggcgttccggagtcatgtccgagtcctccaccgtatcgtggagcaaggccgctatgcgctccgtatcgtttttgcagcggcacgccacccttatcggatggaatatataaggcgcacccgccttgtccacctgaccttcatgagcttccatggccagtttcaaagccttctccaacagaatgttccctacttcatttttcatgacaacttatgacaatattgcaaatacaatcggattatacaaccggatggcccaaagcggccggacggattgctgacggcggcagccccgctacagtccgagctcaacctgaaaacgcatcatccacctgtcataaccggggtcgagcggattcagataatgattgtacgatatgtcgaactgcactttcaggctgtgccctatcagatacctcgtcacaccgagggtcgtctggttccatctgtcgtatccggcatatcctgcaggcctcttgtccgcaaaaaccgtcgaattgcgtgcggcgacctcccattttccatcgaaaagatagctcgcctgcacattgagtcccgaaccggtaaagacatacgcctcaggacttccttcgaaaaacgggtcagccacatagcggcccatatagtcgatgcaggccgcgaaaccgcggtatttaatgataaaatccacaaaatacgaattaatgtccctgtgctgcccgtcaggcatcagcccgcctttcgtcccctggagcctctgcgcattgtcattgaactgataggcgcccgcaatcatcatcttcacctcctgctcatacgaaacatcaccctccatcagttccccgttcccgtggaaacgcccgaaaggatagagttcgagcctccccgtataggcaaagcccgcaatggacgaagaattccagttgcgcccgtccccaagggtcaccgaagccttggccgagagagcgaaaccctcaaggctaccgtaattgtactcgccgaaaaatccgaagtccctgtccacgttgaattcgctgttcactatgctcctgtccacgaattgcagggcgctggacgaattcacccgtgcacggttcgccttgatttttgtctggccgaaacctatgttccaggccgcactgtgcctgtaatacacaatggcgtcccgcacaatgttcatgttaccgttgggaagtttcgccgcatcataacccgaaaagccgagctgaatcgaataaatcaccttaggggaaaagatatatccgtcaaaacgcagtctgagacgtttcacctgggcctcggtccgggtaagggagaaatccttcccgaatgaaagcccgaccatgttctgcatcctgaaacgcagggtcatttcgtacatattgtttttaggccggaaggttatgccttttccgacctcgatattaggaaggttttccaaatgtgtaagaagctcctccctgttgtccagggaatcggcaatatatgactgcaaccagtcgagatccctcttcttacgattgtcctcctgtgcaaaagcagccacagggataatcacgaaaaaaatgacgaccagcaaaattctgttcattggcagaaaaatttacaaaatgagatttcccgcaaaaatatggataaaaagccaattgcacgaaagaaaattgttacaataaaattacatatcggaaattttccggaatttaacttaactttacggaaattatgatactaataacactgaatgataataaattacactgacaaatccgttaaaacccaccagacaatgaagtatctgctgctcagtgccttctgtcttctgtcgctcgccatcccgtacgccgctgccgcaccatcctccaacggcgtaaaaccgttcgtcataccggaactgaagtcatggactgccggcgaaggaaattttgaaacagaccggaagctcgcaatctccgttccgtcggaagatccggaactcctgaaaatagccgaaaatttttcagaagactgggaggcaatgttcggccacaggcttaaaataacggccggaaagggggacataatcttcatgacggacaaaggcacaggccccggagaggaacattacgggcaagaaggctacagcatagatatctccaccgaaacagtaaccgtaacggccccgtccccggcaggaatcttctgggccacaaggacattgctccagatggccgacaacagttcgggcaaaagccttccggcaggcaggattaccgactggccggactacgggattaggggattcatgatggattgcggaagaaaatacatccctatgggttatctgaaaaaactcgtccggattatggcgtactacaagataaacaccctccagatacatctgaacgacaacggattcaagcagtatttcggtcaggactgggacaagacatacgccgcattcagacttgaaagcgagtattttcccggactgaccgcaagggacggtagctacggcaaggaagaattccggaattttcagaatgaagcttcggggatgtttgtggaaataatcccggagatagacgtacccgcacattcgctcgcacttacaagataccgcccggagaccggcagcgaggagtacggtatggaccatctcgacctgttcagtcccgcgacctactccttcctcgactcgcttttcaccgaatatttgggaggtgacgatcccgtattcacagggccgaaagtccatatcgggacagacgaatattcgaacagggattcatctgttgtagaaaaattcagggaattcaccgaccattatatcaggttggtggaaagttacggaaaacaggccgtaatctggggagcgcttacgcatgcggacgggaaaactccggtaaaatcggaaaatgtgctcatgaatgcctggtacaacggctacgccgatccggaagagatggtcaggcagggctacaggctgataagcatcccggacggatacgtatacatcgtcccggcggcaggatattattacgatttcctgaacgaaaggttcctgtatgaatcctggactccggcccatgtcggcgaaaccgtcttcgaggaaagcgaccccgccattgccgggggaatgttcgccgtatggaacgaccatgcagggaacggaatctccgtgaaagacatacattacaggctgtttacggcaatgcagacactttccgcaaagatgtggagcggtgaaaacgtcacgctgacctatgacgaattcgatatggcaaggagggatgtaagggaagcaccgggaattaatgagaacggacgtatcggggccccgcggtcctgcgttctcgccatggacgaagtaagcagcgggcagaagatgccgtacggggaaataggttatgactatacggtaaatttcaccatcgagggagggcatgaaacacccggaacagagctgttccgttccgacaatgccgtattctacctctccgacccaataagcggaatgcttggttttgcaagagacggttacctcaatactttccgttaccgcgtacacgaaggcgaaaaggcagaaataacagtcaagggagactgccgttccaccaccttgattgtaaacggcaagacgatagaccgccttgaagtcgaaaaacgctggcacgacggagggaaaagcgtgatgtactacgtacctaccctcgttttccctctcggaaaggccggtgatttcgacagcaggattacggatttcgaagtattcaattatacgacggaataaattatatgacggaataaatccgggaaagaaataaaatgaacgttttcaggataatacgcagaaacatctcacttcacttcataaatgccgccgggctttctattgtgaccgcctccctcctgctgtcggcaggatacctgcacagggagctgaattatgacaggcacaacaccgaatccgaaaggacggcaagactctcgataggttttcaggacgaacccgtcgacggacgtatctggggcgaaattcccgtcatgctgctaaaagagattcccgaaatcgaagagaccgcatcggttttccacatacagtcctgcggattcgattacgggggcaggctcgtgaccgcaccggatgtttttgccgtggacagcggttttttcagaatattcgatgtccggatgctcgaaagcgcggacggaatccccggctcggaacagataatggtcagtgaaagttttgcttcgaaactcaaaggagaaagcggccgcgacgtactcatgtcccccgtcaggacggattcgagaaaactcaggaccgacactttcattaccgggattttcgaggattttcccgggacctcgcattttcatcctgatgcaatcatttacagttcagaaggtttgggcgatgttttcgcatacgtatatgtcctggtcaaggaaggtacggatctccgggagcttgccggcaagatatcctccctgtggaacgaggccggaatataccctcagggcactgttccgaaagccatactgactccattgaccgacatccatctccacagccacaatctgcgtgaaatggaggtgaacgggaatgccacgttcctgtggctcatcggaggcgcaaacatggtgcttgcgatagtagttcttttcaatctctggctcaacggctgcatcgtattttcatacaaccgccgcttctactatatcatgaggctgcacggcgcaccggtatcggcagtgctcgcaaacgaagcacggattgcgttcgtcacagggaccatatcgacggcggccggcctgtgtctggcacatcttgcggcacattacgggctaataccgctgaaaatccctccggtggcggcagcaatcatctgcattgcattcctcgcggccatcgtgacggtttcgctcctgcctgccctcaaagacactctccgcacccgtttttcaaacaccggggaagtcctggaacagatgcgcttctcctattccaacgtgcgatggatggtttccgtccagtttttcattgtgattacggtaatcacggtcgcatcaggaatcggaatgcagatgggactcatcgaaaagacacagtcgggaggggcggacaaaaacaccattgtcctgaaatggcaggatgaccaggtcatggaaaattacgcccttctgaaggagagcctgctgaaacatccggaaatagaagccgtcacttcggcgttccagattccgggggatgccataagggacggtgcgcaggtaacggccgaaggttcaggctatccggtaaagctccccttgctccttgtcggtgaggacttcatggaatttttcggcatccgcatgatcgggggcaacgggttctcgcctatggacatggattatcagacagaaaacggcctgctgcacgaccgcatcgcggggaactcattcagcgaccgcaccgaagaatatatcatcaatgaaaaggccatgagggccttggggttctccgaccctcggcaagcgctcggaaagactctcggcataagccaggggactatcgactacatacgcaaaggaacgattgtcggagtgtgcgaggatttcaattacaccggagttttcgaggattccgttccgctgctgataatgcaacgcaaccttttccagtcctgcatcatgatccgcatggctccggaatgttcggaagacgggctggaagttttcaacaaggtgtgggccggggtaaacccgcagcgcgaaccggattataccctcatgagcgacattttcagcggacaatacaggaacgagatgaatgcaaggcggctgaccaggctgttttccatattgtgcctggtacttgccgacctcggactcattattttcatggctttcatcataaagaggagaacccgcgagatagccatccggaaagtgcagggagcgagtgtgcccggcattgtcagaatgctcaatctggatttgatacggtatatagccgtcgcctttatcgtttcaatccccgtatcgtggctcgtcctgcaccgctggctggaacatttttcatataaaatccacatctggtggtggatcttcattgccgccggagccatagtcgccgtcatcgctttgggttccgtttcggtacagagctggagggccgcaaccgcaaacccggtcaaaggaatcgggacggaatgagaggtagcgggaa

SEQ ID NO: 1148 - DNA, 24503 bp, synthetic construct
  misc_feature 1..24503: note = Synthetic
  source 1..24503: mol_type = other DNA
acggtagccgtggcaaccccgtgctggccggcacctgtctcggcgatgatacggcgtttgcccatgcggcgtgccaggaggatttgcccgatggcattattgattttgtgtgctccggtgtggttgaggtcttcccgcttgagatagagggtgcagccgtaacgttcagacagccggcgggcaagatataagggagagggacggcctacgtagtcgcgcaggagggagtcgaactcagtcttgaaatcgtcgctgtcgagcacgcgccggtagttggcgcgcagttcttcaacacagcggtgaagtatctcggggatgtaggctccgccaaactccccgtagtagccttcggaattgatttggtaagttctcattggttatggtgtttgttgatggatacgtataaaaagacagcggactgtcgtaagtcactacgacagcccgcttagcaaatttataaagtgtgtatgttggaatttaatgcatacgaggctcgctcccttacgactgttggagttgtaagcggcgccaccaccaatatgtattagtcttaaatttcatcttactttgaatgttttgttcgttcgttgggtgcaaaggtatacctttttgcgatacgaccaaatgttttctgcacttttttcttttgggaattttttgtttcatatctgtatgacgcggaatgtggcgttctgcatccggtcgatttctgccatgggacgtccggaatgggctgctcgcaaggcccggcagaacaggccgtgactcacgaccaggacggtctgtccatcatgctgttcatgcattagccggaggaaacgttgcgcccgttggagcatggcttctactgtttccacatcagcaggaaaaggggacgtcttcagtaccggaatggatgcgccggtcagactgccccagtcgcgttcacgcaggagtggggtatacgtcagggggatattccgcccctccagcaggatggctgcagagtcgacgcaacgttgcaggtcgctgcagaggacggcgtcgaaaggaatggagagcagttcgtcgtgcagtgcgtgcaactgttcccgtccgcgttcggacaggtgtccgggcagatgcccttggaggatttgtgaggcgttctcttccgtctctccgtgtcgtacaagatagagtgtggtcataatggtgtggggttgacaagttgatgagttgtcggcaaaagtacgatatttatgagtgcaggttcaataaaaagccctatttttgtttactgtttatgcttcgcatacgctcaccctgtcaggcaggcatcccgtccacgtccgcttgtctgttccggtgtgagtctgcggaagctggattgtgtataaataaccagagacttataacgtatgacaaacaaattgaacaatgcgtgggtgagaggcatcttctcgctcatcatcggtgtgttattggtggtgtatccgtcggctgcaagtgtctatttcgtgatggctgtcggtgtcttgtttttcattcccggggccgtttcactgtctgccttcctgatgcggcgtgctgacggacgtatgttcccgttcatgggactgggcagtttgctgttcggcttgtggctgttgattactcccgctttctttgtcggaatcctgatgtatgtgctcggagcggtactcgtactggcgggcttggggatgctggtcaacctgtctgctatcaggaaacgtgcaccggtggctgtgggcttctatgtggtacccgtcctggtgatagtcggcggaatcctggtgctggtgaatccttttcgtgcagcggaacttccgtttatcattctgggaataagctcaatcatctatgccttgtccagcatgctgaacgcctacaagttccgtgcagtgacgatagaggctgtcgagattatcaaggaagggccgtcagcggaagagcactctgaagcggaggcgtccgaggtgaaagaggtggaaggagaagccgatgtgaagctgttggagaagccggagcatcgtgatactccactctgacgctgaccttcgcctgctttcaatgacatgttggtagggggtagacgacgaatagccgccgtatgtacggaccaaagtattatacttaggcaccctaagtataatacttagcctacctaagtataatactttggtctgtataagtccggcttggttcatgcttatccctacgtttgacgttgtctactcccgggtttgatggccggttgggacaaatacaataaacgcgaacgctacggatgttcattcactgcctcgtgggcagaggaaatgagtccgtagcgttcgcgtttattctgatgtggagggttccgattatcggatgaagagcagttcgcggtacttcggcaaggtccacagttcgttgtcaaccatcagttccagtttgtccacgtgataacggatggtttccaacatgggagccacattgtcgtggtaagcgatggctttctcacgttcatgctcgatgcggttggccaccttgcgtgcatcaacgagcttgtccacttgctccttgaggatgctggtgtgcttggcaatgtcgcggatgagttccacgttgcgggcagacatcccttccgcttcagccttgctgaaaatctgttgcatcttatatacgttgtcgatgagctcgctctggtatttggtggcggtcgggatgatgtgattcatcacgaggtcaccgaggacccgtgcttcaatctgaatcttcttggtgtacatttcccattttgcctcgttgcgtgctgccagttccttacgggtcatgactccggtcgattcgaacatcttgacgcttgattccgagaggtagttgtcaaagatgacggggcatgaagtctcgcagtcgagtccgcgtcgtttggcttcctcctgccattcttcgctgtagccgttgccgtcaaaacgaatcggtttggactccttgatataccggcgcactaccttcaagatggcgtgtactttgggttcccctttctcgatgagggcatccacgtcggctttgaactctttgagctgctctgccatggcagcattgagggctatcattgccgaggcgcagttggcttcggagccgatggcacggaattcaaaacggttgccggtaaaggcgaaaggcgacgtccggttacggtccgtattgtcaatcatgatttcgggaatctgtggaatgccgaggctctttccctgcttgtcgctgaagtcgagctgttcgtcttccgactcttccaggtggtccagcatacgggtcagctgactgcccaggaaggatgagatgatggcggggggagcttcgttgccacccagacgatgtgcgttcgtggcagacatgatgcttgccttcagcagtccgttgtggcggtatacggcctttagtgtgttgacaatgaaagagatgaagcagaggttgtcggtcggggtcttgccgggagccatgagcaggcgtccggtgttggtgctgagcgaccagttgttgtgcttgccggagccattgatgcctttgaacggcttctcgtggagcagtacccggaagccatgtttgcgggcaatgttgcgcatgagtgccatgacgagcatgttgtggtcgacggcaaggtcgcactcctcgtaaatgggtgccaactcaaactggttgggggcaacctcgttgtggcgtgtcttgcagggaatgcccagtttccaggcttcgatttcgagttccttcatgaaggctgccacccgggtcggtatggcgccgaaataatggtcttccagctgttggttcttggccgactcgtgtcccatcagggtccgtccggtcagcagcaaatcggggcgtgccgcatacagtccttcatccacgaggaagtattcctgttcccagccgaggttggtatggacacgtttcacttccggatagaagtaatggcagacatcggttgctgcctggtcgacggcacgcagagccttcagcaagggagtcttatagtcaagggattcgccggtataggcgatgaagatggtcgggatgcagagagtgtcttcgacgatgaaagcgggggaggaggggtcccatgcggaatagccccgcgcctcgaatgtgttgcggatacctccgttggggaatgaggaagcgtcagtttcctgttgtaccagcagcttgccggagaattcttccaccaatccgcctttgccgtcgtgttccacaaaggcgtcgtgcttctcggcggtgccttcggtcaacgggtggaaccagtgtgtgtagtgggtcactcccaactccatggcccaacgtttcatgccttcagccacagcatcggctatgttcctgtcgaggttggcgccgttctcgatgacgtccatcagtgcgttgtaaacgttgctgggcagatacttgaacatcttctccttgttgaagacgtatttggcaaagtattccgaggggcgttctttgggcagttccacttcgagcggttttttgtggaaagccgtctcgacaactttaaatctgagattcgatgacataatgaatgatcttgtttgttgttgacggcgcaaagataattcttttggtagagattttgaaagaatctcggacatttagttgaatgttcagcctgttctcgttacttttgcaaccagaactttgtttaatcctatattttatacaaactatgtttaaacactttttgtccgtgattctgttgcttgcggtgtcgaccttggcgtgggccgaacgtgtcgacatgaagcaggcaggtgccaagacggatggcaagactatcaacacccgacttatcaaccgtaccatcgaacgcctggagaagcagggaggcggtacgctgttctttcctgccggacggtatctgacgggtccgattcacctgaagagcaacattacgttggagctggaagctggagcgaccttgctcttttcgacgaattttgatgactacctgccctttgtggaggtgcgtcacgagggagtgatgatgaagagtttcagtccgcttatctatgccgtcgatgccgagaatatcaccatcaaaggagaaggaactcttgacggacaaggcaaggcctggtgggacgaattcttcaaggtcctggttgacttgcgggataatggcaagcgtgacgtcaacaaatatcagcccatgtttgagaaggcaaatgatgtggcgcagattgccgccgagacaaacgaagactggcatggaacgctggaccgccgtttcttccgtccgcctttcatccagccgatccgttgcaagaacgtacgcatcgaaggggtgaaaatcatcaattcgcctttctggaccgttaatccggagttttgcgacaatgtgacggtggatggagtaaccattcacaatgtcccttcccccaatacggatggaatcaatcctgagtcgtgccgtaacgtgcatatcagcaactgtcacatctccgtcggcgatgactgcatcacgattaagagcggtcgtgaccttcaggcacgtaaattgggtgctgcctgcgaaaacatcaccatcaccaactgcacgatgctgagcgggcacggaggtgttgtcattggcagcgagatgagtggcggcgtacgtcgggtcactatcagcaactgcgtctttgagggaacggaccgtggcattcgtctgaagtccacccgcggacgtggtggtgtggtcgaggacatccgcgtgagcaacatcgtgatgaaggatatcaagaaggaagccctggtcttcaacttgaaatatagcaagatgccccaggaacccgtgagtgaccgtacccccgtcttccgtaacattcacatctccggtgtgacggttaacggtgttcagactcccatcaagtttgtcggactggaggaggcgcccatcactgatattgtgttgcgtgacattcaaatcaaagatggcaaggaacccaatatcttccaggattgcgaaggcatcattatggataatgtaatggttaacggagaaaaggcagctttgtaaaccacataagataaaactgtagcagcaaccttccccaagcaataggtgcgtatgcatgacgtctgtagaacggtcgtgtgtaaagaatccggtcatccggtttccgtgcgtattgtttggggaggcttgtatctgtactggtcggtggactctgccgggaataggagcaagagcccgtccgtacaaacttttttcaatatcatagttccttgcaaacgaaatctttgtaaatttgcaaatcttttgacgaatgtataaaaactgaagatatgaatatctcttataactggctaaaagagtatgtcagtttcgacttgactcccggtgaagtggcggaggcattgacttctatcggactggaagtcggagctgtggaagaagtacaatccatcaaaggtggacttgaaggtatcgttattggtgaagtactcacctgcgagccccatcccaattcagaccacatgcatattacgacagtcaatctgggcaacggtgaacccgtacagattgtatgtggcgctgcgaacgttgcagccggacaaaaagtcgtggtggcaacattgggcaccaagctgtatgatggcgatgaatgtttcacaattaagaaatccaaacttcgcggagtggaatcccttggcatgatttgtgcggaggatgagattggtctgggtaccagccatgaaggcattatggttctccccgacagtgccataccgggaacacctgcaaaggactatttcaatataaagagtgactacgttatcgaggtagatatcactccgaaccgtgctgatgcttgttctcattatggtgtagcacgcgacttatacgcctatctggttcaagcggggaaagagacttcattgacccgtccttccgtagaaggattccatgtagacaaccaggaattacccatcgacatcgaagtgacagattctacggcgtgtccccgttatgcaggtgtgacagtaaaaggcgtaacggtaaaggaaagtccggcctggcttcaggacaaactccgtctgattggtttgcgtcccatcaataatgtggtcgacgtgaccaactatatcctgcatgcttatggtcaaccgctccactgctttgatgctgataagatcaaaggaggcaaggtgattgtgaagaccatgccacaaggtactccgtttgtaactctggatgaggttgagcgtaaacttgatgctcatgatttgatgatatgcaatgcggaagagcctatgtgtatggctggcgtattcggaggactggattcaggctcaaccgaagctaccaaaaacgtattcctggagagtgcttatttcaatccgacaaccgtacgtaagacagcgcgtcgtcatggcctgaatacggactcttccttccgctttgagcgtggcattgatccgaatggtgttatttactgcctgaaacaggctgcaatgcttatccaggaactggcgggtggaaccatctctatggacattaaggatttgtatcctcaaccgatagaagacttcaccgtcgaattggactaccgctatgtacatgacttggtcggcaagacgattcccgtagaagatatcaaacgaatcgttactgccttggagatgaaaatcgtggcagagacaccggaaggcattaccttgaagataccaccttatcgtgtggatgtgcagcgtccgtgtgacgtcgtggaagatattctccgcatttacggatataataatgtagagattcccttgaccttgaagtccagtctgacgacaaaaggagaagtggataaatcccaaaagctgcagaatctggtgtccgaacaacttatcggctgcggttttaacgagattctgaataactcattgacaaagtctgcctattacgatcatttggaaagttatccctcacagcatctggtcatgttgatgaatccgctcagcagtgacttgaactgcatgcgccagactttgctgtttggaggactggaaagtatccagcacaatgccaaccgtaagaatgcggacttgaaattctttgagtttggcaattgctatcagttcgatggtgagaagaagaatgcagaaaaggcattggcaccttatagtgaaagctgtcatctgggtctttggataaccggtaagcgtgtgactaactcttgggctcatccggaggagaacagttccgtttatgaactgaaggcatacgtattaaatatcttcacccgtttaggcttgaacctgggaggactggtcttcggtaatctgtccaatgacatttactcggcagctatcagcattcataccagagggggtaagttgattgctacgtatggtatccttacccggaaactgcagaaggcatttgatttggataatgaagtctattatgccgatatcaattggaatgagctgatgaaggccgtaaagaatgtgaaagtcggctatacggaaatcagtaagttccctgctgtaaagcgtgacttggcattgctcattgacaagaacgtacagttcgtggaaattgaaaagatagcctatgaaagtgaacgcaagttgctgaaagccgtagagttgtttgatgtttatgaggggaagaacctcgaagcgggaaagaagagctatgcagtcagcttcctgctgcaagatgagaatgcgacactcaacgacaagcagattgataagatcatgcagaaactgattactaacttggaaaacaagttgggagccaagctgagataacctggaaaagataatcaataaaactaatctatagattctaaaaacattaatccaatgggaagagcgtttgaatatagaaaagctacaaagctgaaaagatggggtcacatggccaagacatttacaagactcggtaaacaaattgctattgcagtgaaagctggaggtcctgaaccggagaacaatcctaccctgcgttcagtcattgctacctgcaagcgtgaaaacatgccgaaggacaatatcgagcgtgccatcaagaatgcaatgggcaaagaccagagcgactataaaggaatgacttatgaaggatatggtcctcacggagttgccatctttgtcgatacactgactgacaacacgactcgtactgttgccgacgtacgttccgtattcaataagtttggcggtaacctgggcactacgggatcattggctttcttgtttgaccataaatgtgtctttacgttcaagaagaaggagggtattgatatggaagagttgatactcgacctgattgattacaacgtggaggacgaatttgatgaggacccggaagaaggtaccatcacgatttatggtgacccaaagagctatgcagccattcaaaagcacttggaagaatgcggatttgaggatgtcggtggtgacttcacctatattcccaatgacttgaaagacgtaactcccgagcaacgtgagacaatcgataagatgatcgaacgcctggaagagttcgacgatgtgcagactgtgtacaccaacatgaaaccggcggaggaagaataagtcagtatcccattcctttcatgaagatcctgtataagacacaaggaacttgtagcacccacattgacctttcggtggaagacggctgtattaaggatgtctgtttctggggtgggtgcaatggtaatctgaaaggtatatgcagtttgatacgaggcatgagagtcgaagatgtattggctcgtttggaagggataaaatgcgggcatcgcacaacatcctgtccggaccaattatgcaaggctctccgtcagattactaaggacactcagtaaaagtccctaaaaagtgtagagggcatgtgaagaggttgttttcaatccttcatatgcccttttttatttggtgtttactaatctcatcgctttgacaaaagagaatcttcgagaagtccatacaatatatagtggttcatgcaagaaaacctgataaatacactatatttggacaaaatataaaaagtatggagatgaaacatatcctaggccttgatttagggacaaatagtattggttgggcggttatcagagcccatcaagatgctgacgggcataccacattgcaagatatcctggctgccggaagccggattattccgatggatgccgcgacactgactgattttgacaaaggtaatgccaagtccgggacggcagagcgtacaagtttcagaagcatgcgtcgtcgtcgggaacggcagctgttacgtcgcgaacgtttgcatcgggtgttgatgctgttgggattcctgccgcaacactatgccaacgcattgacgcgatatggtgagtttgcagacaacagggaatgcaagttgccttgggtgaaagatgaatcggatgggaaatatcatttcctttttcaggacgcatttcatgaaatgtgcgaagacttccgtcaatcagctccccaatgggtcgccgacggaaagaaggtgccctatgactggaccctttattacctacgctgtaaagctttgtcccgtaaaataagcaaggaggaattggcttggattctgctaagttttaaccaaaaacgaggatactatcaggcacgtgatgaagaggacgaagtaaccacgaacaagcttgaagaatattatgccggaaaagtggttcgtgtggatgatacaggcgaacggaaagggaaaaatgtctactatgacataacgcttgaaaacggatgggtatatcggtatgcagcccgtatttatcccgactgggtggggcaagtaaaggaatttattgttacgacaacgctcaatccggatggtactcctaaaacagacaaggcgggcgaagtgaaacgttccttccgtatgcctaaagatgatgactggaccttgataaagaaaaagacggagagggatatcgaccgttcgcaagaaaccattgggcaatatatctatcatgctttattgaaagatccatcacagaagatcagaggaaagctgataggtacggtcgaacgtaaatattataaagatgaactgagacgtatcttggataggcagattcagttccatcccgagttgcgggaccgtgaattgtattatgcatgtttgcaggagctttatccctccaatgtggcattccggaatacattggtgaatcgtgattttacttatttatttttggatgatatactcttttatcaacgtccccttaaaagcaagaagtcacagattagtgactgtccttatgaagaacacttttatacggataaggaaacaggagagcgtatatcggttcccgtaaaatgtatcgcagtctctcatcctctctatcaggaataccggttgtggcagtttatccagaacctgcgtatctattgtagagaagcacgtatcgatggaaatttgatgattgactgggaagttaccgatgaattgttgcagacggaggaggacaagactgcattgttcgattggctgaatgacaaagagagtgtgaaacagccggagttggtcgcatttctactgggaggcaaggctaataaaaaacaaatcaaggcttaccggtggaactatatggatgacgacacaaagggatatccttgcaatgagacacgtgcaagtctcttgaaatatctgagagaggctcaaacagactcgtccttcctaactcgtgaacgggaagaagctctatggcatatcctgtactctatatccgacaagggagaattaaagagcgctttgggtaaatttgctgtcaagcatggattggatgaaaggtttgtaactgtcttcagcaaatttccgccttttaaaaaggattatggaagctattcggcaaaagcacttaagaagctgttgccattgatgcgcatgggccatcattggcaggaagcttcctttattccttctacccgtgagcgtatggagaaattcattaatggggagtatgatgattcgattgataagcgcacttatgaaaaattagagagtttgactgaggtgtcacaatatcgtgggctccctggctggttggcttgctatgtggtttatgaccgtcattcagaagggagggatatagaaatatggacttctccgtctgacatcgattcctatttggcacaattcaagcagcattcgttacacaatcccattgtggaacgtgtggtcttggaaactctacgtaccgtgagggatatttggaaacaggtagaccatattgatgaaatacatatcgagttgggacgtaatatgaagcttccggcagacaaacgtcggcagatgaccgaacaggcgtggaaaaacgaacagacgaacttacgcatcaaagcattattgctggaatttgccagaccggggtatgacatagagaatgtacgtccctattcgccctatcagcaggaccagctacgcatctacgaagaggctgtactgggtgccaatgaatgcccggatgacatcagtgccatattgaagaagttcaatggactcaatccgccgacttctgcggaagtcttacgctacaagtgctggttggaacagaaataccgttcaccctatacgggacgtacaattccgttgagcaaactgtttactcccgcttatgaaatagaacatattatcccaaagcaacgctattttgatgactcctttagcaataaagtcatttgtgagtcggaagtgaataagaagaaaggtgccatgttggggtatgaatttatcaagtcgtatcatggagcttccattaccttgaatatgggaggtacagcttctatcttttctgtagaggcttatgagaacttcgtcaaggagcactatgctcataataggggcaagatgaaaaagctgctgatggatgatgtccccgactcatttatttcacgtcagctaaatgacagtcgctacatcagcaagcttatgaaatccatattatctaacttggttcgtgaagagggtgagaaagaagctatttccaagaatctgattgtgtgtacaggaggtatcaccgatcgtctgaagaaagattggggaattcatgacgtatggaatgacatcatctttccacgctttaagcgtttggatgaaatggatagctcgcatacatacattaccttgaatacgcaccgtcatcctattccctccatgccgttggagtttcaacggggcttcagcaagaaacggatcgatcaccggcatcacgccatggatgccatcgtgatagcgtgtgccacacggaatatagtcaattatcttaataatgaatctgcccggcatgatgccaagaccagccggatggatttgcaaaggttgctatgtacggcaaatagaaaattgatagacaagccttggaagactttcacgcaagatacctgtaaagttttggaagatatgattgtcagctttcagagaactctgcgaatcatcaataaaacgaagaactattacttgcggtttgaagatggtaagaagcgaagagtccttcagacgaaaggtgagaattgggctatacgcaaacctctccataaagagactttttatggggaaattaacttgcgccggattgagaccctttctctaaacaaggcattggaacgtattcctgatattgtggaaagagatttaagaaagaagttaagtgaattgcttagcttgggttataatgccaaacggataaaaggctatttcgaggaacacaaggaggaatggtcggatgtgaacttgtcaaaaataaaggcatattattttacgaagcagaaaaacaagcgttattttgcagctcggacggaacttgatacatctttcaataaggataagatagagaataagattgctgatacggcaattcagaaaattctgttgcaacacttggaggcttatggtaacgatgctgaacaggctttttcccctgaagggattgataccatgaaccggaatattcgacagctgaatggtggacgttcgcatcaaccgatctataaggtcagagtctatgaagaagccacgaagtttgcagtcggacgaaggggaaataagtcgactaagtttgtcgaggcggctaaaggtaccaacttgttctttgctatttatgaaatatctcaagtagatgggaatggcaatagacagacgtcacggactttcagcagtattccacttaatgtcgctgttgaacggttgaaacaaggactgcctccagttccggaagatgaagaaggaaatgctcccaagtacgtgctttctcccaatgacctggtttatcttccgacggaaagggaactgaagcggcgtgagatagctatgccgatagataagtctcgtatttataagatggtgagttgtacgggaaaagactgcttctttatccctgcgaatacagcagtacctattgtagacaggtatgagtactcttctatgaacaaaattggacgtgctcttaccggtgaaatgattaaagaaatatgcctaccgctaaaaattgatcggctagggcagattattgaaatatctaccttctaaaatatagccttatgataaagcgtaccctttattttagttctccggcttatttagggaaatttgctgaatatccctgcccaaaatgagcgttttcggaaacaacttgaagcttctttgtcttaaaaaaaacaattgtggcagcaaacgattcaggcaaaaattgcgaatcaaactgctgcctactcttggtatccatcatcataatcgttacaatgcatattgtttggctgatgatattatggagccttatcgtccatatgttgataggttggtctttcaaatgtctggacgatatgatatgagtaaagtagaactcacgaaaagtcaaaaagcggagttgctgtctatccctacgctagatgtgcaaatatctggtaagaggagtcctttgatgatagctgttgggcaaacaactgcatccttatataaatgcttttctggagaatcacgacgtatatcatatcctgaattatgaatattgcagaacgttttaacgaatatcgaatcatgtgggtattggttttgtttgaccttccaacagagacaaagaaggataagaaagcatatgtggattttagaaagaatctgcaacgtgacgggtttacgatgtttcaattttcaatttatgtgcgtcattgtgccagtcaggagaatgcccaagttcacataaagcgtgttaaatctttcttgcctgattatggcaaagtaggtataatgtgtatcacggataagcaatttggtgatattgagatcttttatggaaagaagatacaagatgccaaaccgggagagcagcaattggaactcttctagaagagggtgtgtcgtaataagcgatgcaccttctttctttcgtcaattacaaaagaaaagttcgctatcttcaagcagcgatatgttgaagatttctttgatttatgtgttccctgcatctgaagaaagcggctgtaagctcacaaaacagtttaatcagccagtctatgccttcttttctcatctttgcacataacttttttatattaaaggcaatggcaaggaaggagaagtccataaagaccttgtcctttccaaaatggcggaaacgtttgtagttcatgttatattttatctgcccgaatacggcttccggttctatgcatcttcgtcccctgtgtttcagcccttcctcggagcagagcaactctttggctttttgcttgtatttcctgagcctgtggttcagttctattgtcctgtccccttttgctttaaaacatagacaccttagcgggcagccttcgcacctgacagccctgtatctggcactttcgctcacatatccggatgcggttttcacatgcctgtttcctatcctccgcatcttttgtcccatggggcatacgcaatagtcatgttcttcattgtagtagaagttttcagccttgaacgggtcgggtctgaatctcggccgttgctccatgtggaagtaattgtatttgacgtaagcttccatgccgttttctgccatgaagcggtaattttcctcggagccgtagcccgaatcagccactactgtatgggccagcctgtcgtatctgtttgagaaggattgcaggaaaggtatcatagtcagcgtgtccgtagggttgggaaaaagtgcaaaatcggtaatgaactggttctcggtggcaatctgaaggttgtaaccgggtttggtctgtccgttacgcatggcatcctccttcatcctcatgaaagtggcatccttgtccgtcttggaataggagttgcgctcctgcagcgtgtccagatgattgtcgtattcctgcagcttgtccctgtgcgcttccagttctttcagctgcctgcgtttctttctttgtgcggccttctcctcttttgtggaaggctcgggaacctgttcaagcgcattgcgcagttcgcccgccatttcggtcagcatggctggggtaaactcaacttcctcattgttttccggtgatttctcctgggcgatggcatcgtctatctgacccaacaggacatggattttcttcatcaggcgttcacggttccgctcgacggtctttttccacacgaaagtatacttgttggccttggattcaatcttcgttccgtcaatatattccacgttcaggctgatgaaccctttggcggaaagcagaaggacgatttgggtgaatacttcgttgatttccttcttcacgcggttgcggaagcggttgatggtaatgaagtccggtttctcgtgcccggccagccatatataatggatgtcgcggtggaggagtttttctatcttgcggcaggagtagatgttgttcatataggcgtacaggatgaccttgagcatcattcggggatggtaagggctacggccgcattccttatataacttcctgaaaccttccagattcaggctctcaacaagggcgtcaaccatgcgtaccggatcgttctttgcaatatcctcatcgattctttgaggaaacagcactgtttggttgggaatgtaaggacgaaaatgtatctttgtcataagattatttttgttataatgcttaaagatacaaaatctttaggtaatagcaaagcctcggcttgtgaaagtcggggctttgtgcataaaaaaagaaggtgcgctttttgacacaccttctttgaaacagctttttttattttcctaatagagcctttaacttgtttatattcagagaataacatataatctgctgtctctgatggctcaaaggtagtaatttagaagcaaatcacaacgatagaagtaacaacttggaatgttgtcgcgctgtctctgatggctcaaaggtagtaatttagaagcaaatcacaacacttcgacgaccgcctgtacatcgccgaccgctgtctctgatggctcaaaggtagtaatttagaagcaaatcacaacggttcgaccatcggaggaatgaccggatacgctgtctctgatggctcaaaggtagtaatttagaagcaaatcacaactggtagtaatcatcctcattcacggtaagggctgtctctgatggctcaaaggtagtaatttagaagcaaatcacaacgcgctccgacagggcggtcatgaagcgagggctgtctctgatggctcaaaggtagtaatttagaagcaaatcacaacgactagaaattttccaccatactgaacgatgctgtctctgatggctcaaaggtagtaatttagaagcaaatcacaacagcctcttacggtagccgtcataatcgttggctgtctctgatggctcaaaggtagtaatttagaagcaaatcacaactccggcggatgcgcttctcgtagtcctcgtgctgtctctgatggctcaaaggtagtaatttagaagcaaatcacaacggcgtcgaggaagtcgtcaacggtctgaccgctgtctctgatggctcaaaggtagtaatttagaagcaaatcacaacgacccatgaagaatggataaaacatttatggctgtctctgatggctcaaaggtagtaatttagaagcaaatcacaactaaatcctccatgtggaattatgagttccagctgtctctgatagctcaaaggtagtaatttagaagcaaatcacaaccatccgcaacacgtccgattttgactgcgtgctgtctctgatagctcaaaggtagtaatttagaagcaaatcacaactagaagcgcgcaacagcatgattgacaaaagctgtctctgatagctcaaaagtacaattagagttcgggaagatcgagtgagctccgttccagggcggcagccaacgcggcagaggcatcgtcaccatccacctggtgaccgactggacatagggcgggcacgatgcagccttcgacctcagccatcggctctataaggctctgacggactgagtggagagagctttaacggacgtcgctgttggagacgaacacgaaccacaaccacgaggagatacttgagagtattgacagctatgccgtgcgttacctgttaagatagggcgcacgagttgcaaggatgaggaaggtgtgtcgtaataagtgatgcaccttcttttttttcgtcaattacaaaagaaaagttcgatatcttaaaaagaattggacaatgtctattatcaaactggggattgattatgaatcaatttatgcttatgtttgaaaacaggatccagatataagaaaaaacttacagctgaatcctgtttccatttacacaaaattttggacagtgtcactcagtaagaatttgaatgtgattactctgcttttgccggagtataacgcttgttcaatccgtcaatgacttcctgtgtgatattcagggctggatctgcatacagcaggttattgaagccggcattattgataatcagattatatcctttggtcttgttgtattctttcagataagcattgatggaatcacgcaattggatattgttcttgtcgctttcctgttggagctctcccatcagacgctgatggagtgcttcgaggtcctgacgtttcttaatcagacggttctgctcctgttgtgctctttccggagtgaatacatgattttgatatttacgttcaaaatcgcgcatttcgttgtcaaggctcttcattttctctttcagggttacctctacattctcctgcttctttatcatagcctcattcaggtccttacaaagattgtagttgttcagcaagctgtcgatttcaacataggctatttttaagtcagatacgcttcccgcgggagtcgagttgtcgcttgtcgtgttggcagctttgttcccatcacattgtgtaaaagcaaccatgatggccaaagctgaaagcccactcacgataaagtttctttttttcatacttatctgtttctatacagtttataaaacgattattcattgctggataccgacgtgtgcaggctttcgcgtatgccggggcggttgagtctggcttcacggtcctgagattgcacacagtgtacacctctttttctcattgccggattgccactgacgtgtgtattgggaaatttcccgttctttttcacgatgatttgcaaagccagcaacgcgatgcaaatagcaactattaacacggatatgaggattgtttcaagcatttcttctaaatttgtgctgcaaagatatagttttgcgctcactctcacagctctttttacttaaaaaatgagagagggctcggaaaggatattttgatttaaccaaaattagcggagatagactaattatacacgataaaaaggagactttaacgatggaacatcaaacgaaactacaaccggaatgtgtattccattactttgcagaggtttgtaagatacctcgtccgtcaaagaaagaagagaagatgattgctttcctgaaggatttcggggaaaagcatgggttggaaacaaaagtcgataaggctggtaatgtgttgataaagaaaccggctactccggggtttgagaaccgtaaaacggtgattcttcaatcgcacattgatatggtgtgtgagaagaataaggagacacggcatgattttgaaaaggatcctatcgaaacttacgtggatggagaatggttgcgtgccaaggggactactttgggagcagacaacggcattggagtagctacggaactggctattctggcagccgatgatgtgaagcatggaccgattgaatgcctgtttaccgtagatgaagagactggattgactggcgcttttgcattggagaaaggtttcatggacggtgacatcctgctgaatcttgactcagaagacgaaggtgaactgtttattggttgtgccggtggcgtacgtacattggttgagtttgattatcaacccgtaactgttcccgctgatttcttttgcttccggctggctgttgaggggctgaccggtggacattccggagatgacatcaataagatgcgtgcgaatgccaacaagctgctgggtcgcttcctttatcagactaaccgtaagtatgatttctatttgttggatattgacggtggcaacctccacaatgccattccacgtgaggcccatgccctttgcgccataccgatggagcacaaggaagatatccgggtagattggaatatttttgcagccgaagtagaggaggaatatgccgctacggagaaaaacatgaaattcaagttggattcggagacttatcatgctgaggctatcgagcgccaggtagtgacaaggttcctggcagctgtgcaaggagtgttcaatggagtctttgccatgagtcaggatattccgggactggtagaaacatcttcgaatctggcttccatcaaggtgcgtgatcataaagtcattgtgacgagtagccagcgcagttccatcctgtcagctcgcaaaaatgtggcagacagcattcagtccgtgtttgaactggctggtgcgcgtgtagatgtcggtgagggatatccgggttggaaaccgaatacacagtctgaaattctccagattgcagtagatacctataaggaactgtttggtgtagagccaaaggtgaaggcaatccatgccggattggaatgcggcctgttcctggagaaatatccgtctctggatatggtttcgttcggtccgactttgagaggggttcactctcctgatgagcggatgctcatcccgacggtagataagttctggcgccatctgttggctgtcctccagcgtatcccgctcaaggcataaggcatgaaacagaatttgtaaagcgagggcatgatttgtgaatagtcacaaggagtgcccttgttttatgtctgtccggttactcgtgatgataaggacctccgttgagaatattcatggcgcgataaagctgttcgacaaagaccaggcgtaccatctgatgagagaaggtcatcttcgagagggaaactttctcatgagctgcctgataaacatcggatgaaaagccgtaaggaccaccgataatgaataccagccgtctgttgaccgtattcagcttccgttccatccatgatgcgaactctacggagcggaattcctttccaccctcatcgagtaatacgatgacatcacccggctggagggctttcaggatgagttcgccttctttttctttttgttgttccatggaaagcttcttggtgtttttcagttccggaattacttccatgtcaaacgatatatagtgtttggtacgttctacatagtcgttaatggcagcaatgtaatgcttttctacagtctttcctacgaccaataatacggttttcatcggattcttcggttggttcaggttgcaaagatagggcaattggtccggaatgtcaatatgggttgtcgtgcttgtacccggacatgtaattttcatgaaatggggcccgttggtcataccgctgtatgacacgagtcccttccttcttaaatatagagagagtgtatggtgcgttattggatcgtcttgttgttcaggtagctttgcagttcttgtttgtagctgtccgagatggggatgtattcctttccaaatacgattcgtccgcggtcaatgaggcggattttacttttctgcacgatgtaggaacgatgtacacgtaagaaacgggaagagggaagatgctcttctaccgatttcaggctcatgagggataagataggacgaggttcatgctccaggtaaatctttacgtagtctttcagtccttcgatgtagagaatgtcatccagacgaatctgtatgagcttgtagtcgctcttcacgtaaatgaatacatcaccgttatccgtgccttctccatgtccgtttgcagcattctgcgacgcctctttcatctcaaaccatgccaatgccttgttggacgcttcgagaaactctttgtagctgataggcttcagcaagtaatccaacgcattgacccggtagctgtccagcgcatactggctgaatgccgttgtgaagatgatgcgtgtttcgggcactaccatctgtgagaactccagtccgttcagttcgggcatctgtatgtccagaaacagcaggtctaccggattctcttgcagtcctttcattgcaaccactgcactggaatatttaccccggagttgcagaaacggagttttgttgacataggtttccagcaggtccagagccaacggttcatcatcgacaattgcacacgacagattcatagtttacatggttttattgggatatgtattaatggccagcagagaggtatagacacttccgtccgcgttgacacccttccgccattcatagcgtcccggataaagcaactccagacgttttttcacctgttcgagcccgatgccacttccacttttgtccgaacggtttttcggatggttgctgttggcaatctcacagaccacttgtccttcccgttcactgatggtgatgctgatgaaactcggttcagtcggactgattccatgcttgaaggcattttcgatgagtgagatgaagatgagtggggctatgggtgtctggctgtctttcgccacttcgatgttaatgaccagactgactcctttcaccagacggatacgcatcagctcgatgtagttgtgtatgaagtctatctctttacacaaaggtacaaaggttccccggttttcatagagtacatgtctcaaaagtttagacaaatcctgaacggcttgctgtgccttgtctgtatcgaatgcaatgagggcatagatgttgttcagtgtgttgagcaggaagtgaggattcagctggttacgcaagttgttgagctcggcttccatgcggctttgctctgcctcttgccgtgccgtttctgctttttgccactgcatgctcaggcggatgaccgtgcccagtcctgccatgaagatgtacatgacacagtctttgatgagaaaagcccaacgaggtggatggtgaaagctggcaaatggctcaacctttgtatctttcccaaagaaacaatcctgaagataagggaaatagaacagatggaagaataccagtaacacagcaatgagcaaaacattgtagagcaggtagcgtgaccgttcttttttcagaaggaacttgggtaccagcagccaataatttgcatagaagatgatgaagaatgagactgggatggagaggcgacggaaatattcattccaccgtataccctccgaatggtcttccatcagtagcggaaaggtgaaaagcaacacccatgcgatgatatgtatgtagatagccaagtgggctgttttgggagtagaatcgtgtttcatagtgtattgttactctttccgtttaaccagtccggtactttgggagaagtaccggactggagatactgtgctttcttgaaccgggagttttattcgtaccgtaaagcctcgatcgggtccagattggcagccttctgtgcaggataccatccgaagaaaatgcctgttatggtgcagactgcaaagctcagcaggacgctccaaggctggatgaagacgggccaatgtgccacgaacttgacaacccagctggcaccacatccgatgatgacgccgatgagtccgcctgtaatgctgatcaggatggcttcgataaggaattggctcagaatgtcaactccccgtgctccgactgacatgcgcaagccgatttcccgggtacgttcggttaccgagacgtacatgatgttcatgatgccgataccacctacgataagtgagattccggcgatgcaagccagcagggttgtcatcaagtcagtggtcgtgttgagcatctggctgagttcctgttgagttcggatggtaaagtcatcttcatccgtatcgcgcagtttgtgttcccgacgtaaaatctttccgatttcatcggtggcatactcggtcatgtcctctgtcagtgctgaagcatagatgccttgcagataggtgacggcaagcaatcgcttcatcacag

SEQ ID NO: 1149 - DNA, 24500 bp, synthetic construct
  misc_feature 1..24500: note = Synthetic
  source 1..24500: mol_type = other DNA
ttaagtataaaaatctgattgctgctaatccaaatgacccgaggttaaaaatattggattcagttctaaataaacaaccgcatgaagatgcttacaacagctattacaacctggtaaagttaggtttacaggaaccgttaaccacgcatgctgatcattacgaaaccaacgcagcttacagtatttcttcttactctaaaggagaaatatttttggagcagttaggctatattaccggcgcgcaggtacgcgaccagatcttactgcaatattaccgcgaatggcgatttaaacatcctaatgccaatgattttatccgcgtagcagaaaaagtaagcaatatgaagctggactggtacaaagagtactggatcaacaccacaaaaacgatcgattacgggatcgacagtgtttggcaggaaggcaataaaacgaagatcaggttaattaacaacggcaaaatgcccatgcccattgatttgcaaattacttttttgaacgggaaaaaaatgttgcattatattccgatgtatttgatgtttggcgaaaaacctgctgaacctggacaaccattacgcgttgtagaacaagcatggaaatggacacatccaacctatactttagaactgaatggaaaattagctgacatgtggcggattgaaatagacccaactaaacgaatggcagatgtaaaacaggagaataatttatggcaggtgaagtaaacagaaatagctgaaatagtatggcttgttatatatactggtttaaagatttttaggcgataaaagaagcatccatttatgatcttaactgttggccattcctaaaacgatcatcagaaagatgattaaaaagatcatgttgatggataatggctgagtttgtttatgttggatattcatgtggcaatactttaattaaaacaaataattttctctgtaggagaactttataacgttttacaaaagttgcaccaaaatttattcctgcttcattaaaaattgatttaactgtttaaaccgcatttagaaacaaaatttttacatttcttttatcctgagcaaagtttttgccgatgcttcttttaccacctaaaaatctgagtgctgcttagttcagcaattcgtacagcataaatttcggacaaacagttacaatttcaggcttaaccgtaaaaactttgtttggttaaccacttttattattggaggttgtttaaactttttggcaccaatttaaatttggtccttcggcatgcccgggtttgatgcccatgcttcttttaccggataaaattgatgtttacatttaatcactaactggacctataaggttttgaaaaccttataggtccagttagtgaatggttaacattttttaggtgataaaagaagcatcgatccctaaaaacaaacctaacgaccaacatttttagttgataaaagaagcatagacttttacttcatcgttttcttttctgaaaccgtacctgttcctgcaacctccggaaaccaaaccgtcatctccccttttccgcggtttgcccaggagtagtagggaatggccgtaaaccgaacaggctgtattttgcttgtatcgcttgtgtcagcttttaaaacatgtccgcttaaaacggttaaaccgttcagcagaccagcatgataagcaggtgtaaaagttgtccctttcgggatgacgatattacttaccttgccatcattatctttccattcggcacaatacataattggcccgcgctgtaaagcaactttacctgcatcttctgccaggcttgggctggctattacttttttaacctccatcggcaaattcactgcaagccgatcgttctttttccaaaccctgctgatcacggcataaccgttttgcatggcatattttacaggttttccgtttactttgatggttacagaagctggctgattcttttcaaaagaataaagaccggatgggattgcctcatttctcacccatcccggaatacgtactttcagggtaaatgcttgcggtgtttccggtgataaggtaaacgacagcaaaccgttccatgggtaattattttcctggatgatcttaaccgcttttttgttgacctgcagatttgcctggctgcccacaaaaaggttgataaaaacagcatcgcctttctgtgcatacacataacccggaagagcgggaagcaaacgggccaggttggttgggcagcaggaacattcaaaccagccagaccttaccgcttccagggatttatttactttcgatccggggttaacctgcatcgcgttggtatagaaaaaggattttccatccaaaccaacaccggagatcaagccattgtaaagcactttttccatcaggtcgatgtattttgaatccccgtgcagcagaaacatccgctggttccagaaaacgtttcctactgctgcgcaggtttcgttataagcagtttcgttgggcagttcaaagttcgatccaaacctttccccgcttggtacagcaccaattcctccctgcacatacatttttttggaaaccatgttgtcccaaatccggtcggtagcggttagatactcctggtcgccagttaatgcagctacatctgccatgcctgaatataaatacattgccctaaccgcatggccttcagcttcgtcctggtctgtaaccggctcgttatcctgccagtacatgccgtttttccattcatcggtgcttgttttatcgtaagttcttttgccccgttcatcaataaagaatttggctaaatccaggtaatcctttttaccggtgatgcggtacaacctcaccaaacccatttccacaatttcgtgccctggcgcaacatgccttttgcccggaccgaatgttttgaccagcagatcagcattttttaaagcgatgtttaagaaattacgtttcccggttgcttgatagtgcgctgcagcagcttcaaacatatggccggagttatataattcgtggcttaactcgttttccctaacccagcgttccgggcctgcccagggatgcggatgcagcggatcaatcgttcttgccgtatataaataaccatcgggctcttgtgctttgcctacaatggtaatgatggaatccaggtaatggtccaactttggatcgggatgaacggccagcgaatacgatgcaccttctatggttttgtaaatatcggtatcatcaaaagggaatttagtacaaaactttccgctttttgctgccgccatttcaaagttttttacacggccggtattttcacatcgttcaaaagaagccggaatagtaaccgttcggttggtttctatttttggcagccagaactggtctgccagcttaactttggtaaacgataccggactaattgtatagtctttgttttgtgcacaggcaacactactgtacagcaagacagcaaagaatagctttttcatttttttcggtctatagttaacgttctggtttggtttccagagcaatggttgatgcttcttttatcagctaaaaataataacaaattagcatatttagtagattatgttaaaaagcaaaccataagagctactgcatgttaactctccaattaaacgaacattatgacaaattcgaagaagataattgcaaaagcaatcggacttggcgccgtagccggaatgcgtgcaacagttgctccaaccgccctcagtttctttttaaacaaacatccaagtaaagccttggccaaatcaggcctgagctttttgcaatcaccaattacgggcgttatcacaaaagtgttaacggctggcgaatttttaggcgatcaattgcctaacgggccgaaccgcattatttttccgcaggtagctgtacgtgttgcatcaggcgctttggctggcgcaggtttgttccgtgcaaataaagccggaattgcaaaaggtttagtattaggcggcgcttctgctttggcagttactttcgctactttttacttgcggaaatatgtagataaaaaattacacgctaaagattcgattgttggcggcattgaagatttgatctcacttgcaagtggttgggcaattatgaaaagataagaagcaaatccacaagcctcaccctaaatccctctccaggggagagggccggggtgaggcaaaaaaacagccggtaaaagaagcatccaaaattgaatgcttcttttaccggctaaaaatgatgatcgatttttttttggatgaagaactggaacaagttcagccccgggcaaaaaactgggcttaaaatcttatccccacaaattacctggataagttccgctggctaccagttctgatattttttgctgaacaaccggtttatcttctttataagttacaccaaaccattgtgccgaagttgggatcactttaaaagatgcttttccggctttaatcagctcatctgctacttttggcagtaaaaattctgatttcggatcggcggcattttcccccacaaattctttaaacaacggttccatcaatccataaatggccggagaaaatccccagaaattcatcgaagcacgtggatcttcatgcaatggcgtttctaccccgttttcttcatacacaatcacgccgtctttttcgtaaactttcaagcgctcgttaatttctaacaggttgttgttttcatcaaccttacaaacgccgcgtgaaacagaaccatgctcagataaagttttatctatgcggtaacccatcagcgagaaatggttatcggtaacttccccggttaaaaacgctgccattttttcaaaagcttccgcgccgtaaaagtcgtctgcattaattacgcaaaacggttcctgtacctggtttttggcttccagtaccgcatgtgccgttccccagggtttagaacgttcaatttcctggtcgatgccgtaaggttttaaattaaaggtttgaaaaacgtactcggtttcaattttaccattcagttttggctcgaacttagatttaaagctatccacaaattcttcccggatgatgaaactgatcttgccaaaaccggccttgatcgcatcataaatagaataatcaataatggtttcgccgttcgggccaaagccatccacttgtttcatgcttccgtaacggcttgccatcccggctgccaagattaaaagtgttggtttcattgttttatgttgaattgaaatttaaagtttagatttttatccgataaaagaagcatgatactctttttatcagccgaaagtttgtttttttatttaaaatatttaaaatcctggccatcctgaatgttcagcaaactttgatagatcaggctgattacattgtccacatcttctttatgcaccatttctaccgtggtgtgcatgtagcgcaaaggcaaagaaatcaaggctgagggaacgcctgcgttggaataagcaaaagcatcggtatcggtgccggttgaacgggaagaagcctggcgctggaacggaatgttgtttttttctgccgtttccaccaataatttattgacgtttcgttgtactgcaggcgcataagaaacaaccgggccacggccgcaagccaaatcaccttgtgttattttattgatcattggtgtttgcgtatcgtgggtaacatcggtaataatggcaacatccggttcaatatattcagcaatcatggctgcgccttccagtccgatctcttcctgcacagcgttaacgatatacaaaccgaaaggcagttttacgttgttttcttttaataagcgtgcaacttcggcaatcatgaaaccgccaacacggttatccaacgcgcggccaacgtaataacggtcgttcagtaccataaattcatcttcataagtgatcacgcagcctacgtgcacgcctaatttttctacttcttctttggtggtgcagccgcaatccagacaaatgttttttaaagtgggcgcttcttccttttcgccgccgcgggtatgaatggccggccagccgaatactgcttttaccacccctttttcggtgtaaatatttacgcgtttggaaggcgcaatttgatgatcggaaccgccgttacggatcacataaattaaaccatcgctggtaatataattaacgaaccaggaaatttcatctgcatgtgcttcaattaccaccctgtattcagcatcagggttgataattcctacagccgttccataattatctacgtattgtgtatcgatataaggctttaaatattccagccacattttctggccttctgcttcaaaaccggttggcgaagagttattgatgtatttttctaaaaaagaaagggattcgggtgttacaacgggcacgtgtactttttcgggtttctctgtattttcgggcatgttttctataaaatccttttaaacggtttgtttaaaagcaaatatagtaatccaactaaaaagcggggaaaatgtttagcgcccttttaaggtgaggccatgcttcttttatcaacataaaactgttaaagctgctttttcatcatcacaaattcatggccgttctgctgccagctttctccggaaacctccaaaccaaaagttttataaaattttgatgcggttaatcttgcattgcaccaaatagtttcgaggttttctgcggatgccaggtcaagaataaattccatcatttgcctgccgtaaccttttccttgttgtgctgtcagcgttgctaattttcggaattgtaaagcttcatctttaacaaaaagtgaaaccactacggttaattcatctgcaacaaacaagccgaaatggcggccttgtgcatcgtcggcaagttttactttatcaatttcaaattcaggatacattactttttgtctgattggccaggtttgttccgcagtaatggatttaattattgctgacattttaaaaggtttacagctatcagcaatcggctttcagctaaaatttaacgaacaaaaatatagtattcacaaaaaacattagttaaagctatatacgaagtgtgctttttttctttcgctgatgtctgactgcttaaagctaatagcttcaagcagaataaccttttagcaactcgcggtattggtttaacacggttgatttggaaataaaaccaacaaagttttcgcctgcaacaacaggcaaattccaggtattggtatcgtcaaacttgcggataatgctgcgcatatcatcttccagttgtatggttgccggcggcgctttcattactttttccacatccaattcttcgtacatttcgtggttaaacatcacggggcgaatatcatccaaagtaataataccaaccagggtactgttttcgagcacggcaataaaattacgatggccctgcctcaccagatcaagcaactctggaaaagaagcgtgcacgttaatggtttggatgtttttttcgatcaggtctggcgtatggagcagcgaaagcaggttacggtcgtgctcggttgtaaaaatttgtccttcttccgccaattgtttcaggtccggggagatgggcgagaaccatttggatattacaaaagaaataaccgaaacgatcatcagcggaataaacaggtcgtaaccagaactcgcttctgcaattaaaaaaatagctgttaaaggcgcatacattacgccactcatcacacctgccattccaacaataagcaagttattaaccggaacgttaggaaaacccaactgcacataaaccgaagccaggaaaaaaccaagcgtgccaccacaaaccaatgaaggtgcgaagttaccgcctacgccaccactattaatagtaatagaagtagcaaaagccttgaagatgcaaacacagcccaaaaacagcaggataaaccaggaatgatacgggaaatattttaaaaaactaacggaaacaaccgattgcacttgtccgttcgccaggctttttaccgattggtagccttcgccaaaaagcggcggcaataaaacgcacagcaccgaaagcatcagcccgccaataacggctttttgaaaacggtttctttttaaatgcttgaaaaaatgttctacctgctgtgagatcaccacaaaatagcgggcatagaggccgcagcaaatccctaaaataatataataagggatattggtataatcaaaaggatggcgtgtacgaaactgaaacaaggtagcttcgttcaggataattttagaaagcaagcttccgcaaacggctgctacaaccagcggaataaaatcggtaaagaccacgcctgtcagcaaaatttcaaacgcaaacataattccggccataggcgcattaaaggctgccgcaatacccgcagatgcgcctgctgccagcaacaaagtccgctcccgataatccagtttataagtccgtgcaaagttagaaccaatggcagaaccggttaccgcaatggggctttccagaccggcagaaccgccaaaaccaacggttaaagcgctttgtacaatttgcgagtacatttttgtagaagcaacgaggctggaattttgtgcaatttcatataaaattgctggtacgccttttcgtttttctcctgtgaaaaaagtaatagaagctaaagtggttaaaacgataccgataaccggaaacagcatgtagtaaatcacctgctcttcaaaatggactttatcatgaatgaggtattcgatgtaatgcaccagcgatttgaggaaaacgcctgccaggccggaagtaaggccaacaaaaatacccgaaagcagcaggaactggctgcgtgaaacattgttacggacccacatcaggatgatttcgtaacttttggctttgagtatgctgctctttttaaagctttttaaaagatggatgaattgcgcatacttttttttacgggtaaaatctgtcacgtaaactgggtttggttgggcaaaaatagggaaaataaaaaaaggcgagttgccccgccttaaatgttttcacaacggaataatccttattgtgatttgctttcaacaacaaaagtaaaaaatatatttaacacttacctccatccattaggcctttttaaaataaatccattcggtttttgcacttcatcttcaaattgagcatcttttaattttttcctgccaatgatcatattcccttttgaaacatttttaacactaacattgaacctattgggaggaaatccgacaaaaacgcgttttgacggaaacaaagattggatagatttaataggtgggaccaaatcactatcgcctgtaattaaaaatgccgcatcatatttatcattaaaggcatcttccatcatcgaaactgcaatattaacatcggtcattttttcatttgagtaaggataggtatgaccacattttctacattcttcgatatgagattggtagtgcccataaactatcttacaatcacttaatgtttctatcgcttctatatacgtattttgccttcgctccttatctggattattgcggatcctagaagtaaaataatttaagtgtactaattcttgattaggcttaagtaaagataataccaattttttcggatttagccaaagcgtatcattgccgctttgtttcataccaaaataaagattaaaaccatctatatacgcaataattctttcgttgtgatttgctttcattctttgaatatattatctttgcattacaagaacagctccatagatagtatctttggatagacgctccagtaatggggcgtttcgtgtttaatacaaatatagtttaaataattagaaaacaaatttttctacagtactaatattaactatatttgaggataaaaaatagaaaaggtgggatatttctatattactataaataatgtttggaacattatatacagtactgtaggctgtgatttgctttccctttttaattccccatcttttcttatttttaaaacaaaacctttagatacctttctatgaaaaaaattttaggacttgaccttgggactaactcgatcggctgggctttgataaaacaagattttgaaaataaacaagggaaaattcttggcttgggaagtaggattattcccatgtctcaagatattttaggagaatttgaaagaggaaattctatttcacagacggctgaacgtacccgtttaagaggtacgagaagattaagggagcgtcatttattacgcagagaaaggctacacagaatattaaatacacttgaatttcttcctcagcattatgctaataaaattgactttaatgcccgtttaggtaaatttttaccagaaacagaaactaaactagtttacgatgataacggcaatttcatcttcaaagaatcttttgaagaaatgcttacagattttctaaaacaccaacctgagttaatgaacagaaaaaacaagaaaggtgaagatgcaaagataccttacgattggacaatttactatttgagaaaaaaagcattaaccaaaaagatagaaaaagaggaattagcctggttgcttttgcattttaaccaaaagcgtggctattatcaattacgtggtgaagaaactgacaataagccgaataaactggaagatttttactcactaaaaatagttgacgtaaccgcagatgaaccacaaaagggcaagaatgaaatctggtataatattattttagaaaatggctggatttaccgtcgtgcaagcaaattaccattgtttgattggaaagataagattcgtgattttattgtgactactgacctaaacgaagatggcagtattaaaaaagacaaagaaggaaaagaaaaaagaagcttccgtttaccaaaagaagatgattggcaattactgaaaaagaagactgaaaatgacattgaaaaatctgataaaagtgtaggcgaatatgtttatgatgcgcttttacaaaagcctaatcaaaaaataaagggtaaacttatacgcactattgaaagaaaattttacaagagcgagttagaacaaattctgaaaaagcaaattgaattgcataattcgttgcaagatagaaatctgtatcaacaatgcgtagaagagttatatccgcacaatttacatcatcaatctaccttattaaataaggactttctgcaccttattgtagaagatattttgtactatcaaagaccattacgcagtcaaaaaagctctatcagtaattgccccttagagtcaagaacttttatactcgaaggtgtaaaaaaaacagaacctataaagtgtatttcaaaatcacatccattgtatcaagagtttcgcttatggcaatggataagcaacttgcgtattattaacagaggaaatgatgctaatgaaaccgaaaatcatttgcagactattgacgatttcactgcactattcgattttttaaatgaacgaaaagaaatagaccaacagtcgttattgaaatattttaaattaaagggaagcaattaccgctggaactatgtagaggataaaaaatatccttgcaatgaaacccattctatgatagttagcagattggaaaaggtaaatgacgtaccacaaggatttttaactaaaaaaacggaagaagaattatggcatattatctattctgtaactgataaaattgaatacgaaaaagcattgaaatcttttgcacataaaaacggccttgatttagttagtttttatgatgcattcaagaaatttcctccgtttccaagtaattatggttcttactcagcaaaggcaataaaaaaattattacccttaatgcgtatgggtaaatattggaatgaagaaaatatatacgaaaaaacaaaagatagaattacaaaaattattaatgcggaagtagatgaaacgatacaaaatagggtcagggataaagctattaatttaacagataccaatcattttcagggattaccagaatggttggctaaatatgtagtgtatgatcatcattcggaaaaaagtgatttaggacaatggaaaactgttagcgacttagaagaatatttgaaatcttttagacaacattctttgaaaaacccaatagtagaacaggtaattaccgaatcacttagaactgtaaaagatatttggcagtattatggagatggagttgaaggcttctttgatgaaattcatattgagttaggccgtgatatgaaaaatcccgctgttgaacgaaagcgaatcacagaacaagtaactaaaaacgaaaataccaatctccgaattaaagctttattagccgaaatgctaaacgataattctgttgagaatgtacggccttattcacctactcagcaggatattttgaagatatatgaggattttgtattaaatgcagctatcgaaatacctgaggatattgaaaaaatcagcacacaagcacaacctacaagttctgagttgcagcgatacaagctttggcttgaacaaaaatatcgttcgccttatacaggtgaaattatcccattaaacaaactatttacaccagcctatgaaatagaacatattattcctcaaagccggtattttgatgatagctttagtaataaagtaatatgtgaagcagctgtaaatactttaaaaggcggtcaaactgctttacaatttatccaaaatcattatgggcaaattgtagaagtaggtatgggtaaaactgttatggtttttactgaggacgcctacacatctttcgtaaaacagtactacgataaaagccgaacaaagaaaaataaactgttagcattagatattcctgaaaaaatgattgaacggcaaatgaatgatacccgttacatcagcaagtttattatgcaggtcttatcaaatattgtaagaacagacaaagatgatgacggcgcaaactctaagaatatattggcaagcaatggacaaattacgactaaactgaaacaggactggggaatggatgctatttggaatgaattgatcttaccacgctttgaaagactgaaccaaataacgaatacaactcactttacagtttacaatgaaaaataccaaaaatacttaccggctgttccattagaattacaaagagggttccaaaagaaaaggatagaccaccgccaccatgctatggatgcattagtaatagcttgtgctacccgtagccacatcaacttcttaaataaccaaaacgctttagataaaaataaatcaatagagcaaaagcaacaaggtcgttataatttaagaaaaacgctttgcgataaaaaatacaatgacggttcttctgaaaattacaaatgggtatttaaacaaccgtgggtaggatttatccccgaagcaaaaagtaaattagaacaagttgtggtaagttttaaacaaaatttgcggatcattaataaaactgtcaatcagcatgacattataataaagggcggaaaaaaagataagttaaaacagcaaaaaggggaaagttgggcaatcagaaaaccattgcacaaagatacagtatcaggatcggtttcattaagaaaaacaaaaccagtttcattatccactacctttgaatcacctgaaaatattattgataagcctttaagaaaatatataaaaaaactaattgcagaaggcttggacaagaagaaattagtaaagcactttaaagaaaataacaatcagctatatgggcaagatatttccaaagtaggcatttactattgggaaaatgataatgttgcatccagagtaagccttgacattacttttaataaagcaagaattgaaagtattactgatactggtattcaaaaaattctattgaaacacctcgaaaacagtaaagacaatcctgaaattgctttttcgcctgaaggaattgaggaaatgaacaaaaacattgttgtgttaaacaatggaaaatttcatcaacccattttaaaagtacgaacttatgaaactaagggaaataagtttgcagtaggtcaatcaggcaataagaaaacaaaatttgttgaggctgcaaagggcacaaaccttttctttgcaatttaccaagatgaaaacggcaaacgaagttttgaaaccattcctttaaatattgtaatcgagcgccaaaagcaaaaactattatctgtgccagaaagtaacgtagatgaacaaaaacttttaatgtttctatctccgaatgatcttgtttatgtaccgaccaaagaagaaagagaacatatttcaaacatcaactttagcaatcttgataaagagcatgtaaaaagagtttataaaatggcaagttcaacctcttatcaatgcttttttatacgaaatgatattgcaacatcaattgtaaacaaagtagagttttctgctttaaacaaaacagaaaaatcagttgatgatataatgattaaagagttttgtataaaactttctattgatcgtttaggaaatattaaacctgtttttaatactcaaatttaacattttaataaaacacttcttttacgactaaaatttagaactgaaattctggactgcacaaatgatgtaatttaaacacgtaaaaaaagcattgacaaacttggaagttaaatgtaaattacctctatgatcaaacgcaccctccatttcagcaacccggcctacctcagcctaaaagaaagccagttacaaatagacctgccgcatttaaaagttttaggcgaaaaggaatctaaaaaaacagtgccggttgaagatgttgggattgtggtattagaccatcagcaaattaccattacccatggttgtatggctgcattgctggaaaacaatgcagccatcattacctgcaaccatacgcatcatccaaccggaatgatgctgccgattgacgggcacgatactcaaagcgagcgtttccgttatcagatagatgcttcccaacctttaaaaaagcaattgtggcagcaaactatgcaggctaaaatactaaaccaggctgcggtattggcagatcgcggtatcgcgtacgagaatatgctgcactgggcaaaatcagtaaaatcaggcgatccggataattacgaaggccgggcagcagcttattactggaagaatgtgtttccgaagaaaatagaattctttcgcgggcgcgaaggagatccgcccaacaaccttttaaattatggttatgctattttaagggctattgtagcaaggggactggtttgctccggcctgctccctacccttggcatccatcaccgcaacaaatacaatgcctattgcctggccgatgatattatggagccttaccgcccttatgttgaccggatcgttttaaagatcattgataatggcgagaactttttggagctgggcacttccattaaaacacaattgcttgggattgcaacggttgacgtggaatttgaaaaaggccgcagccctttaatggttggcctgcaaaacactacggcttcgcttgccaagtgttatgaagggacggccaggaagattgcctacccctttatcagaaactttgaagctaaacgaaattataaagcctttaccgagggtgacttcagcaaagctgccgaagcggaaacaggttataaaacagcaattgatgatatagatttacctttttaatgaatgcgtttaaatgaataccgcatcttgtggatattagtattgttcgacctgcctaccgaaactaaaaaggaaaggcagatttacagtaagtttcgtaaggacattatgaaagatggctttgccatgttccagttttcgatttacctgcgccattgcagtagccgcgaaaatgccgacgtacatattaagcggataaaaaaagcattgcctgccaaagggcatgtaggcattatcacgataaccgacaagcagttcgggatgatggaactgttttatgggaaagaagaaaaagccctgccaaacacgccacaacaattagaactattttaaggtggtccatttcgtattaccagctcagccatacttcttttagcaataaaaaatctgcacttatatttttaaatatagaacagataaaaaagaaagtttaatgattttataaggtaaaagaagcagtaaagagtagctacccctttccattagaaaaacaaaacaacaaaaataaaaaccccggaagctaaagcaaccgagttttttattttctgattttttgattaaactactgatatttaactccttataagctgataggttgggttaaatatcagtaattcaaagaatgaaagcaaatcacaacaatggaaatgctattgataattaatatctgttgggttaaatatcagtaattcaaagaatgaaagcaaatcacaacttgaatctgtgaaggctataaatgctcaaagttgggttaaatatcagtaattcaaagaatgaaagcaaatcacaaccttttagcccaattatatatttttcggcatgttgggttaaatatcagtaattcaaagaatgaaagcaaatcacaactacaccaacatgggtagttgagcatcataagttgggttaaatatcagtaattcaaagaatgaaagcaaatcacaacatgttattgctgctgttgcttcgcaaattggttgggttaaatatcagtaattcaaagaatgaaagcaaatcacaacaatactgtttaactcgttggcatagcgtgcgttgggttaaatatcagtaattcaaagaatgaaagcaaatcacaactaaaaatccgatgcccaacttacagggtaagttgggttaaatatcagtaattcaaagaatgaaagcaaatcacaacatatatagatgatacttgccaaatttgcgggttgggttaaatatcagtaattcaaagaatgaaagcaaatcacaactgactaaatatgttggtggaaatgacaaacgttgggttaaatatcagtaattcaaagaatgaaagcaaatcacaacaaacagcaattaggtattaaacagcaattagttgggttaaatatcagtaattcaaagaatgaaagcaaatcacaacccgacacaaaaagattaataatctgtgcttgttgggttaaatatcagtaattcaaagaatgaaagcaaatcacaacacagacaacgataatttaaataactttttagttgggttaaatatcagtaattcaaagaatgaaagcaaatcacaaccggacggaagttggatagtaggtgtaaaggttgggttaaatatcagtaattcaaagaatgaaagcaaatcacaacaccacgcggagtacttataaacaacgcgttgttgggttaaatatcagtaattcaaagaatgaaagcaaatcacaaccgaatactatcagatggagcgggcggatgagttgggttaaatatcagtaattcaaagaatgaaagcaaatcacaacaatacaaacatctggatcgggcaatggctcgttgggttaaatatcagtaattcaaagaatgaaagcaaatcacaacaatttggcgtaccagccgctgtttattacgttgggttaaatatcagtaattcaaagaatgaaagcaaatcacaacgctctgccaggtcgtattccacaccgttttgttgggttaaatatcagtaattcaaagaatgaaagcaaatcacaacgcggaattgataggataacttttttaagcgttgggttaaatatcagtaattcaaagaatgaaagcaaatcacaacacaataccagaatcacacgcattacacttagttgggttaaatatcagtaattcaaagaatgaaagcaaatcacaacatgataaggaacataagtttaaagggattggttgggttaaatatcagtaattcaaagaatgaaagcaaatcacaacttaattccgtttaattttgttgtgtaatttgttgggttaaatatcagtaattcaaagaatgaaagcaaatcacaacacttcgtcgccaatttttaagctattgattgttgggttaaatatcagtaattcaaagaatgaaagcaaatcacaacatttaattatgggcatgctgcaccagtttagttgggttaaatatcagtaattcaaagaatgaaagcaaatcacaacattgaatttgagatatttttaattccattagttgggttaaatatcagtaattcaaagaatgaaagcaaatcacaactgctgccagttgtctgaacccgccgccgttgttgggttaaatatcagtaattcaaagaatgaaagcaaatcacaacaaagatcaattgattgcatttaatacttatgttgggttaaatatcagtaattcaaagaatgaaagcaaatcacaacatactgctcggagggtggaagttgctcggggttgggttaaatatcagtaattcaaagaatgaaagcaaatcacaactgcagatgacggcaatagttttttgtccgggttgggttaaatatcagtaattcaaagaatgaaagcaaatcacaacagcagcagggaaactacagacctgagcggcgttgggttaaatatcagtaattcaaagaatgaaagcaaatcacaacccgttccagcagttcttctgttgatttttgttgggttaaatatcagtaattcaaagaatgaaagcaaatcacaaccattaggcaatgcgcccatcggtgctgtttgttgggttaaatatcagtaattcaaagaatgaaagcaaatcacaaccaatatttgtatggaaactcttcaaaagaagttgggttaaatatcagtaattcaaagaatgaaagcaaatcacaacggaagaaaagctttaaccgctgcgaagtaagttgggttaaatatcagtaattcaaagaatgaaagcaaatcacaacgcagctagatttcatttgttatttacgttagttgggttaaatatcagtaattcaaagaatgaaagcaaatcacaacacgccgataaggctttggcaatactatgtagttgggttaaatatcagtaattcaaagaatgaaagcaaatcacaacaagttaaggtttttttatgcccaaaccatagttgggttaaatatcagtaattcaaagaatgaaagcaaatcacaaccacacaagtaaaaaggcttacacacaggtagttgggttaaatatcagtaattcaaagaatgaaagcaaatcacaacagatagccgttaaccgaaacaaaatggaaggttgggttaaatatcagtaattcaaagaatgaaagcaaatcacaacagttcctgcatccagctaatgtcttcttctgttgggttaaatatcagtaattcaaagaatgaaagcaaatcacaacagttaatggctctttaaattctaaaacaagttgggttaaatatcagtaattcaaagaatgaaagcaaatcacaacaataatgcctacattgactttcattttcatgttgggttaaatatcagtaattcaaagaatgaaagcaaatcacaactacaaacttcagggttattttttcaagtacgttgggttaaatatcagtaattcaaagaatgaaagcaaatcacaacaaataccgcgttggcgaaaattgggtttttgttgggttaaatatcagtaattcaaagaatgaaagcaaatcacaaccgaaattcaaagacttagaaaatgaaaaagttgggttaaatatcagtaattcaaagaatgaaagcaaatcacaacaagattcaagtattaagctcgtgcctgatggttgggttaaatatcagtaattcaaagaatgaaagcaaatcacaacagcagtatgataaccccatgttatgggaaagttgggttaaatatcagtaattcaaagaatgaaagcaaatcacaacatactgatgatgatgagcagcagctcaaatgttgggttaaatatcagtaattcaaagaatgaaagcaaatcacaacattatcgccttttatttattggttgccttagttgggttaaatatcagtaattcaaagaatgaaagcaaatcacaacaaaggatcagggttctgaaagaccataatgttgggttaaatatcagtaattcaaagaatgaaagcaaatcacaacttaacctgaaatagattatctttttgaacagttgggttaaatatcagtaattcaaagaatgaaagcaaatcacaacaaatcgtgtaaaacatggtattttttatcgttgggttaaatatcagtaattcaaagaatgaaagcaaatcacaacaaagcaaagaagcttatgaaaaatacagaagttgggttaaatatcagtaattcaaagaatgaaagcaaatcacaactccgcattcaaaaccccttttccgtccatggttgggttaaatatcagtaattcaaagaatgaaagcaaatcacaacgatgatgctcgcatttccggtaacgctatggttgggttaaatatcagtaattcaaagaatgaaagcaaatcacaacttcttttttaaatgggctttgaaacaagacgttgggttaaatatcagtaattcaaagaatgaaagcaaatcacaacatgcctttcgcttttcgcgtaaattctaatgttgggttaaatatcagtaattcaaagaatgaaagcaaatcacaacaagcaatggttgtatcagatcaagcataaagttgggttaaatatcagtaattcaaagaatgaaagcaaatcacaacggtaatcaaaacagctcgcgaccaatccagttgggttaaatatcagtaattcaaagaatgaaagcaaatcacaacacttgataaagggtaaatatttttggatatgttgggttaaatatcagtaattcaaagaatgaaagcaaatcacaacttgatgaagtttttaccaacacatgcagacgttgggttaaatatcagtaattcaaagaatgaaagcaaatcacaacaacttgtgctttggttctcgcgtgcagcgtgttgggttaaatatcagtaattcaaagaatgaaagcaaatcacaactacggccagcatattttttattttgtgtatgttgggttaaatatcagtaattcaaagaatgaaagcaaatcacaacaagttgccttttacctggtgctgatcagtgttgggttaaatatcagtaattcaaagaatgaaagcaaatcacaacgcgtattggaacgcgctgttttggtacattgttgggttaaatatcagtaattcaaagaatgaaagcaaatcacaacagtaattgcaaagggtttgccggccacaaagttgggttaaatatcagtaattcaaagaatgaaagcaaatcacaacatacttaatatgataaagagaattagcagggttgggttaaatatcagtaattcaaagaatgaaagcaaatcacaactatcctacatatcaaatgacataggtacttgttgggttaaatatcagtaattcaaagaatgaaagcaaatcacaacagttgttaacggatgattttgaaaaccgcggttgggttaaatatcagtaattcaaagaatgaaagcaaatcacaactccgattggttgaggtactcttgcaattttgttgggttaaatatcagtaattcaaagaatgaaagcaaatcacaaccaagttctgccggaggtatcaaaacaaccagttgggttaaatatcagtaattcaaagaatgaaagcaaatcacaacaataaccttaaacaaccttacacatcatgggttgggttaaatatcagtaattcaaagaatgaaagcaaatcacaacactatgataatataccttcgattttatcacgttgggttaaatatcagtaattcaaagaatgaaagcaaatcacaacacatttaataatgcaattatgaacagaagtgttgggttaaatatcagtaattcaaagaatgaaagcaaatcacaacattatagcgatttatcagattctgctttgggttgggttaaatatcagtaattcaaagaatgaaagcaaatcacaactatttctcaggaattgcatgtagtcttccagttgggttaaatatcagtaattcaaagaatgaaagcaaatcacaactacaaagtaaaatgaagtataatatggagcgttgggttaaatatcagtaattcaaagaatgaaagcaaatcacaactagtggaataaacatttggaattgaggttggttgggttaaatatcagtaattcaaagaatgaaagcaaatcacaactcggcgctgatctcgccggcttttttatctgttgggttaaatatcagtaattcaaagaatgaaagcaaatcacaaccaaagccctggttaaaagtaacgagggtcagttgggttaaatatcagtaattcaaagaatgaaagcaaatcacaactattgtaccccacttaacaagtttgataccgttgggttaaatatcagtaattcaaagaatgaaagcaaatcacaacatgcttactgggttgattcatcttatttagttgggttaaatatcagtaattcaaagaatgaaagcaaatcacaattagttggagtattatataaaaaaactacatgttgggttaaatatcagtaattcaaagaatgaaagcaaatcacaaccccagtctgtaagcattggcaactgttcgtgttgggttaaatatcagtaattcaaagaatgaaagcaaatcacaacccaaacaagacggtacaaaacgttatatcgttgggttaaatatcagtaattcaaagaatgaaagcaaatcacaaccagcactatacaacatagcaaaattatgagttgggttaaatatcagtaattcaaagaatgaaagcaaatcacaaccagcttctgaaatcaggtttgaaacttcaagttgggttaaatatcagtaattcaaagaatgaaagcaaatcacaaccgtgaatgtggtgggttgcccatgtgaaagttgggttaaatatcagtaattcaaagaatgaaagcaaatcacaaccaaaaaacgttgctaagtttcctttgattggttgggttaaatatcagtaattcaaagaatgaaagcaaatcacaactactgctttttattgcagcgtccggcagcagttgggttaaatatcagtaattcaaagaatgaaagcaaatcacaacgaataaatggcttgccatcgcctggcaatagttgggttaaatatcagtaattcaaagaatgaaagcaaatcacaacttgcaagcagatgccagccaataagcggcagttgggttaaatatcagtaattcaaagaatgaaagcaaatcacaacggaagtcctgcggatgtgatttcaagtttggttgggttaaatatcagtaattcaaagaatgaaagcaaatcacaacgccacgcggcgtgcttataaacaacgcattgttgggttaaatatcagtaattcaaagaatgaaagcaaatcacaactacccgttatctggtattcgtgtaaatcttgttgggttaaatatcagtaattcaaagaatgaaagcaaatcacaaccgtatcaaaatcgcccgtacagtaatcgttgttgggttaaatatcagtaattcaaagaatgaaagcaaatcacaacacagaagaataattaaccggaaccaaaatagttgggttaaatatcagtaattcaaagaatgaaagcaaatcacaacgtctgctgtaggtgtataaacatcgtttaggttgggttaaatatcagtaattcaaagaatgaaagcaaatcacaacccggtctattaaatccattttggcccacttgttgggttaaatatcagtaattcaaagaatgaaagcaaatcacaacaatatctaccggggcaaaacgcctggcaacgttgggttaaatatcagtaattcaaagaatgaaagcaaatcacaaccagcgaccgttttttgcttgttcattatatgttgggttaaatatcagtaattcaaagaatgaaagcaaatcacaacgtaaacaacggcataaatgcaatagaagtggttgggttaaatatcagtaattcaaagaatgaaagcaaatcacaacataccttgcaataaagatttaatttctaatgttgggttaaatatcagtaattcaaagaatgaaagcaaatcacaacgctttggtgtatggaaatgaaaaaacacttgttgggttaaatatcagtaattcaaagaatgaaagcaaatcacaacacctgcgctggttggtttcgcaagtgtgcagttgggttaaatatcagtaattcaaagaatgaaagcaaatcacaacatataggttgcgatggtaacgcgtaccctagttgggttaaatatcagtaattcaaagaatgaaagcaaatcacaactgtataatttgcgcactaaaatctttttgagttgggttaaatatcagtaattcaaagaatgaaagcaaatcacaaccaggaacacttggtgattttgctaataaaggttgggttaaatatcagtaattcaaagaatgaaagcaaatcacaacgctatttgattggtt

SEQ ID NO: 1150 - DNA, 24500 bp, synthetic construct
  source 1..24500: mol_type = other DNA
  misc_feature 1..24500: note = Synthetic
catctacgaggtaaccaccgagcagggagcgttctgcatcctgagcttcaaatcgatgggccgcgtgtgctaccgtttcatcgactcgccctaccgcatggaattctttgtcgacgagaaccgcacggcctacagcggaaacgaccgtatccgtgccgccctcgaccagtacggagtggactactcgcgcatcatctatacctacgacgaataccgtaacatcctctacggcaacggggcaggtcctgaaatgagccgctactcgctcatggagagcaagcagtaccagaacattccgcgtaccatacagaacgtgctcctcaactcaaaactcgatgcggagttcatcaagaagaccatcatctcgtccatcaacgaagacgagaccgccatcgacctgaatacctacaaggagcacctgaagaacttcgaaacccgtctgcgcgacatcgaagagttccagaaacgcgaaacgcagaaacaggccaaagaaatcacctccctctcggcacaggtgtcacgtcagcagactgccctggtgcagggttgccgcgaactggccgccacctaccgccttaccgaaagccagttgcccaaggccgaggaacagaagcaccaggccgagaaggcacgtaccgccctcctgaatcatcgtcaggagttacaggaacagtcgcgccagcgctgcgacaagatgcaggaggcactggccatcctgaacaacgaactacaaaaagcacagcagaaagaaaaggaatatgcccgccgccagatagaagaaatcatggagcgttcggcccgcaaggaggagtggaagaacaagcagcagggattgcaggaagagcagcgcatccttacttcgcactacacggaaatctctaccaagtacaagtcgctcatccagagcctcgacgagcagtggaaccgcatccacgaggccaaaatcaagcagtttgagggactgaacaacacgttcaatgcccgcatcgaagaagctcgccgtcagcacgaagcggctaccgaaacgctttatcaggaatacgaacagctctcgcagcaactgcatccggagcgcagcagcaagcagaacgaactgactgccctcgactaccagatgcagctgtgtcgaaaggagaccttcttcgaagccgaacaggaggaactgaaacaccgcatccagtcgtacaccggtctgcacatgagcaagaagaatcgcatcaacaacgcccagctcatcatcaaggaacttaccctgaaatgggaagaagagttgcagaagggactgaaggagaaagacgaggcactgatgcagttgcaggccgagcacttgcaactccgtccgcgtatggacgaactggagaccttcctaaaaaacagtaagagcaccctgcaaggctggcttaaggagcacaaaaagggatgggaagagaacatcggtaagctgtgcgacgagtccatcctctggcagaccaacctctcgccgaagattgtagacgagggtacgtcgttctacggcatctccatctccctgcaggacatcgagcgccacatccgctccatcgatgactatcaggcggaacatgacaagggcatcaagcgactggctgaaatccaggctgaaaccctccgtctgcaacaggagaaagagaccctggaagagcagctgaaagccaaataccagccgcgcatcaaggaacagaaagacgtgatagccgtacaggaatacgaactggaaaaactggaacagcaataccagaaggatatgctcgacctggacgactggaagaagaaggcggaagccgaacgtgctgccaaactccggaaactggaagaggaaaagcaacgcatcgccgcagaactgaaggaaattgacggcaaactgaacaacctgaaccgcgaaaagagcgagaagctgaaccagctgaagcaggaatggaaccgagtgcagcaggacatcgcgcacgagaaggatacacaggccggcagcatccgcctggaggataaggaagaacagcagcgcatcgccacggagaaagccgaatacgagcgccagatgaagcaggaactgcactcgcagggggccgacaccgaacgtctgcaacagattagcagtcagttgcgcgatatcgaccgggaactgcagttcatcaaggagcacgccaccctgctcatcgagtaccagaaggacaagcgcgacctcatcgaccacattccggaatggaagcgtgaacaggaggaacagaaacgccagctcagtcaggagaaggacaacctgcgccgggaaacctcgggtttgcaggagcagattgatgccctgaacaaggaactgcagcaggcagagaaggaagtgacacagcttcaggccaacctggaggcgtacagcaagatttcggcctacgactggtacaagccgcatcgggatattttcaatcccgagaaccccgtcacgctggaaatccacacgccgcgcacctgcctggaactgattgacgaactgggccgcacggacagccagtacatgacgctgcaaaaccgtctgcgcaaggaggtgaatctctttaccggccacttcgacgaggagaataccttcaagttcaagaccaagtttaccgaggactgggagtacatccgctttgccgaggaactgcacgacttcgtggaagagaacaaaatcagcgaattcgtccgccgcatcaacaacgagcactccgacatcttcaagcgcatcagcatggatacctcaatgctcacggcttcggaagacgatattcaggacctcatcggtcaggtgaacaagggattccagacgtgcaacttcgtgggcgttatccagtgcatcgaaatgaaggtggaagaaagcagcaaccgtgtggtaaactgtctgcgtgccatccagaagtactacaacgagcatgcctatgacctcacgccgggcaccaacctcttctcgtcggaaaacgagcagctggtaaagcaggaggccatcgccctgctccgcgacttcatcaaggagattcacgcctaccgctacgacagcatccgcctgtacgactcgttcgagctgcgtttccgcatcatcgagaacaacaacgacacgggcttcgtggagaagctgtcgaacgtgggttcggaaggtacggacatcctggtgaaagccatgatcaacatcatgttgctgaacgtgttcaaggaaggggcttcgcgcaagttcaaggacttcaagctgcactgtatgatggacgaaatcggtaagctccatccgaacaacgtgaacggtatcctgaagtttgccaacgaccggaacatcatcctcatcaacggttcgcctaccgaactgaaccgcgatgcctacaagcatgtgtacctgctcaccaaaggcgcgcagagcaagacacgcatcgcccgacttatttcagaccagaaactgtaggcttttcaggctccatgaatgcctttttcaaaacgtctttgcgattactccaaaacgctttgacgtttacaataaaacgcaagtgcattcgaagtaaaatgcacttgcgtttcaaatgaaactcccttgcgtttgttctaaaacgcaagggagttttttatggcttatttttaagaatcttcaagcaggctatataacaaaaaaagagcctgaaaaacaggctcttttaagattgaatcagcaggagccgaaagcgggactcgaacccgcgacttactcattacgaatgagttactctaccaactgagttatttcggcaacgtgtttcgttgaaaacggttgcaaaattactcttttcttgaaacctgccaaataaaaaagagatttttttccgaaaaactaaatttttccggcccgtacaacctgtttccgctacatcacaggggcatttgacacattattacgtgtaatttgtacaatagtcccttgtctgcctcctgccgatttcctacttttacccgcaaaatgaaacattacactaccatgaaaaagaaactgatgatttcactgctggcactggcttcactgggagccggagcacaaaacttgcaaaagggagactacggatacctgtactgccacatgagcggacgaggggaatggacggcctacgccctgagccgtgacggcgtacactttcacgacctgattgatggcgaccccgtatacaatgtagaagaaatgtcaaaaatagagggaggagcacgcgatgcctttatctgccgcacgtccgatggaaaaggctatctgatggtgactaccgacatgagcaacgccaagagccgctcgtggttcaactacggcataaacctgctgaaaagtgacgacctgattcactggacttctactaccttcgacttccgccagggaccgggcatcttctgtgaccctcagtcgcccgatgtctataaggactacagcaccatcaagcgcgtatgggcaccgcagattttctgggacccttcgtacgtatgggccgatggcacgaagggcggatacatgatatactattcactgcttaatccggcagaagaccagtacgaccgcgtgttctattcctatgccgacgccacctttacacgtcttaccaagccccgcctgctggtggactggggatatgctaccatcgatgccgacatcaactatgtgccggccgacggactctaccacatgctcatcaagaaagaaggaggtacacccggcatctttgccgccacagccacgaaactgaccggcccatacaagataaaggatgagaatgactatgtgaagtttgaaggcaacaagaagtgtgagggctgctctgccttccagctggtgggcgattccacctggcgcgtggcctacatcgaatactcctccaagcccaaaagataccgcatctgccaggctgatgaaaaactcgccaacttccactcccccgtcaccatggagggcgtgaaacatccgcagcacggctcgttcatgcggctcaccgaagaagagtacaagcgcctgcaggaatggtcggacagcatcatgcgcgaaagagccgcccgaaacagcggagaaaagaaataaaaagaggaaaatgaaatatttttgtaaaaacttttggcaaacatcctttcatttgaacagaaaacattatctttgcactccgaattatgacgtgacaaaagagtttgatgtattactgtataacacatagtaaaaagaataagcgcacattcggagttctggcggaatggacaaatgccggaagctatttcttttttcttttatgtcacttatttcctgaatatttaagatttcctattttatcaaacacccggaactgcttttcggcaagtccgggcgttttttcgtatatacgagagtagaatagaaaaaaatacaagatataaagattattagtaacaaggtaatgagaaatgtaacattgatcctcgacgacgggagccgctttcatggcaagtcgttcggctatgagaaaccggtagccggtgaagtagttttcaacacggcaatgaccggataccccgaaagcttgaccgacccttcgtatgccggtcagttgatgacactgacttacccgctggtaggtaactatggtgtgcctcccttcacgttcgaagcaaacggactgcctactttcatggagagcgaaaaaatccatgccgaagcgattatcgtaagcgattacagtgaaaaatactctcactggaatgctgtggaaagtctgggcgactggctgaaacgcgaacagattccgggcatcacgggcatcgacacacgcgaactgacaaaagtattgcgcgaacatggagtgatgatgggaaaaatcgtgttcgacgatgaaccaaataacattcccgaagctacctatgcaggtgtgaactacgtagacaaggtttcttgcaaggaagtgattcgctacaacgaaggcgaaggcaagaaaaaagtagtactggtagactgcggcgtgaaatcaaacattatccgttgcctgctcaagcgcgacgtggaaatcatccgcgtgccttggaactacgacttcaactctctgcagttcgacggtctgttcatctccaacggtccgggcgaccctgacacctgcgatgcagccgtgcagaacatccgcaaggccatgcagaacgaaaaacttcctatcttcggtatctgtatgggtaaccagctgctttcaaaggcaggaggtgctaaaatctacaaactgaaatacggtcaccgcagccataaccagccggtacgcatggtaggcacggaaaagtgtttcatcacctcgcagaaccacggttatgccgtagacaacaacacactgggagccgactgggaaccgctcttcatcaacatgaacgacggttcgaacgaaggtatccgccacaagaagaacccctggttctcggctcagttccacccggaagctgccagcggtcctaccgacacggaattcctgttcgatgagtttgtaaagttgctgtaatccactaaaaaacaaagaagacaatgaaagaaaacataaagaaagtattgctgttaggttcaggagccctgaaaatcggtgaagcaggtgaattcgactactctggttcgcaggccctgaaagcactgaaggaagaaggtatcgaaaccatcctgattaacccgaacatcgccaccgtgcagacttcggaaggtgtggcagacaaaatctacttcctgcctgttactccgtatttcgtagaaaaggtcatcgacaaggaacgtcccgacggcgtgctgctgtcattcggtggacagactgccttgaactgtggtgtggctctctacaaagccggcgtgttcgagaaatacaatacccgcgtactgggtactccggtacaggccatcatggatacggaagaccgtgagctcttcgtacagaagctggacgaaatcaacgtgaagaccatcaagagtgaggcagtagaaaacattgaagatgcccgccgtgcagcgaaggaactgggttatccggtcatcatccgtgcagcctacgcactaggaggtctgggttcaggtttctgcgacaacgaagaagaactgaacgtgctggccgaaaaagcgttctctttctctccgcaggtgctggtagaaaagagtctgaaaggctggaaggaagtggaatacgaagtagtacgcgaccgtttcgacaactgtatcacggtctgcaacatggaaaacttcgacccgctgggtatccacaccggtgagtctatcgttatcgctccgtcacagacactgaccaacagcgaataccacaaactgcgtgaactggccatccgtatcatccgccacatcggtatcgtgggtgaatgtaacgtacagtatgcgttcgaccctgaatcagaagactaccgcgtaatcgaggtaaatgcccgtctgagccgttcttctgcactggcttctaaggctacaggttatcctttggctttcgttgcagctaagctgggattgggttacggactgttcgacctgaagaactcagtaactaaaacaacttctgccttcttcgaaccggcattggactactgcgtatgtaagattcctcgctgggacttgggtaagttccacggcgtagaccgcgaactgggctccagcatgaaatcggtaggtgaagtcatggccatcggacgtaccttcgaagaagccatccagaaaggtcttcgtatgattggtcagggcatgcacggtttcgtagaaaacaaggagctggttatcgaagacatcgacaaggcactgcgcgaaccgactgacaagcgtatcttcgtcatctcaaaggctatgcgtgcaggctacacagtagaccagattcacgacctcaccaagattgacaagtggttcctcgacaagctgatgaacatcatgcagacttctaaggaactccacgagtggggcaacaaccatacacagctttcacagctgccaaatgagctgctctacaaggcaaaacgtcagggattctctgacttccaggtggcacgtgccatcggctacgaaggcgatatggaagacggtatcctggaaatccgtaaccaccgtaagagcgtaggcatcgtgccggtagtaaaacagattgacacgctggcagccgaatatccggcacagaccaactacctgtacctgacttacagcggcgtggctaacgatgtacattatctgggcgaccacaagagtatcgtcgtactgggttcaggtgcttaccgtatcggttcatccgtagagttcgactggtgcggcgtacaggcactgaacaccatccgcaaggaaggctaccgctcagtaatgatcaactacaaccctgaaaccgtatcgaccgactacgatatgtgcgaccgtctgtacttcgacgaactgactttcgaacgtgtgatggatatcctcgacctggaaaatccgcacggagtcatcgtatctaccggtggacagattccgaacaacctggcattgcgcctggatgcacagaaggtaaacatcctgggaacttctgccaagagcatcgacaacgctgaagaccgcgacaagttctcggctatgctcgaccgtatcggcgtagaccagcctgaatggagcgcactgacttcaatggaagacatcaacgcatttatcgaaaaggtaggattccctgtattggttcgtccgtcatacgtgctttctggtgcagccatgaacgtatgttctaaccaggaagagctggaacgcttcctgcagctggccgctaacgtatcgaagaagcatccggtagtagtaagccagttcatcgaacacgccaaggaagtagaaatggatgccgtggcacagaatggtgaaatcgtagcttacgccatctctgaacacatcgagtttgccggcgtacactctggcgatgctaccatccagttcccgccgcagaaactgtacgtagaaaccgtacgccgcatcaagcgcatctctcgtcagattgcgaaagaactgaacatctctggcccgttcaacatccagttcctggctcgtgaaaacgacatcaaggtaattgaatgtaacctgcgtgccagccgttcattcccgttcgtcagcaaggttctgaagattaacttcatcgaactggccacaaaagttatgttaggtctgccggtagaaaagcccgaaaagaacctcttcgacctcgactacgtaggtatcaaggccagccagttctcgttcaaccgcttgcagaaggccgaccctgtgctgggtgtagacatggcttctacaggtgaagttggctgtatcggcgacgatacttcatgtgccgtactgaaagccatgctgtctgtaggctaccgcattccggaaaagaacgtcctgatgtctaccggtacactgaaacagaaagtagatttgcttcaggcagcacgcgccctcaaggccaaaggttacaacatcttcgctaccggcggttcttctaagttcctggcagaaaacggagtggaaaacacccgcgtatactggccaagcgaagaaggtcagcctcaggcactggaaatgctacacaagaaagaaatcgacatggtggtaaacattccgcgtgacctcactcctaccgagttggaaaacggatacaagattcgccgtgccgcagtcgacctgaacattcctctggtaaccaatgcccgtctggcaagcgcattcatcaatgccttctgctctatgagcattgacgacatcgctatcaagagctgggacgaatacaaataatccgtaccacttaaagatatagataaaattaatcccctccggaactatttgttatgaatgagttctggaggggattttttatttatagaaaacataaaacaataaaaaagcccaccgataaaggacgatgggcaagcgcctaaatgttttcacaacggaataatccttattgtgatttgcttcattttagttttacaaaaataaaaagaaacaacacaaaagacaagtttttttcataaaaaattagtagttttgagaaaattgaaaaatacaactatgaaacatattttaggtttagacttaggtaccaatagtataggatgggcagttatcaattcaaactttgacgaagcaacccaaaaagaacaactaaaaggtatagaggcagcaggaagcagaataattcctatggatgccgcccaattaggagacttcaataaaggaaatacagtttcacaaacagccaaccgtactcaataccgcagtacccggcgattatatgagcgaaaaaaacttcgcagagaaaggctgcaccgcgtattgcaactattgggcttcctcccatcccattacgctggccaattagaccgatatggaaaatttatagctaactcagagccaaagttagcttgggaaaaaggcgctaataatttaccctactttatctttcagaaatcttttcaggaaatgctgaaagacttttcacaagaagatagatgtactaaaaaagtaccgtatgactggacattattctatctacgcaaaaaagcccttacacaaaaaatagaaaaagaagaattggcctggattcttctaaatttcaaccaaaaaagaggatactaccaattacgggaagaagaagctgaaaagtccacttccaaaacacgacaatattttgacagccaaattgtaatagacatcgttaacacagaagaaacttataaaggattaaaaatatttaccctcactctagcaaatggagaaaaaggtaaatggtatgggaaaaacatacccgattggaaaggtcaaaagaaagaaatcattgtaagcatagacctggataaaaatgggaatgacaaatgtgatgagaacggagaacctgtcagacactttaaaattcccacagagaaggaatgggaagaacaatggggacttgtcaaagctaaaaccgaaaaggacctgaacacttctaaaaaaacagtaggcacttatatttacgatacattattacaaacccccgaccaaaaaattcggggtaaactcattcgcaccattgaacgtaagtattacaaagatgaactctatcaaatactaacgacacaagaaaagtttcaccccgaactaagagatgaaaacctgttacagtcttgtattgaagagttgtatcacaacaacgaagcacatcgcaatacaatttctaaatatagtatgtccaaattactcgttgaggatgtcatattctaccaacgtccactgaaaagcaagaaatcactcatcagcaactgcccgtatgaagagcatacttatgtaaataaggaaacaggggaaatccatacagcttctgtaaaatgtattgctaaatctcatcctctttttcaagaattccgtctttggcagtttctgtccaatttacgaatatatcaaaaagaaggaatcctcaatggtaagttcaccactgacatagatgtaaccaatgaatttctgaaaaatgcagacgattatacgaatcttttcgactggctcaatcaaaagaaagaaatcaaacaagaagcatttctcagatatccgccatttggattaaagaaaaatgtggcaaattatcgctggaattatgtggaggataaaacatatccttgtaatgagacacattctagaatattgctctattgggagaaagcaggcatagaccaatcgattctgaccaccgatatagaagaaaaactctggcatatcttatattctatttcagataaaaatgagctccagaaagcactgcaacattttgctgataaaaacaagttagaagataaatttgcagatattttccaacaaataccaccattcaagaaagactatggttcctactctgccaaagccatcaaaaaactgcttcctctcatgcgaatgggaaaatactggcatctagaatcaatagataatgcaaccctcacccgcatccatcaaattctgaacggagaaatggacgaatcaacggcaagcagaataaaagaaaaatacatccatttagataacttctcttcatttcagggacttcctacatggttggcatgctatatcgtatataatcggcactctgaaataaaagacaacacgaaatggaagcaaccttcagacattgatgcttacatacaatcgttcaagcagcattcactgcacaaccctatcgtggagcagattataatggaaactttacgtactgtacgcgatatatggaaacaaatagggcatatcgatgagattcatgtcgaattaggacgtgagatgaagaatcctgccgacaaacgtaaaaaactcacccagcaaatacaagaaaacgaaaacaccaatctgcgcatcaaggcacttctcactgagtttgcaaatccggagtttgaaatcgaaaatgtacgtccccactctcccagccaacaagatttattacacatatatgaagaagaggtcttaaacgaatcagctaaaaatatgccagaagatatagccactatactaaaaaaattcaatgagacagatgcaaaaaaacgtccgtctacttctgatgtattacgctacaaatgctggctggaacagaaatatcgctcaccttatacgggagccatgattccattgggtaaattattcactcctgcctacgaaattgagcatgtcattccaaaatctcgttactttgacgattcattcacaaacaaggttatttgcgaaacagcagtaaacaaattaaaagacaatatgttaggttatgagtttataaagaaccattccggacaaataatagaactaggctttggacaaaaaatacaaatacaaaccgtggaagcctatgagcaatttgtaaaagaacactactcatacaatcctgttaaaatgaagaaactattgatggaagatattccagaacaattcatccagcgtcagttaaacgacagtcgttacatcagcaagtttattaaatcacttttatcgaacattgtccgtgaagaaggagaatctgaggccacttccaagaatattatcgtttgtaatggaagtattaccgaccgtctgaaaaaagactggggggttaatgatgtatggaataaaattattctgcctcgtttcttgcggttaaatgaaattacgaacagtgaccactttaccacaaccaataccaacaataagataatccccaccatgccattagcattacaaaagggattcaacaaaaagcgtattgaccatcgccatcataccatggatgccattgtcatagcctgtgccaatcgcaatatagtcaattatctgaataacgaatcagccagcaaaaatgcaaaaatctcacgtatggatttacgtcagattttatgtaaaaagacagaacctgacgcattagggaattatcaatggataataaacaaaccgtgggaaacatttacccaagatgtttatgcagttctagcaaatatcattatcagtttcaagcaaaatttacgcatcatcaataaaacaaccaaccattatttccgttatcaaaacgggaagaaagtacaatgtgtacaagaaaaaggagacaattgggctatccgtaaacccatgcacagagaaacattctatggagaaattaacttacgtaaagtaaacactgtgtcactgaaagtagcgctagaaaatccacagagaattgtagaaaaagatttaaagaaaaaaataaaagaattattgcaacaaggactcagcgaaaagcaaatcaaaaaatattttgaagaaaacaatgatatttggcaagatgtaaacctgaagaaaatccaattctattctttcacaaaagaaagaaaagaacgcttttttgcaagccgtgaatctatagatacaagtttcaatcaaaagaaaattgaaaagcaagtttccgatacaggtattcaacaaattctattacgtcacttaaggcaaaataataacgatccaaacctagcattttcccctgagggtattgaatggatgaacaaaaatattatatccttaaacaatggcaaatggcatcaacctatatataaggtaagaatatacaaacaagctacaaagtttgcaataggacaaactggcaataaaaccacacaattcgtagaagcagcacaaaatacaaacttattttttgccatgtacgaaacagatcacaaccgcagttttgcctctgttccattaaatgtggtcattgaacggctgaaaaaaggattgccaccgacacctgaagacagtaaagggaatctgcctaaatatgtattgtctcctaatgatttagtctatgttccaacaaaagaagaaatggaaaatggacatattaatcaacctatacaaaaaaatagaatttataagatggtaagttgtactgaaggggaatgtcatttcattccatatttcgttgcaaagcccataattcaaactattgagttaggaagtaataacaaagcacaaaaatcttggcaagatgaaatgataaaagaaacatgcattcctatcaaaacagatagactaggaaacattataacgtcaattagcctatgataaagaaaacaatgtattttggcaaccctgcatacttatctttacgtaatgcccaacttgtcataaaacttccggaagtggagaaatgttcttcacttccagaagcgatgaaacgtcaatctgaaataaccaaacctattgaagatataggggttgttattttggataataaacaaatcaccattacttccggagcaattgaagcattgcttgaaaataattgtgcacttattacttgtgacagtaaaagtatgcctgtagggttaatgcttcctctctatggaaacactacccaaaacgagcgttttcggaaacaactggatgcttctttgcctttaaagaaacaattatggcaacaaaccattcaagcaaaaatcaataatcaagcatcttccttagccttatgtataaacgaagatataaaatgtatgcgtatatggactaacgatgtacgaagtggagaccccgacaacctggaagcacgtgctgcagctttctactggaaaacacttttccatgatatcgaaaactttacaagggaccgagatggcatacctcctaataatcttttaaattatggttatgccattctccgtgcagttatcgcacgttctcttgtaacaagcggattattacccacattaggcattcaccatcataaccgatacaatgcctattgcttagcagacgatataatggaaccttatcgcccgttcatagaccgactggtctatcaactatactctgaaaacaaaatggaacttacaaaagaagtaaaagccagtttattatccatccccacaatagatgtcagaatcagtgggaaaagaagtcctcttatgatagcagcaagccaaacaacggcatcactatataaatgtttttctggagaatcacgaaaaatcatttatcctgaattttaatggaacgtttcagcgaatatagagttatgtggattctagttctttttgacttaccaacagaaacaaagaaagacaaaaaagcttatactgactttcgcaaaaatctacaaaaagatggattcacaatgtttcaattctccatctatgtacgccattgtgcaagcagtgaaaatgcagccgtgcatataaaaagagtaaagtcctttctacctgaatatggtcaagttggaattatatgtatcacagacaaacagtttggagaaattgagctattttatggcaagaaagcaagtggggtaaaaacaccaggacaacaattagaactcttttaaaataataaatcccatggttaatatgggatttattatttcaagaaacaactttttctttttctaaatttacttataacctactgatagacaacaaaaaacaatcaatgagttgtttctaatggttcaaagatactaaaatgaaagcaaatcacaactgggtggctctggtcttgcttatgcacgaagttgtttctaatggttcaaagatactaaaatgaaagcaaatcacaaccaaatgctatctcattgtcggtacatacaagttgtttctaatggttcaaagatactaaaatgaaagcaaatcacaacgtattggcatacgttttatatggataagaagttgtttctaatggttcaaagatactaaaatgaaagcaaatcacaacacacaccttcagcgcgttcgcacatcgcctgttgtttctaatggttcaaagatactaaaatgaaagcaaatcacaaccgcgaaatggagaaagtatataacgataacgttgtttctaatggttcaaagatactaaaatgaaagcaaatcacaaccatccgcagtcttattgcgtattgcagtaagttgtttctaatggttcaaagatactaaaatgaaagcaaatcacaacccggatacgccggttcaattcttcgctttcgttgtttctaatggttcaaagatactaaaatgaaagcaaatcacaacttgctgttctcagcattctccatgattttgttgtttctaatggttcaaagatactaaaatgaaagcaaatcacaacagcaggaatacaactatgtttataataaagttgtttctaatggttcaaagatactaaaatgaaagcaaatcacaacctgatgaaaaggtgttcactattgaatttgttgtttctaatggttcaaagatactaaaatgaaagcaaatcacaactgaaacaacctgaaggtgaatctcctatagttgtttctaatggttcaaagatactaaaatgaaagcaaatcacaacatgaacaaatacgcacgcatcatgctgcacgttgtttctaatggttcaaagatactaaaatgaaagcaaatcacaacatccacttgtatgccttatcgagtagtcttgttgtttctaatggttcaaagatactaaaatgaaagcaaatcacaactagaacgagtgaatgatacagctttcccctgttgtttctaatggttcaaagatactaaaatgaaagcaaatcacaacccgggatatgaacgtatcgaaaacaaaggtgttgtttctaatggttcaaagatactaaaatgaaagcaaatcacaacagtatccatactttaaagttttaatgttaagttgtttctaatggttcaaagatactaaaatgaaagcaaatcacaacttttcaaactgggaacatcttagaaagacagttgtttctaatggttcaaagatactaaaatgaaagcaaatcacaacttgttttactactttaagctttacaagtccgttgtttctaatggttcaaagatactaaaatgaaagcaaatcacaacatgacttgatagaagtctttgagtttttatgttgtttctaatggttcaaagatactaaaatgaaagcaaatcacaaccatcttcgtccgggtcatcatcttctttttgttgtttctaatggttcaaagatactaaaatgaaagcaaatcacaacctgtttcctcaattaaagaaacaccatctggttgtttctaatggttcaaagatactaaaatgaaagcaaatcacaacacaagaagacgggagctcttggagtgatagttgtttcccgttgtttaaagatactaaaagtttttctatatttaaatatcatttgtccctataataacacataaaaagctgcctccacaccagagtgttggagacagcctttcttcattaataaaacctataattaatcaaccaaagggaacataaagccttttccgtcattatcatcaaacttagcttttgaaggaagaggcagatgtttggcattgttgctgaaatcccagagcatggtttcgtcctcggtgatttctcctgtgtcaaggttgcgcttctttccgtttagcggataatacagcaccagattctcgtcacttccgtctaccgttttccacatgaactgcttcaactgctgaggtgtgcgggccgtcttccagaaacggatttcacgaaccaactcgttcgcaccgccaatccagaagcctaccagaccgtaaggccctgtacggatttcacggtcggccaccaattccccattcacatatacatagtttttcttaccgtcgtacacgaaagccaacatataccaggtgtcggcctgtgccgcaaagacatccgccggcacgtcaatctgagaacctccagtcttaaactgaagctggtcgggacggatggtcacgtcgccgaaacgaggatagatttcatcgagtgcaccggacccagacacgagtttggtaccacagatggaacggttgttgctctggtatgagctacggtttaccatgacctccatcgtccactggtccaccttgaaatcgtccgggaacattttcgcatcttcactgccgtatccgtcaatgcgaagacacttcgtattgatgcgctgttccagtacaatcagtgattcagattcactgtcaatcacggggaccgtaccgccactcagtttcaccggcaaagcatagcttccctgcaaggagaatttcacatccttgaactttaccggcagaaattgctgcgtctgcctggaactgaacaccacttccttgcctacttcatacatttcgggcggcagcatcaggtagtccgttccatgcttcttgttgtatgcttccagctgttccttgctgccggcttctaccgtcaccgtcttggcatcgttttcctgctgcaccagcgatacggtgatagacttcacatcgacttcctttccttcttccacgaatacctgcgaagattcgccagtcttgatgtaagccccctgtgccgactggtattcactggttgcatccttgtataattcattctggcaggaacaaattagcaaggctcctgcgaatatgctgaaatataatttctttttcataattcaatttttaatctaacttacccggataaaccacatttcctaagtgcaaggcttctctgagccatttgtaaggaggagtattcgcatagtcgtattccatgtgatacgtgccgatgccgccaatgcgtctgccgtcgggaaggtccagcgtggcataatcaaaaatctgacgcccttccggataagcattgatttccggacgcacgctggtgtaattatctactccacctgtctgccagccttgctcaaactctacggtgataatggtcttccgctcccagttttcaaggtgaggctgattgattttcctaaggacctgcgcggtggaacgttcccaatacgcctgataaatatagtggtcgatgtacttggaagcctcggtagaaagtttctcaggctgaccgtccattaccagcattctgccggccggacgcaaacggtctgaaagggttttgataaatacgaacatgttcgtattgcccgaactttcgctgatagtctccccgttagccatcgaacctgaatgaccatagccgggttcgtagtctatgtcgaaaccatccaaattatacttttcaatcgtatcgcagatggcatttgcataagccttcacaccttccacaaaattgccacctcccttttccacaatccagtaatttttcggatcttgtcccggaggagtcatctggtcgcccaggtcttgtacaatccagcacagcagcgcttttcctcccttgatttcctggaaaaacttcaagtcttttttctgctcttccgaaaggtttcctcgcgtaccccacaaggatacgaaatctacgctgtcgggcagcatcttcaggtagttctgtgcattgctgcctcgtccggtccagttgccgaaccagccgaaccccttcacatgaggcgcctgacggtattctctcagtttggcaaaataatcgcgcatagagggagtcaggtcagcttcactttccgcctccagcaagggaatgtatttctccagattttcctggttttcgaacgtttctctttcaggcacgttccattcggaacaggccacgaagcctgccgccagcagcagggctcctgcatatcttatgattcttttcatcacttcatttgtttgacatttccgtaaaactcatttctcatttcggctgtttgggacggttattgcgcacccaccacagcttggttgctccctggtcttcaccacccagcagcgccggcacttccgacatgttggggtttgtaccatattcggccggagcaaagcggaatctttcgggcgtgatggcatcttcttcacctcctatgctcacgtaagctttgtcataagccggtttgagcaggtaaggatagccagtccggcgatattcggtccaggcttccacggcattgggatagagtgccaggtatttctgggtaatgattttctgcaacttcacttcgtccgaatccgcatcgatccacttgggagacacatttccggtagaaagcttgcaggaatactgacggttgtaaggcaacatagaccggctgatgtcataaggaaagtctgtaacctccagataggcagccactccgcttactccgttttcttcgaacgacttggtaacaccttcttcatacagtgctttcggattacctcctgccagtttgtaaagtgcggcttctgccttcaggaaagacacttccgaagcacgcaaccagaacaaaggagaagccgcatcgaccttgggcttggaggctcccgtcttggctgcggagctaagggcattgttgttcgtaggaggaagagacatgaaatagccgtaagaatcggacgtgaacaaggcacccagacgcggatcgtcatacccctgcatgtaggcccagatggtagctcccaggcgacattctccgtagtcctctacagtcggcagcatggagttcatcagcggcaacttgtccgtactccgtattttggcctcctgtgccacggtttcaatgacacctccgtgagaagggtcaagggcgaacgtgatgtattcctttgccagtgcctcgtccttgaaatgcacgcggacggctatgcgcaacatgagcgagttagccagtcgtacccagttggaagcgtttccgttataaattacatcgtacgacggaagcactttcgatgcggtattgaccagcaactgcgaagcatccttcaaatcggccagcatcgccttgtacacggtctcctgagaatccagtttcggagcaatgtctccgttgccggcattggtatatacaatcggaccgaacacatccgtcgcacggagccaggcagtcaccttgacaatattggctacagcctgcacttccttgtcggcagggtcttccgaattcttcgtatgcttgtagatgtcattccatgcacggaacagtttcgaatagaaattctggtaggcatagctcatacgggcatccgtaaagttccacgtagcctccgtgttgaaattccagttgttgttcatgccccagtaaccgatgtagttaccggccgacatgatgtctgtattggccaggtcgttacccggtcctgtcgattcagtgggcgaaccgatgggaataaccagcttctgcatgtccatgaaaggagccccatacagcagtccgcccgtcttcattccttcttccgtcacaccatagatatttgtattgatctgctcatagttgcaagatgcaagtgccaatacggagaatacaggtatcaaatagtttcttatcttcatattatacgttgtttttcatgatttgttagaatccaaatttaaggctcactccatacgtgcgctggctgggcaacataaagtaatcgtatccctgtccgaaggtaccggtagaagccgccagttccggatcgaaaggagctttgttgtaaatcatccagaggttggtgccatacacggaaaggttcacgctatggaacggggtacccttgaaccaggaattagggaaggtgtatcccagactggcttcctgcaggcggacgttggtagcagagtacacattgtacgcatccaggttcaccactgattcatagtagtcctttggctgaactgccacattgcccaccatgacttttccggcatcacgcgcatcggccgaagcctgtgacacaccgaactggtcgagcacggcctgtgtcttggatatcacgatacctcccagacgggcagtcacaaggaagttcaggttaaagcctttgtaggtaaagccatttctccagcccaggttccacttggcattgacactgcccagcttgtagggctccgtagattccgtggtaatggtctgaccttcgttgtacacgatgtaaccgtcctgatcacgtttcaggcgttcttccgcataaatcgtacctacttcttctccttcgcgcagacggaaacgtcccaccttgatgtcactcaggtcgagtgcctctccggtcacgggattcttcacgttcgaagccagtgcgatgattttattacggttggcagtagccgtcagcgaagtgctgtaagagaaattgccaaaagtctggtcgtatcccagcgtcagttcgataccccggttttctacgttaccggcctgcacgaacatatagtcataacccgacgtttccgacaacttggcttcgagcaactggtcgtaggtattcgatttatacaacgtcacacccagcgacacggtattgttcagccacttggagtcaatacctacttcataagagcgggttctctccggtttcagttccggaagcggataatacttgaaaggtttgattacacctccttcaatggagtgcgtaatggtgccgggagtcagtccggtgtaaggaataggcgaacccacctccgtataggaagcacgtactttcaggaagcccagcaccggtgaaatggactggcgcatggtttcgggcaataggtcggtcacgatggccgaaagtccgacagaaggatagaatatccagggcgacttgctgttgatcagctgagaaggcttgtcggcacgaccggtcagtgtgagatacacggccgatttccacgagatttccgcagaaccgaacacaccgaggttcatcttacggttgtcaccacccgtctgtgaaggcacaccggtagaagggtctacattgtcataagcaaacagattcggcaccagaagcaactgtccgccgtatccccttcccttcgtgtcgtattcctcgaaagaagcacccacgttgacattggcataaaagtctccggcaaaaggtttcgaaaggttggccataatgtctgcatatttctggcggaaggtttcattcgaatagatgtaacgtcccagcgatttggcaaacgtaccgtgcgtagaggcataacgcttgtcttccttctccgtgtaggtattatccagacggcctcgtgcactcacgttcaggtaatcggtaatttcatatttcaacgatgcatacagcatgtagcggtctttcacctcaggacgcaaattgcggtaagccacccagtaagggttctgcacagccataccgaagtcgcccggtgtccacgactgtacattgtagcccagctcggcatcatagcgttcgaaatacttttccttctcaaaattctctccgcgcggatacagataagctcccagaagagggttgaaatacgtaccgtaggacagcatgttgttgtaatactcacgcacgtagctggcagacaagtccatggtcagcttatcgttgaagaacttggtggtatttcgcaccatggcattgtagcggtggtatttgttgttgggcacgatacccttggcattgaccgccgaaccggacacatacgtctgattcttgtcatttcccacagacagattaaaagagttggtaaaagtggttccggtattgaagaagtcggccggattatatgaagaaggtaccggcagtttttctccccacgaggcagcctccccactcacgtttccgtaggtgttctggaagcgcggcagcacgaaaggattcgagaattcagccgatgacgacacgttgacattcacctttccggcagcacctttcttcgtggtaatcaggatgacaccgttggccgcattggctccgtagagtgcagcagccgagggacctgtcagcaccgacagactttcaatatcttcagggttgaaactggcaataccttcactcgacgtgcgtcctgcgccgaagcccgtaccgtcgcctgtgcgatcggcctgattgcccatgggcacaccgtcaatcacatacagcacgttgttgtctcccttgatagacttgtttccacgcatcacgacgcgggtacctccacccacacccgaagcactgcgctgaatgctcacaccggctacttttccgttcaggctgttcacgaagttggcatcctttacctttgtcagcacatcattcttcacctcctgcacattgtagctcaaagccttctgtgagcgcttgatacccaatgccgttaccaccacctcatccagttgttcggtatcttccttcatgaccagaacacccagtgtttccttggcggaaaccgtcaggttctgatatcccacgtaagaaatttcaagcgtggccccttcgcctgctgacatggtg

SEQ ID NO: 1151 - DNA, 24500 bp, synthetic construct
  misc_feature 1..24500: note = Synthetic
  source 1..24500: mol_type = other DNA
cccgccgtcaggagttgcaggaacagtcgcgccagcgatgcgacaagatgcaggaggcactggccatcctgaacaatgagttgcaaaaggcacagcagaaggaaaaggaatatgcccgccgccagatagaagaaatcatggagcgttcggcccgcaaggaggagtggaagaacaagcagcagggattgcaggaagagcagcgcatccttacctcgcactacacggaaatctctaccaagtacaagtcgctcatccagagcctcgacgaacagtggaaccgcatccatgaggccaaaatcaagcagctagagggactgaacaacacgttcaatgcccgcatcgaagaagcccgccgtcagcacgaagcggctaccgaagcgctttaccaggaatacgaacagctctcgcagcaactgcatccggaacgcagcagcaagcagaacgaactgaccgccctcgactaccagatgcagctgtgccgcaaggagactttcttcgaagccgagcaggaggagctgaaacaccgcatccagtcgtacacgggtctgcacatgagcaagaagaaccgcatcaacaacgcccagctcatcatcaaggaactcacgctgaagtgggaagaagagttgcagaagggactgaaggagaaagacgaggcactgatgcagttgcaagccgagcacttgcaactccgcccgcgtatggacgaactggagaccttcctgaaaaacagcaagagcaccctgcaaggctggctcaaagagcacaagaaaggatgggaagaaaacatcggtaagctgtgcgacgagtccatcctctggcagaccaacctctcgccgaagattgtagacgagggtacgtcgttctacggcatctccatctccctgcaggacatcgagcgccacatccgctccatcgacgactatcaggcggaacatgacaagggcatcaagcgactggcggaaattcaggctgaaaccctccgtctgcaacaggagaaagagaccctggaagagcagttgaaagccaaataccagccgcgcatcaaggaacagaaagacgtgatagccgtgcagaaatacgagctggagaaactggaacagcagtaccagaaggatatgctcgacctggacgactggaagaagaaggcggaagccgaacgtactgccaaactccggaaactggaagaggaaaagcaacgcatcgccacagaactgaaggaaattgacggtaaactgaacaacctgaaccgcaaaaaaagcgagaagctgaaccagctgaagcaggaatggaaccgggtgcagcaggacatcgcacacgagaaggagacacaggccggcagcatccgtctggaggataaggaagagcagcagcgcatcgccatggagaaagccgaatacgagcgtcagatgaagcaggaactgcactcgcaaggagctgacaccgaacgtctgcaacagattagcagtcagttgcgcgatatcgaccgggaactgcagttcatcaaggagcacgccaccctgctcatcgagtaccaaaaggacaagcgcgaccttatcgaccacattccggaatggaagcgtgaacaggaggaacagaaacgccagctcagccaggagaaggacaacctgcgccgggaaacctcgggcttgcaggagcagattgatgccctgaacaaggaactgcagcaggctgaaaaggaagtgacacagctccagaccaacctggaggcgtacagcaagatttcggcctacgactggtacaagccgcatcaggatattttcaatcccgagaaccccgtcacgctggaaatccacacgccgcgcacctgtctggaactgattgacgaactgggccgcacggacagccagtacatgacgctgcaaaaccgtctgcgcaaggaggtgaacctcttcaccggtcacttcgacgaggagaataccttcaagttcaagaccaagtttaccgaggactgggagtatatccgctttgccgaagaactgcacgacttcgtggaagagaacaaaatcagcgaattcgtccgccgcatcaacaacgagcactccgacatcttcaagcgcatcagcatggatacctcaatgctcacggcttcggaagacgacattcaggacctcatcggtcaggtgaacaagggattccagacgtgcaacttcgtgggcgttatccagtgcatcgaaatgaaggtggaagaaagcagcaaccgtgtggtaaactgtctgcgtgccatccagaagtactataacgagcatgcctatgacctcacgccgggcaccaacctcttctcgtcggaaaacgagcagctggtgaagcaggaggccatcgccctgctccgcgacttcatcaaggagattcacgcctaccgctacgacagcatccgcctgtacgactcgttcgagctgcgtttccgcatcatcgagaacaacaacgacacgggcttcgtggagaaactgtcgaacgtgggttcggaaggtaccgacattctggtgaaggccatgatcaacatcatgttgctgaacgtgttcaaggaaggggcttcgcgcaagttcaaggacttcaaactgcactgtatgatggacgaaatcggtaagctccacccaaacaatgtgaacggtatcctgaagtttgccaacgaccggaacattatcctcatcaatggttcgcctaccgaactgaaccgcgatgcctacaagcatgtgtacctacttaccaaaggagcgcagagcaagacacgtatcgcccggcttatttcggaccagaaactgtaggcttttcaacctgtagtgtactaaataagttgacacaatttatttagtacactacattccaaataatagaattttattttacaaatcagaattttattcttatctttgccacatgacaatcgagtgaatctaatgagaatatttacagaacaagctataaaagaatatgcagaagcgcatcctgatgcaaaagtagctttgcaagaatggacaaccatagttaaaagaagcgaatggacttgctttgcagacgtaaaaaagacctttaatagcgtagataatgtgggtaaccaacattatgtattcaatatcaaaggcaatagctacagactgattgtagtgataaaattcactataaagttcgtttatattcgttttataggcactcatgccgagtatgataagatagctgattgttcagttttataattaaacagaatcggcaattaccgatcaaccaagagccatgacaaagatagaaacaaaagctcaatacgattgggcagtaaaaagagttgaggaattacttccactggtcacagatgaaacccctctggataatcctcacagtatagagttagaattactttctaatctcgttgcagattattctgaggagcatttcgcactgggagaaccaacgctggttgatgtcctcaaacttcgtatgtatgagatgggacttaatcagaaatctttagcaaaattaatcggagtcagtccttcacgcttgagtgattatatttccggtaaatgtgaaccgaccttgaaagtagcccgcgaaatcagccagaaattgaatattgacgccaatatagtactgggtgtttaatatgagtatagaaaacagaaaaaccgcttaattcaccatggaataagcggttttaagtcggagccgaaagcgggactcgaacccgcgacttactcattacgaatgagttactctaccaactgagttatttcggcaacgtgtttcgttgaaaacggttgcaaaattactcttttcttgaaacctgccaaataaaaaagagatttttttccgaaaaactacatttttccggcccgtacaacccgtttccgttacatcacaagagcatttgacacattattacgtgtaatttgtacaatagtcccttgtctgccttctgccgattttctacttttacccgcaaaatgaaacattacactaccatgaaaaagaaactgataatttcactgctggcactggcttcgctgggagccggagcacaaaacttgcaaaagggagactacggatacttgtactgccacatgagcggacgaggagaatggacggcctacgccctgagccgtgacggcgtacactttcacgacctgattgatggcgaccccgtatacaatgtagaagaaatgtcaaaaatagagggaggagcacgcgatgcctttatctgccgtacgtccgacggaaagggctacctgatggtgactaccgacatgagcaacgccaagagccgctcgtggttcaactacggcatcaacctgctgaaaagtgacgacctgattcactggacttctaccaccttcgacttccgccagggcccggacattttctgtgaccctcagtcgcccgacgtctataaggactacagcaccatcaaacgcgtatgggcaccgcaaattttctgggacccttcgtacgtatgggccgatggcacgaagggcggatacatgatatactattcactgcttaatccggcagaagaccagtacgaccgcgtgttctattcctatgccgacgccacctttacacgtctcactaaaccccgcctgctggtggactggggatatgctaccatcgatgccgacattaactatgtgccggccgacggactctatcacatgctcatcaagaaagaaggaggtacacccggcatctttgccgctacagctacaaaactgaccggtccttataaaataaaagatgaaaacgactatgtgaagtttgaaggcaacaaaaagtgtgagggctgctctgccttccagttggtgggcgactctacctggcgcgtggcctacatcgaatactcctccaagcccaaaagatatcgcatctgccaggccgatgaaaaactcgccaacttccactcccccgtcaccatggagggcgtgaaacatccgcagcacggctcgttcatgcgactcaccgaagaagaatacaagcgcctgcaagagtggtcggacagcatcatgcgcgaaagagccgcccgaaacagcggagaaaagaaataaaaagaggaaaatgaaatatttttgtaaaaacttttggcaaacatcctttcatttgagcagaaaacattatctttgcactccgaattatgacgtgacaaaagagtttgatgtattactgtataacacatagtaaaaagaataagcgcacattcggagttccggcggaatggacaaatgccggaagctatttcttttttcttttatgtcacttatttcctgaatatttaagatttcctattttttcaaacacccggaactgcttttcggcaagtccgggcgttttttcgtatatacgagagtagaatagaaaaaatacaagatataaagattattagtaacaaggtaatgagaaatgtaacattgatcctcgacgacgggagccgctttcatggcaagtcgttcggctatgagaaaccggtagccggtgaagtagttttcaatacggcaatgaccggataccccgaaagcttgaccgacccttcgtatgccggtcagttgatgacactgacttacccgctggtaggtaactatggtgtgcctcccttcacattcgaagcaaacggactacccactttcatggaaagcgagaaaatccatgccgaagcgattatcgtaagcgattacagtgaaaaatactctcactggaatgcagtggaaagtctgggcgactggttgaaacgcgaacagattccgggcatcacgggcatcgacacacgcgaactgacaaaggtattgcgcgagcatggagtgatgatgggaaaaatcgtgttcgacgatgagccggacaacattcccgaagctacctatgcaggtgtgaactacgtagacaaggtttcttgcaaggaagtgattcgctacaacgaaggcgaaggcaagaaaaaagttgtgctggtagactgtggcgtgaaatcaaacattatccgttgcctgctcaagcgcgacgtggaaatcatccgcgtgccctggaactacgacttcaactctctgcagttcgacggtctgttcatctccaacggtccgggcgaccccgacacttgtgatgcagccgtacagaacatccgcaaggccatgcagaacgaaaaacttcctatcttcggtatctgtatgggtaaccagctgctttcaaaggcaggaggtgccaaaatctacaaactgaaatacggtcaccgcagccataaccagccggtacgcatggtaggcacggaaaagtgttttatcacctcacagaaccacggttatgccgtagacaacaatacactgggagccgactgggaaccgctcttcatcaacatgaacgacggttcgaacgaaggtatccgtcacaaaaagaacccctggttctcggctcagttccatccggaagctgccagcggtcctaccgacacggaattcctgttcgatgagtttgtaaagttgctgtaatccactaaaaaacaaagaagacaatgaaagaaaacataaagaaagtattgctgttaggttcaggagccctgaaaatcggtgaagctggtgaattcgactactctggttcgcaggctctgaaagcgctgaaggaagaaggtatcgaaaccatcctgattaacccgaacatcgccaccgtgcagacttcggaaggtgtggcagacaaaatctacttcttgcccgttactccgtatttcgtagaaaaggtcatcgacaaggaacgtcccgacggcgtgctgctgtcattcggtggacagactgccttgaactgcggtgtggctctctacaaagccggtgtgttcgagaaatacaacacccgcgtactgggtactccggtacaggccatcatggatacggaagaccgtgagctcttcgtacagaaactggacgaaatcaacgtgaagaccatcaagagtgaggcggtagaaaacatcgaagatgcccgccgtgcagcgaaggaactgggttatccggtcatcatccgtgcagcttacgcactgggaggtctgggttcaggtttctgcgacaacgaagaagaactgaacgtgctggccgaaaaagcgttctctttctctccgcaggtgctggtagaaaagagtctgaaaggctggaaggaagtggaatacgaagtagtgcgcgaccgtttcgacaactgtatcacggtctgcaacatggaaaacttcgacccgctgggtatccacaccggtgagtctatcgttatcgctccgtcacagacgctgaccaacagcgaataccacaaactgcgcgaactggccatccgtatcatccgtcacatcggtatcgtgggtgaatgtaacgtacagtacgcgttcgaccctgaatcagaagactaccgcgtaatcgaggtaaatgcccgtctgagccgttcttctgcactggcatctaaggctacaggttatcctctggctttcgttgcagctaagttgggattgggttacggactgttcgacctgaagaactcggtaacaaaaacaacttctgccttcttcgagccggcactggactactgcgtatgtaaaattcctcgctgggacttgggtaagttccacggcgtagaccgcgaactgggctccagcatgaagtcggtaggtgaagtcatggccatcggacgtaccttcgaagaagccatccagaaaggtcttcgtatgattggtcagggcatgcacggtttcgtggaaaacaaggagctggttatcgaagacatcgacaaagcactgcgcgaaccgaccgacaagcgtatcttcgtcatctcaaaggctatgcgtgcaggctacacagtagaccaaattcacgacctcaccaagattgacaagtggttcctcgacaagctgatgaacatcatgcagacttctaaggaactccacgagtggggcaacaaccatacacagctttcacagcttccgaacgagctgctctacaaggcaaaacgtcagggattctccgacttccaggtggcacgtgccatcggctacgaaggcgatatggaagacggtatcctggaaatccgtaaccaccgtaagagtgtaggcatcgtgccggtagtaaaacagattgacacgctggcagccgaatatccggcacagaccaactacctatacctgacttacagcggcgtggccaacgatgtacactacctgggcgaccacaagagtatcgttgtactgggttcaggtgcttaccgtatcggttcatccgtagagttcgactggtgcggcgtacaggcactgaacaccatccgtaaggaaggctaccgctcagtaatgatcaactacaaccctgaaaccgtatcgaccgactacgatatgtgcgaccgtctgtacttcgacgaactgactttcgaacgtgtgatggatatccttgacctggaaaacccgcacggagtcatcgtatctactggcggacagattccgaacaacctggcattgcgcctggacgcacagaaggtaaacatcctgggaacttctgccaagagcatcgacaacgctgaagaccgcgacaagttctcggctatgctcgaccgtatcggcgtagaccagcctgaatggagcgcactgacttctatggaagatatcaacgcatttatcgaaaaagtaggctttcctgtattggttcgcccgtcatacgtgctttctggtgcagccatgaacgtatgttctaatcaggaagagctggaacgcttcctgcagctggccgctaacgtgtcgaagaagcatccggtagtagtaagccagttcatcgaacacgctaaggaagtagaaatggatgccgtggcacagaacggtgaaatcgtagcttacgccatctctgagcacatcgagtttgccggtgtacactcaggcgacgctaccatccagttcccgccgcagaaactgtacgtagaaaccgtacgccgcatcaagcgtatctctcgtcagattgcgaaagagttgaacatctctggtccgttcaacatccagttcctggctcgtgaaaacgacatcaaggtaattgaatgtaacctgcgtgccagccgttcattcccgttcgtcagcaaggtgctgaagattaacttcatcgagctggcaaccaaagtcatgttaggcttgccggtagaaaagcctgaaaagaacctcttcgacctcgactatgtaggtatcaaggccagccagttctcgttcaaccgtttgcagaaggccgaccctgtactgggtgtagacatggcttctacaggtgaagttggctgtatcggcgacgacacttcatgtgccgtactgaaagccatgctgtctgtaggctaccgcattccggaaaagaacgtcctgatgtctaccggtacactgaaacagaaagtagatttgcttcaggcagcgcgcgccctcaaggccaaaggttacaacatcttcgctaccggcggttcttctaagttcctggcagaaaacggagtggaaaacacccgcgtatactggccaagcgaagaaggtcagcctcaggcactggaaatgctgcacaagaaagaaatcgacatggtggtaaacattccgcgtgacctcactcctaccgagttggaaaacggatacaagattcgccgtgccgcagtcgacctgaacattcctctggtaaccaatgcccgtctggcaagcgcattcatcaatgccttctgctctatgagcattgacgacatcgctatcaagagctgggacgaatacaaataatccgtaccacttaaagatatagataaaattaatcccctccggaactatttgtaatgaatgagttctggaggggatcttttatttatagaaaacataaaacaataaaaaagcccaccgataaaggacgatgggcaagcgcctaaatgttttcacaacggaataatccttattgtgatttgcttcattttagttttacaaaaataaaaagaaacaacacaaaagacaagtttttttcataaaaaattagtagttttgagaaaattgaaaaatacaactatgaaacatattttaggtttagacttaggtaccaatagtataggatgggcagttatcaatgccataaaagaagaaaacactcaaaaagaacaactcataggaatcaatactgcaggaagtagaataattccaatggatgccgcccaattaggagatttcaataaaggaaacactgtttcacaaaccgccaaccgtacacaatttcgtggggtacgccgattatatgagcgcaagaagctcagaagagaaagattgcatcgcatcctacaattattaggatttcttccaaagcattatgccagccaattagacaggtatggaaagtttatagccaattccgagcccaagctcgcttggacaacaaatacgcatgaaccttcttactttatctttcaaagctcgttccaagagatgctcaatgactttttacaaaacaacaaccaagtaaaaaaggttccatacgactggactttgttttatttgcgcaaaaaagctttgacacaaaaaattgaaaaagaagaattagcctggattttattaaatttcaaccagaaaagaggatactaccagctacgcgaagaggaaacagaaaaagcgtcttctaaaacacggcaatattttgacagccagattgtaacagatattactgacactgggcaaatttataaaggattaaaaatattcacaataacacttgaaaacggagagaaaggaaaatttttcagtaaaaacatgcctgactggaaaggtcagaaaaaagatattattgcaatcatagaccttgataaaaacgggaatgacaaatatgatgaaaatggagagttaagccgtcgtttcaaaattcctaccgaacaagaatgggaagaacagtgggagcttattaaaacaaaaactcaaaaagatcttgacacatctcataaaacagtaggcgcatacatctatgatacactattacaaactcctagccaaaagattcggggaaaattgattcgcaccattgaacgcaagtattataaagacgaattaaatcagatattaaagaaacaagaagaatttcacccagaattgcgagactccaatttattagaagcctgcatcgaagaactgtatcctaataacgaagcccatcgtaatgctattgcaaaatatagcatttcccaattgcttattgaagatattttgttctatcaacgtccacttaaaagcaaaaaatcgctcattagtaattgcccttacgaagaatacacatacaccaataaagaaacaggagaaatatgcacttcttcattaaagtgcatagctaaatcacatcctctttttcaagagttccgtctatggcaatttatatcaaacctgcgaatttatcaaaaggaaggaaccataaacgggaaatttactactgatatagatgtaacaaatcaatttctgaaaaccgaagatgactacgccaatttgttcgactggcttaatcagaaaaaagaaatcagacaagacacatttcttaaaaaaccagcatttggattaaaaaagaatatagcaaattatcgctggaattatgtagaggacaagacatatccttgtaatgagactcactacaagatactgtcatattgggaaaaagcaggaatagagcaatcagccttaacatcagaaatagaagagaaactatggcatattctatactctatttctgacaagaatgaactcagaaaagctttacagcatttcgctgataaaaactatttaagcgataaatttgcagatacttttcagcaaattcctcctttcgagaaagattacggttcctattctgccaaagctatcaaaaaactgcttcctctcatgcgaatgggaaaatactggcatctagaatcaatagataatgcaaccctcacccgcatccatcaaattctgaacggagaaatggacgaatcaacggcaagcagaataaaagaaaaatacatccatttagataacttctcttcatttcagggacttcctacatggttggcatgctatatcgtatataatcggcactctgaaataaaagacaacacgaaatggaagcaaccttcagacattgatgcttacatacaatcgttcaagcagcattcactgcacaaccctatcgtggagcagattataatggaaactttacgtactgtacgcgatatatggaaacaaatagggcatatcgatgagattcatgtcgaattaggacgtgagatgaagaatcctgccgacaaacgtaaaaaactcaccctgcaaatacaagaaaacgaaaacaccaatctgcgcatcaaggcacttctcactgagtttgcaaatccggagtttgaaatcgaaaatgtacgtccccactctcccagccaacaagatttattacacatatatgaagaagaggtcttaaacgaatcagctaaaaatatgccagaagatatagccactatactaaaaaaattcaatgagacagatgcaaaaaaacgtccgtctacttctgatgtattacgctacaaatgctggctggaacagaaatatcgctcaccttatacgggagccatgattccattgggtaaattattcactcctgcctacgaaattgagcatgtcattccaaaatctcgttactttgacgattcattcacaaacaaggttatttgcgaaacagcagtaaacaaattaaaagacaatatgttaggttatgagtttataaagaaccattccggacaaataatagaactaggctttggacaaaaaatacaaatacaaaccgtggaagcctatgagcaatttgtaaaagaacactactcatacaatcctgttaaaatgaagaaactattgatggaagatattccagaacaattcatccagcgtcagttaaacgacagtcgttacatcagcaagtttattaaatcacttttatcgaacattgtccgtgaagaaggagaatctgaggccacttccaagaatattatcgtttgtaatggaagtattaccgaccgtctgaaaaaagactggggggttaatgatgtatggaataaaattattctgcctcgtttcttgcggttaaatgaaattacgaacagtgaccactttaccacaaccaataccaacaataagataatccccaccatgccattagatttacaaaaaggattcaacaaaaaacgtattgaccaccgccatcatgccatggatgccattgtcatagcctgcgccaatcggaatatagtcaattatttaaataatgaatcagccagcaagaatgcaaagatttcacgtcaagacctgcgacaaatattatgcaagaaaacaaaaaccgacaatttgggaaactatcaatggctcattgacaaaccttgggacacatttacccaagatatgtactccattttaagcaacatcattgtaagcttcaaacaaaatctgcgtattatcaataaaacaactaaccattatatccattatgaaaacggcaagaaagtaaactgctcacaaaaacaaagtgatagttgggctatccgtaagccaatgcataaagaaaccgtatatggagaaatcaacctgcgcagaacaaccactgctacattgaaagccgctcttgagaatcctcaaagaattattgaaaaagacttaaagaaaaaaataaaggaacttttaacgcagggactcaatgaaaaacaaatcaaaaaatactttgaagacaataaagatatttggcaagaaataaatctaaagaagataccagtatactatttcaccaaagaaactgccaacagattctttgcttgccgtgaatcaataaatacaactttcaataaaaagaaaatagaagaaaaagttgcagatacaggaatccaacaaattttactgcgtcatttagaacagaatggtaataatccggaacaagccttctcacctgaaggtattgaacaaatgaataaaaatattatgtccctaaataatggaaaatttcatcaaccaatttataaagtcagaacatacgaacaagccgataaattcgctgttggacaaacaggaaataaatctactaagttcgtagaagccgcaaaaggtactaatctgttctttgcaatatatgaaactgcccataaacgcagtttcgcctctattccattaaatgtggtcattgaacgactgaaaaaaggcttgtcaccagcacccgaaaacgaaaagggtaatctgcctaaatttatattatcacctaatgatttagtatatgtaccaacaaaagaagaaatagaaaatggacatattaaccaaccaatacaaaaagatagaatttataaaatggtaagttgtacaggaaatcaatgtttctttatcaaatccaatgtagccaatacaattattgataaatatgaattttctccactgaataaaatggaaagagctatcacaggagaaatgataaaagaaacatgcatccctatccaaacagatagattaggaaacattataacgccaatcagcctatgataaagaaaacattatattttggtaacccagcatacctatcattacgtaatgcccaacttgtcataaaacttccggaagtagagaaatgttcttcacttccggaagcgatgaaacgtcaatctgaaataaccaaacctattgaagatataggtgttgttattttggataataaacaaatcaccattacgtccggagctattgaagcattgcttgaaaataattgtgcacttattacttgtgacagtaaaagtatgcctgtaggattaatgctccctctctatggaaacactacccaaaatgagcgttttcggaaacaactggatgcttctttgcctttaaagaaacaactatggcaacaaaccattcaagcaaaaatcaacaatcaagcatcttccttatccatatgtataaacgaagatataaaatgcatgcgtatatgggctaacgatgtacgaagtggagaccccgacaatctggaagcacgtgctgcagctttctactggaaaacactttttcatgacattgaaaattttacaagagaccgagatggcataccccctaattaaatccggaaaaaccagacgtgccgcttaacaaaaacgatgcgtttcaaaaagtacaaaaacgacacgtacaagaaaaaaggtgagcgcggtcctattcagcatgatcaaagcccaccgtttttctttcacttgaaccctctttaaatggctttaaaatatcatttaaaagccattgcagattcaaaataattcactatctttatgcaatgttaggctgctatacctgacacctcatccggcttcgtgtacagcatcatgtctgtatatttagcttgatagtttacgcttgcactaaactccactttcctgcattccttgaatgggctgccgacaaatgggtttcggtccatccagtcgcacagttctaaaatggaagacttgttcgaagtgaaatacacgaacgaatgccctttcagaacggttagtacatccagatagtcagccagacgccagaacatcttgtaagtacccacctcggtggagaggtacggcggatcaaccaggaacaccacacccggaacatctttgtaacgtttgaatacttccttgtagtcttcgctggttatagtcagtccttccagataatcctttgcttcgggatagtctgtctgccgaatcctattgtaaatggcttctttcttcattccttccaaactggtcacatatttcatggcgaacaacaaggatgcggaaaccgtgatataatccacgtagccgtgctctttttcttccctctcaatacgggcaaacattttatcgcgaatctccccggttatacgtttgtttctgggttccccttcagctatccgacgcaaatcggataacagcacattagtggtcgggatatttacaagtcggcagcggtagttgtcgaagtcattatacacaacggtggcatcagacctgacacatttggtaatatgtgacagcaggcccgagccaccaaacaggtccacaaacacggtgctgtccgggaactgtcccagcaccttgataaattccctcgcaaacatgcgtttctgccccacgaaaggaagcggggcggacaaatacatctttttcatttcattctgctttaaaacggccgcaaaggtccccagaataaacgaaaaacagcgggaaacatgaactgttcccgctgcaagacatatacagcaaactacacgttcaacccgaagcggaccgtctcgtcaccggcgatcagcgcacgggtgcccgggatattattctcgtagatatgtacattgcccaggtagagagtgatcgacttcaagggaagttctatctgccgcgccatcaggtacaggtgataaatatcggaaggcagcccgaggttcgcgtcactgctacgctggtaggcggatagaaccagttcaccgccatctaactggaactgtaccagactcaaacagggtgcctggttgctctcggcaccggtttcgcccaggaaaagcacgtagttcttgctgttgcgcctctcccggttaattttcgctatcaacgggggcagcttctcgaaataggtcgggtaactgttcaccaggatggagccgcaatagtcccaccagttgatgccgacctcccggtacttctccacgttgcgctcaccctgcataaataactgcaactcgctgcggagcttcttacgggcgatattatgcccctcgaatatgtcgagcaggtccgccggtgtcagcgagagctgctcgttcagaaggtactgtatgtttcccttcttgttggtctgtgtctttcccgtggcaagaatcttgtccaggatacggtaatacttgttcatagccatttcctccttctaaatttgaaacaccctaaagataaggggaaacggcactccctacggcataaaacaacccgttcacactgcaagcgtcttgcagtcgctctggaatcgtttcaccaaggcataaaccttgcgttcgctcaccgaatacttttcggacaatacggccacagcatacgagactttttcaccttgatcgagtaggcgggtatagtccgcgtacaggtcgatataccgggcatcttccagacgaatgccggccgcctgaagccttttcaacagctcccggttaaagtttaatatctcaatcactttcatacaacaaaaaaattatatctttgcatcgccaatcattttttagacaacaaaaaaaacgtcaaaccgtgacagagggtatttgcccccggtcgcgcggtttggcgtttcatgtttataaaagtgattggcgttactttttaacaggccgggggcttttttcttatcctcccccgaaggatttattccacccggtacttctccggatcaaaagcgtctttcttcctccagccgtcagacagcgtgtcctgaacatgcttcatggctttcgtgtagaaatcggtcagttcctccagtgtgacgaactcccgatattggggaacctcatccgtaccgaacttgaatgtcacgggaagcgtagcaccaccagtctgtacggccagatcatacgctgccttataattgaactggttttcacttgacagccataccggcataccttcatagagaaaaccggaaagtatctcacggtcaatttgctcattataccagtctgtaatgacggactttatagtatccatgtgaggtctgccgacaaagctttcctccatataggaagcggatccgtcttcacgttcctgcacatcccagcggatgcgccatctgttgcgtgccgggctcacgcactcgatcagtcttatcccggatgttccttctacccgtttcatgtaaatatgtatttagttcgacctttgccgaaggtttccgtcttgatggtggtttcgaacgggaagccgtccggcatttccttcacttgcaagaggatgttcttcatctcctcgctgttggtaaagaactttttcggttcgccgttcatctcaatggccacgatacagcggtcctcgccctgttcggtcttgatgcccgtctcaaagtccttcacaataatcggtaagtttaccagttcccggatgcttaccaccaccccgggaaaacgtttcttgccgtcctccggcttgtaggaaacgttcaagtctttaaatgatctcatgtctttgcctgttaattttttaaacaacgtatgacagtcggcgtgcttggccatcccgtagaacgacgctatcagctcacgcctcctccttctcgattttacctcgtgcatttttcgggcgaacttctgcttgatgcgcttgcgaaggcggacatggtccgcaccgaaagtcacataccccagaaagtcgatgccctcgcccggcgggaacacgcgctcgttccccttcaccaggagaccggcacactccatgcgcccgtggacggcatcacgaatcttccacagttccgctttcgttttacccagtacgacgccgtcatcacaatagcggtagaaatgacgcacagcatacctgtccttcagataatggtccagatacacagacaaaagcaaattgcccagcccctgcgagctgcgcaggccgatactcagaccttcaggcatcaggcggacaaagctctccagcatggtcacgagctttgcgtccttgaacacccggctgacgcaatacatcacaaaatcctgcttcacgctctcgtagaatttggtgatgtcaaacttgtaacagtaacgcgtaccatcagggtcctcggccatgtcacggcggacatacgccaggaggtcgtgcataccccgtctcttgatactggcggaggtggtacggatgaaacgtttccgcagatggcggtccaccaccgccatgatggcatgcacggcgatgcggtccttcatcgggatcacctggatgcggcgcagcttgccgccctcgatgatctcgcgttcacggtagtccttcacgcggaaagtaccggatgcgatctgcgcggccagctcctccaacacctcgggcttatgcgcgagcagatagcccccctggcggctgcgtttacgcttgctgccgcgaaggacctgccggaaggaagcctccatgttggaaggctccacgatctcctcgatgatatacccaaccctgcgcataaattactgtttattgcttttaatacggggccttcaatcccccgggcccggcttcttcgaaccgtttccggcctaccaaaccctacccgacactttatttttcagttttccggcccttgcggaccgctgttactgcggcttgcccccctcggcaccacggtggggacaagtccccggtgttgtacgccgattaaaatttcctttcgattgttgttcagacgagaaccgatgttcgtgttcgtattcgaggaatcgttgttcgcattcgacatcgaaacaccgccattcgggttcgcgttgttgttgccacgatagaccacacggcctatggggaggcgccacctttcaaatgcaaaagtactattttcaaattattatttaacaaacagatacaaaacctgacgtcaaaaaatatttttcgacgggctgacgcccgtaatgaacggcgttcccctgctcggggaacaccggacgttttgtcgcttcgctcccgctttgacgctttacgcggccgatcatgcaacctcgcttatcgctttaaacgccacggcgctcgacgccctgacgagccgaccgcggaaggccagacgcgagccgataaacgcattcgtattcgaagcatcgtaatgcgcactcgcatacgacacaccgccattcgcgctcgcattgttgtacccgcgatagaccacacggccggaggcagtggatatgtagtagatgtcgcagtaatttgtcgaggaggaacccgaaacggaacccaccggaatcacgtccatatatttgccatgcgccacggcggtaatccagataccggagctcacggaacccttaaccaggcgggtactgccgtcaggcatccagatgcgccacttcccggaattgcccgtgtcattagggaggtccacgccgtccatcatgtcatatttatgaccatagatgtcctcgtagccaaggcaacaaatattattcacctgcgtaaccgtggccccgccgtagtcatccttctcacggtaccacgcatactggtggacggagttttctatcaggctgttcgtcacattagggttgattgaggaggcttcctcgtagccgatcgtgtccgtcatcccgcggctggcagtaccacccgtagtacggttgttcgtgtgagagcccgcgccgcattgttcctggctgtcacgacgaccgtacttcgcgtagaaaagattcgcgatgcgcgagtgcataagggcatcaatctgctgcataccgcgctggacactgtaatagtgaaaatcagcccaggtcatgctcgccgtagtactcccgccggtaatgcaggcgcgaagtttggaaccgacaacactgctgcccacaacggcacacaagtgctcgtcattaggcacccattcgggttccatatcctcgatcctgtcactgttagaaaggacaaccttatcgaactctgccgtgttcagaatggagaagtgaagagcagtggcaccctccggaacatcggcaatcaggtacataccggcctcgaacttgttgctcaaggtagggacgacgattgaactgatgaccgtgccggaatcgtctgtgaaaatgcttccgacaaggcttgtaccgggaacgctcgggaaacgcacacgcttgtaaccgtccacgttcaccttgcataccgaatacgtactgtcagtactgtagctgttcgaaagcgtatcctttccgctcatgatcttacgaccggaaagataaccgccactcgtgcccttaatgtcgtcaagcgtaaggacgtcagcatccggaacggaaggcatgttatccgaaccgttactgctgtaacaggagtaatgcttgccgttcaggtaatcattgatacccttgctccagaagaagggctcgtacatcatccagtcaccttcagtgccgtccagtctggcagccgtgccgtcggcgtacttgttgctgtccgtgtcgtccagcgggtagtaggtcatctcaccgtccaggttgttcaccgtggtatcaacgttcgccatgttcacaccccgcgtcgtcgcttttttagtcactttagcaagtacacggtgacgctgcttcaggatggcagaaatatgaccgctcacctcatacgcgttgtcatacttgtagccggtaccgttgtcaaggttgctcacgttcgcgtcatccgatacctcgtcgtcgaactcgatcatcgtgtattccggctgccggatattcagttccgggaagtgcgccttcagagcgctgtacgtatcgtcatcaatgtagcgcgtgagctgtaccgtacccaccaaagcgcacgtgtccgtagtattgccatcggaatccacaccgcccatcccgacaaacttattcagccacgtaccgtcatcctcgcggtcaataccggttactctgatacgttccacacccgtgcaacggcccagcagggtttcccagtcaatacctggacaactgtcaaagatgaaggtcttcaccttgctgtagctttctaatgtcagcccgccggtggtcagtctgcccagatattccagacggaggctggtcagtgtaccgggaaggtggagcagcgtcacgggagaacccttggctagcaccacgctctgcacctgcgtaccgcgggcctcaagttcttccagcttggtctgcgcactcaaatccagctcggtactggtacttcccccggttttcgcctgtgcctggttacgaaggttgagtttacgtagctgcttgcagttgccgatgttcaaccaccagccggtactgccgttgccggaactttgaaggttcagttcgcgcagcacggtacatttgcccaggtcgaaagcgtttttcaggtggtcggcggccccgctcatatccagcaccttcatacggctcgcgccataaaccctcaagggatcgttcaccgtataggcaccggtgatggaaaggctcgcagccgcatctttcttgatgatgccggtattccctatattcgggctgttgttcgtaccgtagccgaaagcataaacctcgttggccgtaatcttcagcacgtcgggggtgtcagcagccgtacgtgccagatagaggtcgatgttgtcactggtgaaattgctcgtgccgtacttggcatccagaagggcgaaacgattacgcacgaaatattcacggtgcgcacggttactgccctgaagggcgtagatgaacggccacaccttgccgtacatctcctgcgtggcgggcaggatgtacttcagctcgccgctcttgttataggcacggtcgcaccagttgcccgcctgctccacgttcagcatgtccaggacacggctggtggtaagtacaccgcgaagagcctgcgcctgtgtcttcaggtcagcgtccaggttggccagaacgaggttccaaagccagctgtcacggccttcaaaggcatatttcccggcctcggcatcataagtgtcgcggtcggtggtgtagtcatacaccaggaaacagtcgttgcgttttcccatctgggtatcaccgtcgtagtaggtgatgtaccatatcaggccgtcccacgtgcgcagcatcatgttcttcgcacgctggtcaacggcaaggaaatagtccgtccagaggtaatacgtcagcaggaaagccttgtcgaaatagtcacttatctcgtccctgaacttctcgctcttaaaagtggagaggtcggcgctcgtcgcaccgtccggaacacacgagcgtatccatgcgtacaaccgtttcacggccgtacgctgcgactcgtcaaggcccgcccatttcacatcatccggaacgttggtctcggcaccggcatcaaacacctcctccagatgagcgtcacttgtggtcttgaaaaggcacatggcctcggtattgttcagcatttccagagtgaggggacaggcaggatcgtaaccctccacgccactaaggccgaacaggtcgccgctcttgcttttctcgttgttgaagttgtactgccccacatagtcgttctcgccgtcctccgcagccgccacaaacatgtcgataggcacaccgtcgatagcggtacgcacggtgaccgcgttcaaatcgctgccgcccgtctcgtactggtaacgctgcggaggggtgagaagccccatctccttcagcacgtcgttgaacagtttggcaccgcctgtgttcagcgacatggacgagtcggaataatcactcttcagacagatcaggttcatggcgatgccaccgggacggacaggatatttcttttccgcctgctccttgccgccaacggtgaagctaaggttcgtgccgcccttgctgatatagatacggatgttcttgctcggatatttcgtggaactggtaccctgaatacggatataacagtcacgaagcatgaagtcgtattcggatccgaaaggggagtaatagaagatatcagccgaaaagtccgtcttcttgttgttctcggcatacacgtcatcgagcttgttctggcgcacgatacgcagcacccccttgcccttggcacgcagcttgtccatatccacagtgtcggtatcacccaggatatcgttctcttcgtacagcgcgatcatctcctcaccgtccgcactgtccaccatccggttctccagttcctcgtcgtcactcaaccggcgggtatagatacgcacgctctttacctccacgtccgccccggcgctgtcaatggtgatatatttcggattgtcctggcggaagctgaaggcgttgtcgtagatgtcggcaccggtacggttgccgtccacataaagctccatcagacggctctcattgcgggtacccaccatgagggccaccttgatccaccggtcttccacataattcgtgcccagcttgatctcacgctccaccagctcgtcgtcctcgttggtataggacactttctcaccggtcttgaaactcgcttccgaaggggtgatataaagccccttgccactgtcgagacagtccacaactgcggtatcgctgtcagtgggattgcttacccggagggtcagttcaatggtcagccccgtacttttcacatcggtggcaaagggccggtagccgatgacggctttcgcaccgttggtcagcttcagcgcctcacccgtccagccgttgctgctccagtcaaaaccctcgaacgtggtctccacgccgttcgactcccatgttccggggttactctccccgttgctgcgacccgccgcgtcaagcttgaccgctaggccgtaggtggcctcgctgatatcgataccgctctcacccacgtcgatgcgcaaagtgtacccggtcggaccggctttcaggacaagcgtctgcgtg

SEQ ID NO: 1152 - DNA, 24500 bp, synthetic construct
  source 1..24500: mol_type = other DNA
  misc_feature 1..24500: note = Synthetic
tggtatgtagcgctcaacctgttgctttggatagccaaacgatagcatcattgccttaacccacacataatcaatacgaaaaacacaccgatgacatcccatagagttgccaaatatatttcggaaagtctccttgtcgggcttctgacacttcctatctatgccgaaccgattcgcagcggatactacgatgcggcacaaggactgagcgactcgctgcttaagtctgccctccacgacactatctgccaaggcgtgcgtgtgtcgtacggcacacagggctacacctaccccgaaggtatctactatcccgctacatggaactatttaccgctcaccgaccgccgcgctgacggcacggtgtgggatatgtactccaatactcgccgttatttcccctccgatgaaggctccgcctgcggcctgcagatagagcattgtttccctaaatcgtggtggggctggacctcgtcaagcagcggcaagaccgactctatcggctaccgcgcataccgcgacctctatcacctgtcccccgccgatgcccaagccaacaatagcaagagcaactgcccacccggacatgtgagcaaaggcgatagattggataacggctctttccgaatggactcgaagagtgcatcgcaatatggttggatgtgctttgaacccgcacccgagtatcgaggcgactttgcacgcgcatacttctatatagccaccgcctacgagaacctcacctggctttctacctatagcgactatctgaccaacgattcctaccttgagtttcaaccttggctcatcgatgtcctcctcgattggcatcgctccgaccccgtgagtatcaaggagatagagcgagccgatgccgtaagcagtattcagcacaaccgcaatccgttcatcgattaccctgagttggtagagtatatctggggcaataagaaagggcaagccgtcgattttgagcgactgatctgcaccgcctcccccgactatgtccccacacccgacctaaccaacttccgcgcatacgaagccaccgacatcactcgcatgggcttcaccgccacttggacgaacctacaagccgactgcacaatcgacctctacacacgctcctacaccggcaacaacgatacactcatcaaccttcccaccatcacagccaagcggatcgactccactgctcatgtcgattacagcggcaagttatcgactacttatgccggcaatggtgccgtggtgatgggttcgagcaacaccgatgccactatccgcttacacggattgcaactgccccatggtgctaatttagtattccgtgcagggatgtacgcctttgctactgcaggcgaactgcagatttttctcaacgaagaaactgcaccttttcagaccattgtcttgcctacctcgcgcgatgagaactactacaccattgctatccccgcaggcactcaaaccattcgaatagcctctgtgggaggtagcaccaagaaacgcgctgccatgcaagagttgtacctcatacaaggcgacctacaagcgcatacacaaagcattgagggctatccgcagactatcgatgctacgccgatggcatcccgctattgcagtcaatacttatctctccctaccgcacttgcttccgatacgctctactaccgcatcagcgatgataacggccgtcgtaccaatgaaatagcggtcgtgctgcctgctgcaccgagtgccgaactgcgtcctgttgctccatactctgccccgcaaaaagtactgcgaaacggacggatatacatcttctacaatggtaaatactataccctgttaggaaatatcgaccacgaacaataagcgcaggagccgccatcggataagggcgaatggatatttctacacattccgccgtttattccacatttgcccatataaatagcagtaactttgcacccgtaaaactatgtaccatttttcaatctcaatacgatgaaaaaactactctacagtgcatttctttttgctgctatcctgattccgcaggtcggctttgcgcagacttccggcgggcagtccaccgaaggcaaagacttttgggtaaccttcttgcaagcagaccaagatcctaacaacgaacttaccctctcattgtctatctcctcacgcaccgattgtgaggtgaccatctctaacccctataccggctattctgagcaagtgcaagtacaagccaacggactgaagattgtagagttatacagtggcaatgtacttactactaccgctcgtcagaatatgagcacatcgggcaaagtttgctactcggtcaattcagaaaaggtagatacttgtgcattacatgttacctccacggcagacatctcactctttgccaccaactacaaacgcgccaccttcgatgccaccaatgtgcttcctactgcctcgttgttagatagttatgttatccagacatacacaccttctgaccacggaggcgcagccaagacacaaggttcgcattttgcgatcatcgctgccgaagacaacactgttgtggactattgtcccaccgagaataccgaggctatcaacaatgctatcgctcgaaaaaacggaggctacactctgactccggaagaagagcaactgattcaataccaatatggtcgcgataccctccattctcccgtactcaaaaaaggacaagttttctatgtttggacgggtaaacaagatggcgaccatggcgacctaagcggcacttatgtcaaagcacgcgacaataagaaaatcgctgttttccaaggttgtccgcacaccaatatcccttaccaagtcaagcaacgcgaccatatcttctcgcaagcaatgcctactcagtattggggtaatacctttgttattaccgcctccgctcagcgtaaacgcgacaaaatccgcgtgttggctctcaacgatggtaccgaggtgcgccttgacggacaagttgttcatactttcgatttctcaaccgacaaaaagcactatttcgagtttgagataggagagcaatatggttctctcccgtccccgctcgctttgggaaagagttgcgtactcgaaacttcctgcccgtgtgctgtacacctttttatggtatcgcagcaatacgatggcgataagaacaacaatggcgaccccgcaatgctatgggtcaaccctatcgagcagcagatcgaccaagtaaccttcgctacttatgccagcaagaacggaacaaccaaccactttgtgaatatcgttaccgaccaaccggaagcaatgttattggatggtatctctatccaatctgatttcgctcccgtaaccaatacaatcaatggtaagcaatactactttgctcaaaagagcctgggtacggttgctgctacccacacgctcaaaagcgatggtagcaatttcatcgcccatgtctatggtttcacaagcaacgagtcgtatggttactccgccggcggtgctaccaaaccgctgacacaagccatcactatcaatggtcagaccttcactcccgacagtcacaatctgctttgtggtgaagataccatccatttcggttgcaacctcaactacgagtttgagaaagtcgtttggggctttggcgacggacagactgctacctcacaaggtcccgacaccatagccaaagtggatcactactacgaccaatcgggtgtctatgctgcctacgcgctcatctatcgctcttcgtctaacctgtgcgcagggcaaagtgctatggatagtattcctattaccgttaatatcggtcgtttcgtattctccatcagccatgtagatatcccctgcaaagtagagggacaaccctttgtcggcaagattcacttcgacaaccaatcgggagtcgatttgcaaggcgacaataccactatcgaatacgatcccgctgccatcgctgctgggtttaagaatagcgaactcacagtcaatgaggccgaaaactatttccaaatcgtcatccccgacgaggcagaaacgggtaagtactatggtatccatctcaatatcacatccgattgcggtggcactgataccattctccattttatgctcaactacgacaacgatgtcctcacgcagcgttacgataatgttctcgggttgcgtatagaaccgttcgcaggaaagcaactttctgatttccaatggtatcgcacaagcgatagcacggcgataacgaatcaaaccgcagctgtgctcaaccggcgttatgtgcaaaccgatgccaacgatgcctactatctctgttttactatcgacaaaggcaccaattctgaggttcaaacctgtacatgtgccaaggcctttactaccgaccccggtgcttacgacgagtttaaagaaggtgtctctatcagtgccacgatggctgctgtaggcgatcgcatattcgtcaatgcgcaaggcgcatctaccgcacaatggatcagaacggacggcagcatattctcagaagaacaactgcccgatggtgggtgcaccatctccgttccctccgagagcggtttttatatcctgcgtgtcatcaccgacaaacaagagcgcaacttcaaattctttgtaaaataactctccttaagcatactctcaatatgaaaaatatagtgcgtaacatactgattatcacgctaatcctgtcgcttggctgtagcacgctcactgcggttgcaatgcctgctcccgcagccaaagagaccacggcacaagataaacaaaaagccgccaaacaaaaggctgctgagaaaaagaaaaaagagcaggagaaagccaaagcgcaaaaacaaaaagagcaggctaagaagaaagccgaggccgacaagcgcaaagccgctgcacagaaggccaacgagaaaaagaaagccgaagcagcacgcgaagcggagaaacaagcagacgagcgtgccaaagtggcggctgcaagagaaaaagagaatgcacgccgtcaggaggctgctgccaaagccgctgccgacaagcaagcacaagaagaggcacagaaattggcttggcaacgacaacaagccgagttggcagatcctactcctaagacagaggtgatcagccttatcaatataagcgcacgcgcgggatacgccgccttgttggacaatatcccctcgctgccggcaggcgataatgctatcaactggtcgaatgtcaatcgtcccgggcagttgggtagcgactatgcctaccaatcgcttacaggcggtgcaggagcgggcatctccgccacctacgcccttgagtatggagtcttccgctttgagacaggtctcgatttcagatggctcaactcacgctccgactatgctttctcgctcatgcgcgataacaactactatcctgcacctggtgttgcacctattggtcagacttatacctacaccaccgacgacctgcgtgaggtacgcaatgtcggtcatatcggtttgccgattatgttcggtgcgcagttcgaccgctatttctttatgctcggtgcaaaagtaggttatggtatctttggcacctactcgcaacgcggccgatacgacatcaccgtccaagacgccgagatactcgagccgtacggtatgggtatcgtcgatgtccccgcagcagccgcagacaaccatcgcctctcgttccgccaacccgacctgagtctgtgtgccgagttcggtatcgacctcgatgagtggctccaagcgcaacccgacaagaaaaaaacacgcgtcaaagcgggcgaacgccttccctttggccgcgagcatatccactaccgcgtcagtgcttttgccgagtatggtgtactcaacaccaacgcccccacggatgccaatcccctcgtattcaacgccaacgattatcgtccgcaggctaccaatacgatgttggctatcgccgacacaaaggtcaacaacctctttgtcggtctcaaattcaccgttcagtttgagattccgggcaagacggcacgccccgtgccaccccctgcctcctatacatctgtccgtatcatcgacgagaccacaggagagattatcccgggggctacgctcgagatactcaacaccaagaatggtcgcccggcactcaaggagaaaatcatcccgcagggcactgctcgccagcgcaccaatgtcggaaactaccttgctacggcgaagatggagcattactaccccgagagtatctcgtatagcattgctgaacccggtacaaccactacgctcgaggtgcgtatgcgccgtatgccgctcttccgcgtcagcgtagccaatgctgagacgggtgaaccgatacccgcacaagtggagatccgtccgcgcaatgtcagccaaccggcatacacccttactaccgactctctgcaaggtgtaagttgtgcctatctcgctgattcccttgcttatacgctccatattgagcaagtcggctacgaactgttcgaggcgcctattgtccacatcggtgatagtatgcatgtcgtcctcacacctatcaagaaaggcgaggtcttcgtaatgcgcaacctccattttgctaccaacaagacccgtatcttatcctcttccgaggaggctctggaagcgctctattcctacctgcagcgtaaccccgaaatccgcatccggattatgggacacaccgacaatgtaggtaaagacgctgccaaccaacgcctctccgaaggccgtgccgaggcggtacgcaacgaccttatcaagcgcggtatcgaccccgcacgcatcgaggcagagggctatggcgagacccgtcctatcgacaccaacgacaccgaagaaggacgccaaaacaaccgccgtgtcgaagtggaagttctgtaaaatatgcaaacaacggagcgtgcattttaatatttgagcggttcttatttctcgaacttttgtcgagacctaatcgagacctaaagccaacctcaccattaagataaatgcccgtagataaataaaaatttagacaactaaacctactaaatacattcgcctatgaaacgaagttgtatggtcatagccttagtggcactattgagcagcctcactgccccgctctttgcacaagcctccaccgagggcaaagagttctgggtcgcgttggctatatccaatgcccctaacggcaaaatttcaaactttgaaccgttcattgcaatttctgcgaaaaaggcttgccaagttaccgtttccaaccccgcaacaggatggacagaccaaccccgcaacctgaccgctgactcgtggactgtcatcaacaacatccccaccgcacaatggtacgaccttagttggacagccaactctgcttcggagaatgtggataacaaaggtatctacatcaaatctaccgaagatatctccgtctttgcggcgatgcgaatggaatactcctacgatgccaccaatgtcctcccgcaaggtgtcttgcagagtgaatacatccttcaagattaccccgcctacaactccgagggcgaggcacacgccacttttgtcattgcggctaccgaaaacaacaccactgttgaaattaccccttctacccctactattaaaggcaaagcagccaatactacttttacgatttcgctcaatcgcggacagacctaccaagtggtcagcactgacaaacagactttttcgggcacacgcgtcaaagccaagaatggcaaaaagattgccgtattctccggtgccgattttacacaaatcccgggcggaaaatctgcacgcgactgcctctacgagcaggcaatgcctatcgactattggggtaccgaatttgttgtaacccgctctatggaaaaagatgccaaccgtattcgcattacagcacaagaagatggaacgagtatcaatatcgatggtcattttatcaaaaacatcaactctggagagacctacgaatttgagatgtccgaaaatctcggttctacagagatggcaaagtatattacaggtgcggggagagaaattcccgacatattcgtcggtgatgcccactatattcaaacctcttgcccatgcgcagtgtatggatacgatgtaagtagtgcatacctattcaaagccaatgaagcaaacaaaaaaggcgacccctctatggtatggatatcgcctctccagcagcgaatcagcaagattacattcggtgcgtgtggcacggcaggaagcagcggacataccaacaaacactatgtcaatattgtgtgcctcacaagcgatgttgcgtctttccaactctcctccgaccaacgcgcaaacatccctgccacttttacccccgttccgggcaatcccacatattcgtatgctcgagtattcttggttgataccgatggcagcaatccggacaaggtatatacgatgagtaataagactggcttcgtggctcatgtatatggtagcggaaacaacgaatcgtatgcttactcagtcggctcctccgctgtcaaacgaggtgtggcagtcgatggcgagaattacaccgagggctacatcagcgagaccgtctattgtatcggcacgcccatttctttcgatgcacaagtcggcaccgatgttatcgacaaagtcgattgggattttggcgacggtgtctccgagcagggtagcacaccgcaaaccactcatacttacgactccccggggtggtacgacatcgtggcaaacatctatgcgcacaaagagtgcccctattcgcaataccctgccgaagaggtgcgtttctctttccgtgtccgccgaccagacaccatctccgtagtcgttcgtggggactgtttagcatgggatgatacccaaagccctatacaagaaatcgactctgtgcagcccgacaactgcgctaccgacaacttcgagattcgcactatcgtccacggcagagatacacgcgatgtcttagatactactatcaccgcgcgtgatcagttctttgtccccgaggagaataagtggtattacgccacctctttcccgcaaggcaagggcatcgttgagggcgaaaccacctacaccaacagcgatggttgtacccacactcatgcctacaagtacaatctcactatcatcacttgccttgagatggatgtccccaacaacccgaaccggtcatacatctgccccgatgacgccgaggcaatgtacaacattccgttccactatgtcaaagggcagatagccgaggcctatctcctgttaggcgacaagcaactgccgctcctgcccctcatcgatgcgcaagatactgtgctgcaagtgcctaccgagagccttatcccgggcagttacgatgccaaggtggtggtgcgcgacgaggtatgcgaccaactgctcactttcgactatagtctcttggtgtactacccgagcaatatcttcaaactcaagtttggcaatgtcttggctgttttcacccccgcattcaacggcggatacaccttcacgggctatcagtggtacaaagacggacagcctatcgagggtgcaacttcatcggtttatcacaccgaaaaacctttcccagcaggctcatcctactatgtcgttcttagtcgccccgatggcgtcatcctcccctcgtgcgagcaggtcatccccgccaccgactacaacacacccgatgtgcaacaagcccccgcagccgaaaaaatcatgcgtggcaacagcctctacatccgtctcggcaacaccctctacgacatctacggcaaccacatcgaataaaaacggcaatacacatagagtgccacatcgttactaaaacgatgtcatattattcaaaatcctgacatctcgcattcataagatgtcgggatttttatgttagtataacaaaaaacggcaacaaatacttgcataagcaaaaaagaaattgtaactttgccgcatattagtacaacaacttatattcacttaacctcattgttatggcttcaaaaaacatattgggtttagatttaggaaccaatagtatcggttgggcagtagttaatgaaaatgcaggtgcaaaatccattgttgcggcaggcagtcggattgtccctatggatgctgcactgatgggcgattttgagagtggaaacagtatctctcaaacgcacgatcgtactatggcacgaggtgtaagacgcctttacgaacgcagagcattacgccgcgaaagactaaatcgtgtactctctattttaggatttctgccgcctcattatgctgcacaactgaaccgatatggacaactcaacaagggtgcagaacctcttttggcatggagtacacaaaacgagaaaaatactttcctctttcagtcctcatttgaggagatggtgcaggattttgcctcctcgcaacccgcattgattgccaatggaaagaaaataccttacgattggactatctattatctacgcaaaaaagcacttgctcgtcctatcaccccacaagaattggcatggatactgctgcagtttaatcaaaaacgcggttataaccaagcgcgtggtgaggaagaagaaactaaacctaatgaaaagaaggaacttctaacactcagggtggttgatgtgcaagacaccggcgaagtcttcaaaggacgcacttggtacaatgtcatccttgagaatggttggatatacaaacgccaaagtgcttatccgctcgattgggtggggaagaagaaagactttatcgttaccaccaaactcaatgacgatggctcggaagccaccgacaaagagagcaatgtgaagcgcagtttcagcgcacccaaagaggatgattggggactaagaaaaatcaagacggagcacgatattgcacaaagcggcaaaaccgtgggtgagttcatctacgatgcgcttctgcagaatccaaatcagaaaattttagggcagttggttcgtgttgtggatagaaaattctacaaagacgaactgtatcgtatattagaggtgcagaaacagttcatcccggcattgcaagacaaagcactatatcagtcgtgtatcgaggcactatatccgcaaaacgaagcgtatcgcaacagcatcgccggcaaagattttacctatttgtttgtgcaggacatcatattctaccagcgaccgctcaagagcaagaaatcgcttattaatgagtgcccgtacgaataccatacctatcaagatgaaaatggtgaactgcaccgtcgatacctcaaatgtatttctaagtcgcaccctctgtacgaagagttccgcttgtggcaatttgtggagaacctgcacatctaccgagaggatgccaatggtattggcaaaaccgaatgtaccacagagtatatcgcggataaagcaaaattgatagagtggttacttcaacaaaaagaactaaccgaggcatctcttttgaagcaattagtcaatgagaatactgccggattgtcgtggaattatgtcagcgacaagaagtatcccgctgcacctgtaacggcattgataaagtctgtgtttgtagaagccggtggagaattaaaggatggagaaatgtgcagaaaggaattggagcatatttggcatattctctattctgtttccgataagacacaactcacccaagcactgactcattatgcacatgcgcaccaactgtccgaagtgtttgtgaataagttgagcaagcaaaaaccatttgaagacgactatggagcctatagcgagaaagccatcaaacgcttgctcaatcttatgcgttgtggtaagtattggaaagaatgctctatcgatgaagatactcataccaaagaccgcatagagcgtatcctgacaggagaggtcaatgagaacattagcgatcaagtacgcgaaaaattgaaagatatgaacggtatcgctgattttcaaggacttccattgtggttagccgagtatgtagtttacgatattcgcaagaatgacaccaaatgggaatcgcccgatgacatcgataagtacttgcaatctttccgccttcattcgctgaacaatcctattgttgaaaaagtcgtaatggaaacgctccgcactgttcgtgatatatggcgacaagaagggcatatcgatgagatacacatcgagatggggcgcgaactcaagcaaaatgcggagcaacgcaagaaaaccctcaaccgacagatagacaacgagaaagccaatcagcgtgccaaatggctgctgcaagagtttatgaaccccgatatgaatatcgaaggggtgcgtgcttactcaccaaaccaattggagttgttccgtatctatgaggatggtgcactatctcatcacccggcagatgacgaaattcaacgccttatcaacgacctatccggtatcaaacagccatccgcatccgatgtcaagcgataccgcctgtggattgaccaaaattatatctccccatatacggggcagccgattcccctgtcgaaactgtttacacatgcctatcaaatagagcatatcattccgcaatctcgatacttcgacgattcaatgagcaacaaagttatctgtgaggcggaagtaaacgctcggaaagataggatgttggcgcacgagtttattaccaaatgcggtggcgagcaaatcacgctttcgggtggtaaggtggtatctgttttatctctaaaggcttacgaagaactggtcgctacaacctacaagaacaatcgcaccaaacaagagaaactgatgttagacgacatcccggagaaattcatcgcacgccaaatgaacgatagccgttatatcagccgactaattcttggcctattgagcaatatcgttcgggagaagaacgccaaaggtgagtacgaacccgagatgacaagcaagaatgtggtcgtctgcaatggtgctaccactacccgacttaagaaagattggggcatcaacgatgtatggaatcgcatcgtacttccacgctttgagcgactgaatacactacaaaataccactatctttaccacccaaacggcaagcggacacactattcccaatatgccgttggagttgcgcaagggattcgagatgaagcgcatcgaccatcgccaccacgctatggatgccatcgtcattgcctttactacacgcaaccatgtcaatctgctgagcaacgaagcggcattagataaaaacgaacgcgcacgctacgacctgcaaaagttgctgcgcaagcaagagatttggacggattccaaagggcagcatatcaagttcacagactttattgtaccttacccgggattccagaaggatgttcaaaccacattggagaacattatcgttagttttaagcagaacttgcgtgtcatcaacaaaagcaacaatcgcacaatgcgttttgtggatggcaagaaaaggctcgagcatcagaccaaaggcgacaactgggcaatccgcaagtcgatgcacaaagacacggtatttggtgaaatcaatctccgtcgcaagaaagtcgccaatctgtcgtacgcattgcagcatattgatgatgttgtagaaaaagatttacggctcaaactgcgggagttggtcgcagaggggaaggacgagaagcaaatcaagaaatactttgctgccgaaccggacacatgggcagatattgacctcaaacacatcgaagtctattattttacccgtgacaccaaagagcgttacttcgccgtccgaaccgccattgatgatagtttcactgccgactttattcgcaacaaggttacagatgaaggcatacagaagattttgttagcgcacttggagcggtgtggtggcaatccgcaagtggcattctcgcccgacggattggagcagatgaacgcagatattcaaatgcttaacaacggtgtaccacacaaaccgatatacaaagtacgcaaatacgaaaaagcggacaagtttgccattggtgaagaaggtgcaaaagccaagaagtttgtcgaggcagacaaaggtacaaacttgttctttgctgtctattcgaccattgatgaggcaggcaaagaggtgcgttcgtttgccactattccgctcaaagtagttatcgattgccagaagcaaggcaagaaagattggaaaacattgttagaccaatgggtacacgaaaacaatgtcgtgcccgcaagtgcaacactcaaattcattctttctccgggcgacttggtgtatttaccgaaagagggcgagacgagtatcgactacaatgcgattgatagaacccgtatttataaaatggtgtcaggttcgggattccaatgtttctttattccatacaactgggcctcaacaatagtagataaaatagaattaggtgcactcaataaagcagaacgcgcacttacaggcgagatgattaaaaacttctgcttccctatttctattgaccgtttaggtaacatcattattcctcaacagccatgattaaacgcgtattatgttttaccaatcccgcttatctcagtttgcacttgcagcaaattgtgtacgagccacctgcaacaaagtctgaaacggattcagacaatgctgaaaaacaaacacgcataatccctattgaagatgtaggcgtagtgatattagataatcggcaaatcactatcacacaagcacttatggctgccttgttggagaacaactgtgccgtcattaccactgatagccgtcatttgccaatcgggttgctgttgccccttgcaggaaacagtttgcagagcgaacgcttccgcaagcaattagatgcttccgaaccactgaaaaagcagatgtggcaacagactatagtggcaaaaatcttaggacaagccgctattctgcaagaagtagggattgaaaatgccaatatgcgtacttgggcaaagagtgtccgatccggtgatcccgagaatttagaaggtcgagcagccgcatactattggagaaatgtctttcaaaaccaagattttatacgcggacaagaaggagatccacccaacaacttgctcaattatggctatgctatcgtgcgagcaatgatggcgcgcgctttagttgctgcgggattgttgcctacgctcggcatacaccaccacaaccgctacgatacctattgcttagcagacgacattatggaaccctatcgcccgtatgttgataggttagtcctttctatgcttaaacaccacaatgacatctcagaactgactaccgatataaaacgcgacctgctgagtatctctactgccgatgttatcatcgatggataccgaagtccgatgattgtggcgatacaaacaacggccaatagtgtgcaacggtgtttgtgcggtgagtcaagaaaaatcatctatccggattggtaattacgaggtatgccattaggcatacctcgctttgtttttatggatcgttttagtgaatatagaattatgtgggtgttggtgtttttcgatttgccaacggataccaagaaagagcgaaaagtggcagcccgctttcgcaaacttctgttggaggatggttttacaatgtttcaattctcaatttatctgcggcattgcccgagcgcagaaaatgcagatgtgcatattcggcgtgtaaaaaacatactgccggagtacggcaaagttggaattatgcgtatcacggataagcaatttgaagatatgatgctcttcgattgtcagaaagcaaccatcgcaggacaaccggtgcaacaactcgaactattttagaaaccaataggataggaaaaagaaagagagaaaaagggaaaatgaatctatgaattaggatacttgcctatctgccatatttctattgtacaaccttgtttgctatctttgatcaacctttttcaggacaccacatatttttatcaaattgtctctgagtggttttaatcaagactttgtcgaaacctaatagagatctaaaacttcgtgtgcaaaatagtattttgatagttttagaaaagtatctcttacaagatgtctgatccattttctaaccaaacagaatggtacagaactacatatagaaataatttgtagaaatgaactataaaaataggatgaagaaaagtgagtatcgataaagaaaaaagtaggtcgaacgacctacttttttctttcctatacatttgtgtaagttgctgtgtttcatcgatttacatatactaagttgtataggatcttatcgatgacaaaatttgaaggatatacacaacagagtgttctcgctcacttcggtgtaaaatgttgtataggatcttatcgatgacaaaatttgaaggatatacacaacttagacgagttaaaagcgataagcaatttggttgtataggatcttatcgatgacaaaatttgaaggatatacacaacgatgttcgtgattgcgttttgaaatctgaggttgtataggatcttatcgatgacaaaatttgaaggatatacacaacttgatgaaatataaaaaagtcatttatacgttgtataggatcttatcgatgacaaaatttgaaggatatacacaactataactcgttcaatttgcgctcgtacacagttgtataggatcttatcgatgacaaaatttgaaggatatacacaactcgacagaattcagaaccacgatgtaaacgttgtataggatcttatcgatgacaaaatttgaaggatatacacaacgaaaaatatcgggttctccgtgtcgcattggttgtataggatcttatcgatgacaaaatttgaaggatatacacaacctcgttccaatgtgaacgcaaaatctctaagttgtataggatcttatcgatgacaaaatttgaaggatatacacaacttgctctggtctctcgttctacactcttcagttgtataggatcttatcgatgacaaaatttgaaggatatacacaacttcctctaatgtatagtgtttgtttgtctgttgtataggatcttatcgatgacaaaatttgaaggatatacacaacccgctaatgaatgttgtttccatatcgttgttgtataggatcttatcgatgacaaaatttgaaggatatacacaacggttgccctcttagggatttaagatattttgttgtataggatcttatcgatgacaaaatttgaaggatatacacaactttacttggttttttcattttcttgctgtgttgtataggatcttatcgatgacaaaatttgaaggatatacacaactatcttgtacatcttttattttcttttgaagttgtataggatcttatcgatgataaaatcaggaaagaagcacataatatatccttagcataaagtatccaatttcaataattcaaagaccaaattgcagtgcgccccccaaaaaaggactctgatgaaacttttatcaatcgcacatctatgcgcaaaattacgacaaaaatctgatttgcgcaactttccacattattttcatagaaaatatcactaacatttgcataatctagatatttttcctacctttgcagcagatatttgaaggatatacacaataaggattattccgttgtgtaaacatctgagacggggcgtgcttttaagtgcgtctctgcttttttatcatataacagttcttaaagagacaattgacactaatagtgtttatctgcattttgttttttatgtattggcaaaactacagtacaaataaacattgctatcggacattacaaataagggtggaattatcctttgccgttcctacttcgggctgttctctgcaatcctattctcccttaccaacacatcttgcacaagtcctcaattaatggagtatacacccaaaaatgcaacaacatcgaatatatcttcccaaaacgcattagtaccactatatccttctcatagacaggttgcagacataacaaaaaaacgactcgcatttctgcaagtcgttctttgtgtgggcgtttacggattcgaaccgcagaccctctgcttgtaaggcagatgctctaaaccagctgagctaaacgcccttttcatagtgaagaacctcgttaggtagttcctttccgaaagcgagtgcaaaggtactgcttttttttgaaccgtgcaaattttagagtgattttttttgaaaaaaatgccatttgtaccaatttctatattgccaacggtgaaatacgatataaagcaaccccgtaataagcagtccgacgcacattccgcctaagacatcggctgcaaaatgttgcgacaaataaatgcgtgaatagccgcctaatgctgccaaagcaaaacaaactatctgccaaatagcggtcagtgcatagtatttgggcttgttgttcgattgattggcaaaccgcagacggagcaaatcagtgccgatgatgcagagagcaaaaaatagggcaaagaaagtggtggtatgccccgacggaaaagaatagaagcggctcatctccacgccgtccaccaatggcaggggcgtatcagggtagttctccgcaaaataagtcagtggtcgcggtgcatcgactatgcgttttatgatttgtgttgctagtccggaaagcagggtgccggcgagggtgaagactgctgcacctgtcttgtaaaacagcaaagcaacgcagacgagatagggtacccattcgccgatttgggtatagtacctaaatagtgtatcgcgtgcgtgcgtgtgaggcgaacatagcaaaaggtgcagttctgcttttggaacgcacaccaatgccacgctcagagccacgataagcagcgtgcatagcgtgagaaatagtccgtttcgtcgtaggaaatccatatctgcgtgggtcagactgttttggcaggttgcttgcgagcaacaacgatagtaacggcgatcacaatcagcgcgataccgatgcaagaacggacggtcaagtgttcgccaaagagtgtcagtcctaccatcacggcagtgataggctccatcgcacccaagatagccgtttgggtggaaccgattccttgtatggcgagcgtggtcagcacaagcgaaagggctgttgggaagagtgccgcaccaatgctatacccccagtgcaacccctgtggcaccgctatctgccaacggcagagcaacaagacgcctagcatcagcgacccgaacagtagtacataaaaagtaatcttcgccgagggcaaatgggtgatatgccctttgttgataaagaccagatagatagcgtatgtgagtgccgaaccaagcgagagcagcacgcccgctatgctgacatgcgtgttgccgtttagttcacaaagcactcctatgcccacgctggccaatgctaagcatccccatactagcggtgctactcgctcgtgaaaaacaaacgccatcagcactgcggttacgatgggatagacaaagagaatcgtgcttgccaaaccggcgtccatatagttgtacgagaggtaaagaagcagcgatgatagtgccatcaccgcacccaaaagggctatctgaatcgcctctgctttgctcaagcggaagtcaatatgccgacatagcatcagtacagccaacatcggcacactgagcgcataccgccaaaacagtaccgaaacggaatccattccgtcttggtagagcggcaacgcaaacataggattgaggccgtagaaccctgcggcaagaataccaaagaggtaaccaactgactttgaatgcaacatagcaatcgactaaaaacgcacaaaagtactgctaatttttggattgtgcaatacaaaattgcacaagtcggaaaaaagcagtaattttgctttccaatttgcattctgatggacactatttgcgcaatttctactccttacggctgtggcggaatagccgttgttcgtgtgagcggcgataaggctattgctctgactgacagcctgttccgtggaaaaacatctctcctgagcgcctcggcgggtaccttccgattcgggcatatcgagcgtggtggggagattctggatgaggtggtcgtgagtatctaccgtgcgccgcattctttcacgggcgaagatgtggtggagattagttgccatggcagtctgtatatccagcaagagttgctccgatggctgatagaggcaggctgtagaatggccaaagcaggcgagttcacgcagcgggctttcctcaatggcaagttagatttggctgaggctgaggcggtcgccgatctgattgcctcgcagtcgaaagcagagaaagacttggcactcagtcagttacgcggtagcgtctcttccgagttgcagcaactccgagaccgattgctccatttcacttcgcttgtcgagttagaactcgacttcgccgaccatgaggaattggagttcgccgaccggggggaattgactgccttagcggcggagattgcgcataagttggagcaactcacacgctctttccaaacgggcaacgccatccgaaatggcgttcccgtggcaattgtgggagcaactaatgccggcaaatccaccctcctcaacgcccttgtgggcgagcaacgagccatcgtgagcgacatacgcggtacaacgcgcgacaccatagaagatacgctgattatcaacggcatactcttccgattgattgatacggcaggcattcgcgacacggcagatgagttggaaaccatggggatcgagcgaagccgacaggctgccgacaaggcgcagattatcgtgcaggtcatcgattccaccgacccgcagaccgaccttgagggcatcaaccttgagggtaagaccttgctgcaagtgtggaacaaagccgacctggcaacaccatcggttggcgcatcagacgccaccggctctccgataatggtactgtctgccaagagcggtgaagtggatgtgttgagagatacgctggcgcgtgtagcgagcgaacagatgaatacaggtgctgtaactatcagtaatgcaaggcattacgaggtgttgatgcgggctttgactgctatcagacgagtgcaacaagggctgcaagacggtatctcaggcgagtttctaagtatggacttacaagattgcctcaacgcactcggtgagataaccggacaaatcacctcacaagaggtactcaataatatattcagccatttctgtatcggcaaatagtgtgaacatacaataggaaaagccccgatgttgatgtcagaatcagcatcggggcttttcttttatggaagagagtatagttcttgccgtatctccgtcgagtctataccgagtctttaataggtgattgataggttattaataggtgattaaacgggttagaccaagacacacacaatcagagcgttctgccaaagaaagtggtaagtttatctaccgccgtattgacatattcgggtacatagtaggtctggattatgtcgtgcgcccgagatgaggaacagttccttgtcctgcgtgctggtggcgtggctgaaacactgctccgtgaggtagaaagtgtcagcattgctgcctgctatcatcagcaacggttggttgatgagcgacatcccttcgttggcatcaaaggcgcagaggtcgataaggctgctcttggtgtagcggaaagtggagttaggatgggcatgcgtctgcaggtaatagacatacccgtcgcggtagaggtcgtagggcaacttggcagcctgctcgggcgtaacgcacgacctatcacccacatactcaggctgttcgccttgtgcctccttggtgcgggcagcgcaggcatcagccaatcgctcttgaatctgattgatttgcgagtccataaaaccattgcggcgcaccaacccggtattgaacatactgagcgtggcaacggctcggaaacgcttgtcggtctgtgctgcacggagggtgtaaccgccgcttccgcagatacctaagacgcctatgcggttagcgtccacgcccgggaactgagtcaagatgtcggctgtgcgccggatgtcctctacacggttagcagggcgatcggtgttgcgcggttcgccttcgctggcaccttggtacgctgcgtcaaaagcgagacagatatagcctttctccgccatacgctgggcgtaaagccttcccttttgtaccatgcaaacactaatttagtttttggagattaacagccccgtatagtagatgtttttgtaaaattcttgaatatattattgaatgtttttgtgtaaggaatgtttggaagtatcaatatgcattacatgtctaattacatggtaattatatgtttaatcgtcaattaaccgttaacggagaataatgggcgtctatatggtctttaatggagaaatcagagcaattaacggagaatcacggcatacacggaaccgcgatgtacaattttggtgcgttagccctggctctcaattcgtaatctgcattgtgcaaaaccttttttttcgtaaaaagcctgtcaagaatcgtattttttttgtaactttgcggcacaattgcaattaacaaaacacatatacaactatgactatgcaaaaaagtcctctgcagattgctcgccaatcctacaagcccaaaatgcctgtagccttgcaaggtgcagttcgcctcgtcgaaggtgagaaaacacaatcggttgccgatcaggcagaaatcaaggaattgttcccgaatacttatggtctgccggttattacaatggagcctgctcagggcgtggataaggtcgcagaaccattcaatgtaggtgtcatcctctcgggtggtcaagcccccggcggacacaatgtcatcagcggtttatacgatggcctcaaactgctcaatcctgagaataaactgtatggcttcttgggtggcccgagcggcctcatcgagggcaaatataccttgctgacaggcgatgttatcgatgattatcgcaacactggtggtttcgacatcatcggttccggccgtaccaaactcgaagagacttggcagttcgataatggtatcgagatctgcaagaaactcggtatcaaggcaatcgtgattatcggtggtgatgactccaacaccaatgcctgcgtcttggctgagtactacctccaaaagaaatgcggtatccaagtcattggttgcccgaagactatcgatggcgacctcaaaaacgagatgattgagacctctttcggtttcgacaccgcctgcaaggtatatagcgagttgattggtaacattcagcgtgatgccaactcggctaagaaatactggcacttcatccgccttatgggccgttccgcaagccatattgccctcgaatgcgcactccagagccaaccgaatatctgccttatctccgaggaggtcgaggctaagaacctcaccctcaacgacatcgttgagcagattgtcgaggtcatcgtcgatcgtgccaactcggggcttaacttcggtaccgtgctgattcccgaaggcctcatcgagttcatccccgctatgcgtgtcctcattcaagagttgaacgacctcttggcacagaacgaagagttcgcttctctcgagggcgatgatgctaaacgcgagtatgttaagtcaatgcttactcctgcttcttgcgagttgtatcgctcgctgccgaagggcatcgcacgccaactcacactcgaccgcgaccctcacggaaatgtgatggtcagccaaatcgagaccgagaaactgcttatcgagatggttagcaaacgcttggcacaactcaaagccaacggcacctacaaaggtaagttcagtgcgctcaaccacttcttcggttacgagggccgctgcgctatcccatccaacttcgatgccgactactgctattctatcggtatgacggctgttcacctcatcgctgcgggcaaaacaggctatatgtccctcgttcgcaacctcaccaaacctgcatcggagtggatcgctggtggtgtacctatcacgatgatgatgaatatggagaagcgcaatggtaagatgaaacccgttatccaaaaagccctcgtggacttgaatggtgcgcccttcctctatctcaaagcacaccgcgctgagtgggcagatgccaacaccagttacatctacccgggaccgatccagtattatggtcctacagaggtttgcgaccaacctacccatactctccgcttagagcgtgagaaataatagcgtcagaagacaacactttgtatttcataataattagagaaaaatcggccgcccgtgagggtagccgatttttgtatagagagcattggtcttgcggggcaaccgtatcaaatccggaatgctttatccggcgcataatgcataatgatgaatgcgtaattaatggtcaattatatggtaattaatgtttctaatgtccccgctgtgcaacatcccctcctttggaggggcttggggaggtcaatggcattttatatg

SEQ ID NO: 1153 - DNA, 24497 bp, synthetic construct
  misc_feature 1..24497: note = Synthetic
  source 1..24497: mol_type = other DNA
tattacttatagtggagagcgtgccgaactaagcacctttttaaaggtgagtttggagaaatggaatgctaaggccaataaactcatgggctcttctcctactgctaaggaggtaaatagaaacctggatatgattaaaaaaaatgtatatcgggcttatcaggaaatgatggacaagcaacaagatatatcagccctaaaacttcgcaaccggtatttaggaaaagatgattccagaaaagacatccttaatgtatttgatgaacacaactcaagaatggcaaaactggtcggtaaagattatactgccagaacccttcagcgctataaaacaacaaaaagtcatgtatccaatttcaataaagctacttattcttccatagattatttagtaaaagacattgatgtaaaatatatcaaccactttatttattacttaaagactactgtcgacctttcccataactcagctatgaaatatctatcgtatttcaaaaaaataattcgtatttgtcatgcaaacggatggatagaaaaagatcctttttataatttcaaactacgaacacatgaaatagagaaagagttcttaactaagcaagaattgaataaacttattgataaagaattatcaaatcaacggctagaacaagttcgggatgtattcattttttcttgctttaccggcctcgcatatattgatgtcaccaaattgactcatgatgatattattttaggtattgacggcgaacaatggattaaggtgaagcgtaccaaaaccggaactatcagtaatatccctttgctcccagcagccagaaatatcatcgctaaatattacagtaaaaagcaacagggatcacctctgcttcccatgtcaagtaatcaaaaaaccaataattacttgaaagagattgcaaatctttgtgaaatcaacaaaaaccttacctttcacattgctcgacatacctttgccactacagtaactctttccaatggagtacctattgaatctgtcagcaaaatgcttggacataaatctttaaaaactacccagcactatgctaaaatagttgaccgtaagctaagtgatgatgttcagaaattgaaaaaggtttttaatgaaaaagtaaattttaaggacacaaaatcgttttaagctttttataataatttcattcattataaaacgtccattcaatttgggggctctttaataattcatattttggaattttgcttctaatagattctctgtgagaatatccaagaaagaaaatggctctattaaattttcttgattgacagaactttaaaatattctcaatcatggctatttctctcaaatctacttcatgatggaattgattataaagactattcaagtcattttgtacaaatccactattagagattatttgtttttcaagtaatatcttttttttgttcagctcagagcactctttactattcaaaaatgcaaacccatctttatctcttaagaaacaatgctccctaatccagtctttataatcttcatattgtttaaacatatttgcaaagcgacttagcaagtataaagaaacatattcatttatcggtttgtctaccggtatatttacaatttcatagttctgcttatatttaataatagtctgtacttctagcgacctaaaggattgctggttcgaataataatcgcgatatttatcgtcatctggctgctcttcaaaaattacttcaggtttaatcgactccacaatttttaataattcatcggaattgcattttccagactctttatgttcagtagaaatgataattacatttttcatttgttatttatcgaatgtttctaaatggatttacatcactttctgttgcaagttagttcaaaactaacataagctaaatccacttctctttcatttgcattaccattttatatactgacagcattagtaagggaatgaaatgatatattaaaattctttttcactttcggtcttcaattgatcttctcgattccaattgttaataactctaattttcaatgctttgagttgattttattcgttgataattcatatcctttaatatttgatttaattagctcaataaaaactaaattcatttgcaaccaaattgaatcaaaaatctgataatcaattatttgtgaataaatttttttgatttttttaaatttacaccttccatctttttacttttatttcaagaattctaccaaagaaaacaaagcgctttgttcattattaatctttaaaacagatacaatggacaacattaaattacaagagaaactcgacaggattgaaagccttctgttgggctcgaaaaaagtactcaccttggaagaggcctgtgattacacgggtatatcaaggagctatctctacaaactgacctctgcagggatcattccccatagcaagcccaatggaaaaatgatattcttcgatatcgaccgtcttaacgcatggctgttaaggaatggccgcaaatcacaaggtgagatcaaaaaccaggcactggattatgtactgaagaaaccataggctttggttttatggtttaacaactatttcaaagttatatcctatctacaatttctaaattatatttttatgaaaaagataccgtacagacgcatcggcaccacgtattggaaagatatcgagagaccccttatatctggggactccatttccatcatggtccgttggaacaaggaaacgatcattacagaccacgggaagtcctatctttccaagatcccaaaactcgacgggttctgctgtatccctgagcatatagggtacgagcaagtggtcggtaattcctataacacctaccacgagctgcccatggcacccaagaagggaaaatgccccgtttccattgggtttgtgaggcacatcttcggggaacaggccgaactcggcatggattaccttaagataatctatgagaacccctcacagatactgcccatcctatgtttggtcagcaaagagcgcggcaccgggaaaagcacctttatcaaatggctcaaggccatctttggccagaacatgacctatatcaaaggggacagcttttcctcacagttcaatgccgattgggtttcgaaggtgatagttgcggtggacgaggtgttcttcgataaaaaagagatcaccgaacggcttaaatatttgagcaccacagataaggacaaaatagaggccaagggcaaggaccgggaagaggtcgaatttttcgggaaattcattctctgtagcaataacgaggatacgttcattctgatagattccaatgaaatccgcttttgggtaaggaaggtgccccctttcgataccgaggacaccgaatacctgcacaagctcatttctgaaatacccgcctttctgcagttacttcgggaccgttccttcgcctctgaaaagaaaacacggatgtggttcaccccggaacagatcaagaccagggcgctaaagaaactggtctggctgaacaacaatgcggtcgagagggaaatggtgcacctgctctacgaaatgttcgaggctaccggtgtagatgagctcagggtcaccccaagggaaatcgtttcgaacctgggcaaggtgcgccgtaaaaacttcgaaccgaacgacatccggagaatactgaaaaacaaatgggggcttaccccttcagacaattcaaattcctatcaggggtacgagtataccagttatggtgagtttgtccagatcagccgtgtcggaagatattttgctgttgaaagaaaaaagatttatggaatttttgatgaaatgatgaattaaaaatgtaagtaattgattatcaataaaataatccttcatcaaagtttcatcaaacgttcatcaaaattagattccattaaaaatgatgaagatcagcaaaacagtttgatgaatgatgaaaaaatgatgaagtgtgaagtaccagtaaatataggggttaagaaggattcttcatcattttatcaaaatttttcagaaaaccatgcagcccatgaaaaaagagagaaccaacaaactatcgtgtgaaaaagcccgtagtgtttgcaccgtgcaggcactcgcaaaactagggcatttccccacccgacaaacggagaaagaagcttggtttctgagccccttccggtcagaaacacaagcctctttcaaggtatccctgacactgaaccgatggtacgaccatggtgccggtataggcggcaatgtgatcgacctggtctgcctgataaaacaatgtccggtaaaaaaggccttgatgtttttgggcaatgaaactttgtttttttcttttcagcagcggcccagttcaaaaaagggaccaggtatagaggttatggatgtaaggcccatcacgcaccctgccctgatcggttatttaaggtcacggaaaattaaacctgcagtggcaaggttatatgccgaagaagtacatttcaggttgaaaggcaaaaactattttgccatcggacttaaaaatatatccagtggttatgagctcaggaacaaattctttaaaggcagtgtttctcctaaggatataacttttgtaaagaatcaatgcactaacctggttgtgtgcgaaggtatgttcgacctgctcacacttgcaagtcattgccgcaacctttccaaaggagcagatatacttgtcctaaactccgtggcgtttgtaaaaaaggttcccggttatttgaaagactatgaacatgtggaactttatttggatcgggacagtgcgggtaaaaaggctacggaatttttactggcttcccattcaaaagccgtggataggtcggtattgtattcgggttttaaggatataaacgcatggtggacgggaaaaccggatgggtaattgcgcagcaatttcaagatgtgtttttgttgccacaaaaaccatcttgctttgctcccggaggtcgcaaagggtgctgggcacctttggcaccaaaaatagaaacacttcctaattctaacaattgaaccatggcaaaagccagagtcaacataaaatccactttcgtcaaattccggtgtacccggtttgaaaaaagactgttgcaggtcaaggcaaaaagggccaacctcagtttgagttcctattgccgcatggcggccatggatgataagatcattgaacggtttaccgaggagcagatcgaggtctataaggcccttgttcagtaccaccaccattttaagcgcattgggaacatgttcaaaaaaagggaccccaagctgaccgaagaagtgtacctacttgctgacgaaatcaaggaccacttacaaaactttaaaaaatgatagggaaaggaatggccatagcgcacacgagggcttccatgcagtatgggatggaccaggaaaaggatgcagaaattgtctatagggcacacttggccggggaaaccccatcggaagtgaccaaggagttcaagatcgtacaggataccaatgcccgttgccagaagaacaccctgagttttgtactgagccctaccgtggaagatggcaagaaactaaacgcaaaacaattgggggagctcaccggtaggttcgtaaaacagatgaaactgcaggagcaccaagcgatggcttttgtgcaccgggataaaacccacctccatatccatttgtacgtgaaccgcattgggtttgatggaaaggcgtacaatgacagttatatcggaaagcaaagtcaactggccgctgaaaaagtggccaaggaaatgcagttgacaacggcaagggaggtgcaacgggaaaaacaacagtccctgttatatacccgtgcggtcatcaaagagcaccatcaaagggcactgttggaaaagccggggacaatcgacaggtacatcaaactgatggaaaagaacggagtgaaagtgatctccgtaatcaataaatccaatcaactgcaggggttccggtttgcccatgggccgcagtacttaaaagggagtgcggtgcacagggatatgtccgccagtaaaatattgcaggccattgcccagaacagggaaaatgggcccagactatccaaggaaagcacccttaaaataatgagccaagcggtaaccctacatcccaacctggcggcttccctggccaaaaaggtagtgaaacatgtgattaaaaaagcgatcgatacggggatcgggatcggttattaaattggatacgatatggcaaaattggaagaaataacagcgttgctgacagaagagatagaagggtttaatacatcggtgaccaaattggaaaaactttccaagaacctcaaggaagttaaggtaaaagcagacgcctcacgtatcgagtaccttttggaaacccatctaaaaaggctggagcggtttgaagcaacacaggaaaagaataccaaggaactgctcaacagtcttaacaggtcacgtttgttcccgaaatggtcggtagcgattgggtcattcttcgtggtactgctattggtactgggttttaccacacttagctatcgccataaaaatagggaactcaaatacaatgttatacgactggaaaatcactatctagattttttaaaagaacatcctaaaatagaagaacaatatctgaattgggcgaacccgaaagaaaaccaagccaaatagtattagttatggtaagatttgggggctattcctccttttcaaaagaagatttaggatttttttttaaaagcctgtaagattcatccaaaaactctccttcttcaaaaggcaaaagatggtttgcaagttctaaagtccgacggatatccataccatgatccttaatccttggaggtgaaaaggtatccccctgtgccgctagtatactcacattgatcaatgcctcaatggtaatgaacaaatcggtatagccttcaaactccaaaaaagagggtttatattttcctttccgaatattggaaggttgtaatgtgttcaatttatcattggccaatgcttgtaattcgctgatttgtttctttttcatggtgctcaattttcaattatacataagcttttctatttgtccttttacttttgatccttacccctttttatccccaacccctcttccctataataaagattgaggtgatccataagggcttcctccccctttggcattaaacggttggcaatggcaagcaaatggcggacatagtatttttcatttctttcggagatagtatccagactcaattcagggtcaatggtcctcatagctaggtgcaccaatgcacggacagtaagcaatagttctgcatggtcttctacataaaacaggctcacttcaaatttatcctcataaaaagaatgtggccttaaagtgggatgatgatcctttgcatgttgttttaaattgttgatcagttttttttcgtttgggttcatcactttaggttttagattgatcctttttatcattattaacttctgagagcatttctaaaattttatcatagcacaccatttcacttttgggcaacatagtgagtattaattccagaacaatgcagacagtagcatttcggtcttttgtattggcgtctgtatattggctaaaaagagaggatgtaaaataggtaccttccccatccaaggtgaatgcacatactttgatcagggattcaattttcagcatcagttcataataattgcacatgcggatttcggctttttgcaagggttcgccatcccaaaactggtcggtttttcccaacctcccttttgtatttgctacaagctctttaagctcttgcagggttttcaacggtttccttttctttgttttcataaggcataatatattcttcgataatttcttccaaacactctaactcctcaaatggcagcaattgtaaaatatgctccagggcagtttggatgttgacatggggctgagggattaaccttccataactgctatcggcgtgttccagagctataatgtacaccttcataattccggctatatcataaaggatatcagcaaggccgccgactttaaagttcgctttgtagtagaattttttggaacccggttttatctcgtatagttttctttttgcaaggtcccgtatcttatccctgatttcttggtaatccaccaaaggcgctattggagtttttatgcttggttccaattttggttcctgggtttcagaaagtttatctctgcagactttcattttaagtttaaacatcgtctccacatgggcatatgcttcatttgctttttcaagtatcttttgtatttgttcttcattaatgtgatagttgttatgataacgtgtggctatatacgcctcatccaacagtctcaatagattctgttcctcttctatttctgtattgaaaagattgccaagtcccggtacaaaggcttttaaatagttttgcagttcttttatactatggcttttgcgttccttgcccatgacaaactgcccagtgtagcggaaccagagttctatatattgatggagcataaaagccgcctggggaagattccctttttcaataaagaaaatagcaccttccaggaacgcgtttattttattgtgttcttttttaaaaacactttcaatcctgttaaaagtattcacatctatggctctatcgataagctgattttcaacattgggactaatatagatcaagtttgcagggctacacccataaataaagaataggttctcttcagctaattgttgccgggcatattcaaaagggaatatccggtagagaaagtccgttttctcttggaaaattttagcgaccattgaggacaactcttgggtcaatgaagagcaattgcctttgagaatgataatgaataaaaactcggtaaaatcttttgtttcatatataaattctacatctaatattgacgttagtttaccaataacatgtcgatcttgaagattatttaaattttgcataataattcgtcattagatttactgtttatttctatagaaaatctaaacaaacctattaataatctatcaaaaatcaaaataaaaatatagaaattctaaagaaatattaatctttaatacatttatatgtgaaaaatctaaataaaatgacccctttaggcatatatcttataaagaagtctgtaaatagagctatggtatctaagagaacaggaataagtcaagcgaggctatcacaactaagcttaaatgaatcgacaaagctaagagcagatgagttatatttgatagccttagctattgatgttgaccctggcgatttattaaaggaagtttgtaaaaatttgaaattgccgcagtcctaaaataaaagagctgccatgcaaaaatgaaaactttacaaattcgagaaatttaataacccaaatctaaatctttgaaaatgaacaaagaacttaaagaactctatctatacgggtataaagtttttggggacaaaactaagtttcatttatggttagaatccaaatcttcagatttaaacggtcaaacaccagcgtcatttctcataaaaccttacggaattgcaattttaattggagttttgaaaaagaaagaaaaaaataatcaggatatcttttaattactatttgttttagataaaaagatgatttttcctctttttataaattgaaattataaagaattacttttttcatcccagacctgagaattctaaaataagaacaacatgataagctcgatttcttttataaaaatctagcatacttaaggctttaacaaaaaaatgccccgaagatagtcgaggcgctaaatgttttcacaacggaataatccttattgtgaattgctttcagacttcgaatatacaaaactttctataaagcatattacggatttccataattaacataaactattttcttgtatatttagtatcctaaacactactattatgaaaaaagttcttggattggatttaggcaccaacagtattggctgggctttggttaaacaagattttaataaaaaagaaggctcaatagatggtttaggagttcgtataatccctatgagcgcagatattctgggaaaatttgatgcagggctatcccattctcaaactgctgaaagaacgggctacagaggagtaagacgtttgtatcaaagaaaaaatttaagaagggaacgcctacatagagtattaaatatactagattttttaccaccccactatgctagaggcattgattttgaaaagcgtctagggcaatttaaatcgggaaaagaaataaagctaaactataaactcaatagcgctaacaaatatgaatttatttttaaagagtcttataaagaaatgcttgaagagtttaaaaaagagcatcctaatttattttatgaaaagaaaaatggtatagaaacaaaaatcccatatgattgggcactatattacttacgcaaaaaagcactttcacaacctatctcaaaacaagaattagcatgggtaattttaaactttaaccaaaagcgaggttattatcaattgcgaggtgaagaaaccgacgaagataaagacaaacaatttgttcagctaaaagtaaaagaaattattgactcaggtgaaaatataaaaggaaaaacactatttgatgtattttttgaaaacggttggaaatatgacaaacaaattataaaaacggaagaatggattaatagaaccaaagagtttatcgtaactacaaaagcgttaaaaagcggggaaataaaaagaacttataaagctattgattctgagaaagattggattgctattaaagcaaaaaccgagcaagatattgaggaatcaaataaaacagttggaacttatatttatgagaccttattgaaaaatccaactcaaaaaattagaggcaaactcgtaaaaacaattgaaagaaaattttataaagaagaatttagaaagatattatctaaacagatagaactacaacctgatttttttaccagtgaactttataaaagttgtattgaagagttataccctagaaatgaagcgcatcaaaacattataaaaaacaaagggtttgaatatttattcacagaagatattatcttttatcagcgcccgttgagaagtcaaaagtcgaatatttctgattgccagtttgaatatcggagttataaaaaggagaatgaaaaaggtataatacaggttattaagaagcctgtaaaagcaattccaaaaagtcatcctttatttcaagaatttagaatatggcaatggttacaaaacttacgtatttacaatgaagaacagattgaaaacggaaaaatgcaagatgttacttctcattttttaaaaacagaaaaagactgggaagctctgtttaactttttaaatactaagcaaacaattgagcaaaaacacattatagattacttcatcaaacaaaaatcaatagataaaaaggacaaaactaagtatagatggaattatgagacagataaaccatatccacttgctgaaaccaaagttcaatttattaaccgattgaaacgagttgaagatataaattctccagaactatttttaaccgaaaaaaccttagttggtaaaaatcaaacaggaaaattaataagtagggaagaacaattatggcatattatctattcggtctcagatcttaatgagtataaatctgccttaaagaagtttgcaaacaaacatgatgtagacgaagaatcatttctagccaattttatcaagttcccaccttttaaaagcgattatggcagctattctaaaaaagcattaagtaaattattgcctttaatgcgtagagggaaatattggaatgaaaatgacatttcagagaatatcaaacagcgtgttactgatataatggcacgtgttaatgcactgaatttaaaagaagattataaggatagagaactagcattaaccctagcaaatgttagtgatgatgatgttaacaaacagcttataaaaagttttgttccgttaaaaaacaaaaatcctctaagtggtttaaacacttatcaagcgacttatttggtttatggcaagcattctgaagtaagtgatattcaacattggagaactccaaaagacatcgacacctatataaaaaaatttaaacagcattcattacgaaaccctattgttgaacaagtagttactgaaacccttcgtgttgtaatagatatttggaaacattatggagatggcgaacctgacttctttaacgaaattcatgtagagttaggtcgagaaatgaaaaacccagctgataaacgaaaaaaaatagcagatagaaatatcgaaaacgaaaacaccaatcatcgtataagagaagttctaaaagatttaatgaatgattcttcaattaaaggtgagattcgtgattattctcccagtcaccaagatttattaaaaatatacgaagatggtatctatcaaaacccaaaagcagattatacaaaagtaagtgaagatgaagtagcaaaaattagacgtagtaacagtccaactcaaaaagaagtacagcgttatcgtttgtggctagaacaaggctatatttcaccatatacaggaaaacctattccgttgtcaaaattatttactcatgaatatcaaatagagcatattattccacaatctcggtattttgacaattcactaagtaataaaattatctgtgaaagtgcaattaatgaagacaaggacaacaaaactgcttacgaataccttaaagagaaaagaggatcagtaattcatgggcacaaactactttcattagaagaatatgaagcccatgtaaatcaatatttcaaaactaataaagcaaaactaatcaatcttttaagtgaagatatcccagaaggatttataaataggcaattaaatgatagtcggtatatcagcaagttaattaaaggattattgagtaatattgtacgaaaagaaggcgagcaagaagcaacgtctaaaaatttgattcctgttacaggttcaataacgacaaaacttaaaaatgattggggacttaatgataaatggaacgaactcattttacctcgcttcgaaaggttaaaccagttaactcaaacaaatgatttcaccacaactaacacgaatggaaaaataattccaaccgttcccaatgaattaataaaagggtttaataaaaaacgaatagatcatcgtcatcatgccttagatgccctagtggttgcttgttgcacacgcagtcacattcagtatttgagtgccttaaatgctgaaaataaaaactacgccttacgtgataaattattgattaaaaatgatcaaaatcattacaccaaaatctttcaaatgccatgggaaaacctcccaactgaagccaaagtacagcttgaaactattgtggtaagttttaagcaaaatttacgcgtaattaataaagccaataacaagttttggtcatataaagatgaaaagggtaacctaaatatcggtaaagacggtaaaccaaagaagaagctgcgcaaacaaaccgctggcgataattgggcgataagaaagtctttacacaaggaaacaatctcggggttgtataatctcaaaactccaaaaggtaaaatcgcaactgcggttagaagttcgctatctggaataaaaaacgagaagcatttggctaaaataaccgataaacaaataagagatgtcatcctttcaaatcatttaaagaattataaagacgaaaagggaaaaataaactttgaagccgcttttaatgaagaaggaatagaggatttaaataaggccataatctacttaaacaattgtaaaaaacatcaacctattcgtaaggtaaaattttttgaaataggaagtaaatttcaagttggtgaaataggaaataaaaacactaaatatgttgaagctgcaaaagggactaatctcttttttgccatttattgggatgagaaaaagcaaaaacgaaactatgagaccattcccttgaatgaagtcattgcacatcaaaaacaagtagcacatttaccaaaaaaccaacggactgccatacaacctaatccagaaaaaggtgaatttttatttactctatctccaaatgatttggtatatatcccaacagaagaagagctaaataatccaactttaatcgattttaaaaatttaaccttggatcaagccaatcgaatttataaaatggtaagcagcacggggactgagtgtcattttactaaaatgaatattgcttcgttaataaaaaactatgattcaaaaagcaaaataggtgaacttggtagtttaaacaaattagaaattactacagaaattacgaatccaattagaataaaagaggtttgttataaactcaaaattgatcgattaggaaatatttcaaaggtacaaaaatgattaaacgcaccctatttttcggcaatcctgcttatttaagtacccgtaacgagcaattggtagtcaattttcctgatgccgataaaaaggaagcgaccattcctattgaggatttggggtatgtagtgctcgaaaatccgcaaataaccgttaccaatggcttgttgatgaaactagcacaaaacaaaacagcagtgattacctgcgaccaacagcacctcccctgctcttttttacaaccgcttgtaggacatagcgaacaaaccgaacgtttccgccatcaaattaatgccagtgttccccttaaaaaacaattatggcaacaaacggtaaccgctaaaatagaaaaccaagccaaccatttattactggtctcgaaaaatgcccttaaattgaagcgatgggcaaaagaagttaagagcggggacataggaaacttagaagccgtagcagcagcacattattttcaaagcttgtttgctgatatagatggatttagccgaaaccaaaaaggcatccctcccaacaatttactgaattatggctatgctattttaagggctgtagctgcccgcgcattggtaagcagtgggctattgccttcggtagggattttccactccaacaaatacaatgccttttgcttggcagacgatgttatggaaccttaccgaccttttgtggacagcctggtatatgaaattgtggaaaccggttgtaatttagaagtgcttacaaccaatatcaaaacagaattgttggtaattcctgctatggatgtggttatcgacggaaaacagagcccgctaatggtggccatgagccgaactaccaatagtttatacgaatgtttttacgggggcagtagaaaaattctgtatcctgaatttggataatacgaatcgagctgacctagactctgtctgggcgacaaagacaggatcgacctgatagcaataaagcattctatgaacttataaaggtgaaatttaaacctatctgactgaaaatttgaaggaatggatgataacagattttcacgattaaatcaatacagaagcatgtgggtactggtattttttgacttgccaacagaaaccatcaccgaacggaaagtagcctcgcgttttcgcaagaatttgctgaacgatggttttgccatgttccagttcagtatctatatgcgtttttgtgccagtagggaaaatgcggctgtacatataaaacgtaccaaaaatgccctgcccaagaagggaaaagtatgtattatgcaaataaccgacaaacaatttggcatgatggaactttttcacggtcaaaaagaaatagaacccgaacctcctaaccaacaattggaacttttttaaattaaaaaactggttcctagcttattacgctctctattttttagctttgttttttaattctggccaaacacataaaaaacaggataccagccatttacggaaagtatcctgtgaatcctctataaaattacagaactgaaagcaattcacaacactccaggacacaagtagataacacttttcctgtgaatcctctataaaattacagaactgaaagcaattcacaactgtatgcgatggatacttcggaaagaaaacctgtgaatcctctataaaattacagaactgaaagcaattcacaactaatatgctccaacagtaaggccatcgtatcctgtgaatcctctataaaattacagaactgaaagcaattcacaacaacaaaatcaacaaaataacctttcttcgcctgtgaatcctctataaaattacagaactgaaagcaattcacaacactcttttcttgtaactaattcagtattttcctgtgaatcctctataaaattacagaactgaaagcaattcacaacagcacacaaacaagcatacagggtaatttacctgtgaatcctctataaaattacagaactgaaagcaattcacaacagtgatttgcctaaggaggagcagtactggcctgtgaatcctctataaaattacagaactgaaagcaattcacaacctggtagattttcaacttttatactgcctacctgtgaatcctctataaaattacagaactgaaagcaattcacaactggtataatattttataatagtcttcatctcctgtgaatcctctataaaattacagaactgaaagcaattcacaacggaatgttccaaatttgtataggttggctccctgtgaatcctctataaaattacagaactgaaagcaattcacaactcataatgtcttgtgtatgttttaattatgcctgtgaatcctctataaaattacagaactgaaagcaattcacaacttttactatcaactccttttgatagctgatcctgtgaatcctctataaaattacagaactgaaagcaattcacaacaatagtgtccagcttgaaaatctttatgcccctgtgaatcctctataaaattacagaactgaaagcaattcacaacggaatgttccaaatttgtataggttggctccctgtgaatcctctataaaattacagaactgaaagcaattcacaactcataatgtcttgtgtatgttttaattatgcctgtgaatcctctataaaattacagaactgaaagcaattcacaacttttactatcaactccttttgatagctgatcctgtgaatcctctataaaattacagaactgaaagcaattcacaacaatagtgtccagcttgaaaatctttatgcccctgtgaatcctctataaaattacagaactgaaagcaattcacaactggtagactcttgtaaagaatgtaattcccctgtgaatcctctataaaattacagaactgaaagcaattcacaaccaagttcggaagctacatttccgccatgaccctgtgaatcctctataaaattacagaactgaaagcaattcacaacagtacatagcatattaagactatcgtttctcctgtgaatcctctataaaattacagaactgaaagcaattcacaacataatcctcgaaatactttgttgatggtatcctgtgaatcctctataaaattacagaactgaaagcaattcacaacagaatgtgggggatagaaatccagaccggacctgtgaatcctctataaaattacagaactgaaagcaattcacaaccagttattaagcattacttaacaactcgatcctgtgaatcctctataaaattacagaactgaaagcaattcacaacgataaaggtaacacgtactttgtcgtcgttcctgtgaatcctctataaaattacagaactgaaagcaattcacaacccaaacggttacgctcccttaccaaccaaacctgtgaatcctctataaaattacagaactgaaagcaattcacaacataataattgcaggtaacggtgatgttgtacctgtgaatcctctataaaattacagaactgaaagcaattcacaacgtcaagttcttgctttagtattaatttcttcctgtgaatcctctataaaattacagaactgaaagcaattcacaactaaacagaaaaccagatttaccttcgagatcctgtgaatcctctataaaattacagaactgaaagcaattcacaacgaacgagataaaaacgtgaataagcagaaacctgtgaatcctctataaaattacagaactgaaagcaattcacaacaatgaagggcgttcagttccaaaggaaatacctgtgaatcctctataaaattacagaactgaaagcaattcacaacgacttagtattgttttgtttactaagttcacctgtgaatcctctataaaattacagaactgaaagcaattcacaactggttcctgttccatcatcattcatttcagcctgtgaatcctctataaaattacagaactgaaagcaattcacaacagttcaactatacattgtgaagtagaacggcctgtgaatcctctataaaattacagaactgaaagcaattcacaactaaaaacacagcctgcgcaattaggcgtaacctgtgaatcctctataaaattacagaactgaaagcaattcacaacgagcatgagctaagggaatctttcttttatcctgtgaatcctctataaaattacagaactgaaagcaattcacaactaaaaacacagcctgcgcaattaggcgtaacctgtgaatcctctataaaattacagaactgaaagcaattcacaactaaagtaacgttatctgtttttgtagttaacctgtgaatcctctataaaattacagaactgaaagcaattcacaacacatatcttaaatctttcgttatgcttactcctgtgaatcctctataaaattacagaactgaaagcaattcgcaactctccaaatttgcaaataataaatatagctgcaaatcctaactaaaagtaaacctttaaaaacaagtaaatgacagcactcccacccaaattctagggagtgcaaagttaaaaaatagttaaaatagttaattcgggcgcactccaaaaaacatggtttgaaagccacattagaattgaacttttaaatatactcgaactaccacctcgagtacttttagcctctgcaaaatataagttttgcagaggtttttttattagttttgagttaatccccagttaacttactgtcccaccaagtaggatttggactataatcttttgataataactccaaacgctctttctccaatctaggcatcaacttttcctttctatttttatggatttctttggcgagttcttcatcaaattgaggttctttagtcggcatattggcattaacgctttctagataagacataagctctttctccaaatcctgtactcggtctttttcatcagcagctatgttattttgttctgcaggatcttgtattagattataaagttcgttactcccatcttcgtaataatgaattaacttataatctccttttctgattatggagctcggctctcccccttggttcccatagtgtggatagtgccagaacaacggtctttcgttcacgttccctttttcaaaaagcggctttaggctaataccatcctgtgtttggttcggtaatgcttccaatccggcaaaatcaattaatgttgggtagaaatcggcacccgttactggaacatctactgtttttggggcgtcttttacataaggaactttaataaaataaggctcgcgaataccacctccccactgatatccttttcctcctcttaatggaagattggaagtagaaaaggaatcaccagaagctactcctccgttatcggaagtaaacacaacaatagtattctcgtctagtcccaattctttcaacttctgaagaactacaccaacagcatcatccatttgttcaataagaccagcatacacagggttatcctgctcggtacggattggcagcacacgttccattttaaaaccattatcttttattccttggatttcagccttgtcgcgatatttattccatctctcttctgaagtttgtatggggccatgaacggcataaaaagacagcattacaaagaacggcttatctttatttccttctataaatttactggtctctttagccaatctcatggaaaggttttcacccggtgtttcattgggtagcttaggattgttccatggagaaaagtatccccctttaggactccctacttcccatcctcctttatttacatcgaaaccgttattctctggattcgcaggctcatctcccaaatgccattttccagcaaaaaaggtggtgtatccaccggttattagagcttcaggaggcgtcacatccttctctggaagagcgtgaacgtattcggcaggaagcagtttattatttcttttgtgctttctccagttctctccagaggcggcaccaatccaatcggtaattccatgtcttgctgtagattttccaagcataatactcgcccttgacggactacaaaccctactggaagcatacccttgggtaaaaacggttccctcattggctattctatcaatatttggtgtttcgtaataattactccctgctacacttagatcgtgaatccccaaatcgtcggcaagtatgaggacaatgttcggtctttcgggatttttcagaaatgaattggactttttaatattacatcccaagaaaaaagaagtaaataacaaaaggactgatagcttatttatggctattgaaaagaaaatcttcataaaatctaattaaaaatataaaattaattaaaaagatgataatccgattctttattcccaaaagcacttcaagcaactacttttataacatttttctcctcagtagttatctcggcttcttcttatcaactattcaaccgtttaggttcgtctttctttttaattatttgataggccagaaccaaaagttgaattccaacaaaaataattttatattttctctttctaaaaatagctgatgcaattccaaatattgttgactgtttcatattttcaattttaattattttttattttttaaagaaaaagaatccctcaattgattcttacccacattatcacatctacaaattattaaagattttccattgtagattgctttatccacccaaaaattgactgatataatcgcttaaatcaattataaaaacaaataacacaagcacctactatagatttttcctttagtaatatcaaaagcataatttataactatttgactttaaagactatatttacgatatttgtagtgcaaatagacattatggcatttataaagattagaagaaaaacaaaattagaaaaaaggtatagtaaaaaaatgggtagtattaatgtaagagttacttacattaaaaagcatttattgggtttacctatgaagactattcacaaatatagagagacttattatggtaaaattaaggattgtgaagattgtaatttaaccgcttaaaatatttatttgatatattttaataaagaagccgcgttttaaaacgcggcttctttattatattaattgtcatcagacatatcgtcgatttcatcttcaacttcttcggcaccttcctcgatatcgtcccctacgtcttcagcagcctcttctacttgttcagcaggtgtatctttcttttctttacaacttgtcgtgaatgcccctaatgtaaacaccaaggccattgttaagaatatctttttcatcttgtttaaatttaatggttaaagtgttatttatcttttggcaattctacttattaatgtaattaaaaataaaactacaaaaatgaaaaatagaattttagctatccctgcagaagctccggcaattccaccgaatccaaatactgcagctattatagcaattattaaaaaaatgattgtccaacgtaacatatgttttaagattttttggttataaccctaagatacatattaaaaacattgaatcttaacaatttaaacaaatttaactagaattgttaattcgctgttaacccatcacgaaaattagcttcgaatcaagaattccttaagccgaggttacctctgcttccctatgtatcttcttaaccaaaccttggagcactttaccaggaccaacttcggtgaaaagaatagcgccatctttaaccatattttgtacactttgtgtccattttacaggtgccgttaactgtgccattaaattcttcttaatctcatctggacttgtaacagcggtagtggttacattttgataaataggacaaacaggcttattgaatgaagtctgttctatagcggcagccaattcttctcttgccggttccattagcggggaatggaacgcaccccctaccggcaataccaatgctctcttagctcctctttctttaagcgtttcgcaggccttattaatagcttccacttctccagaaataaccaactgccctgggcaattgtaatttgccgccacaacgattccttctgtctcctcacaaacctgctccaccacagcatcttccaaacctaaaactgcggccatggtacttggagtaatctcgcaggccttctgcatagccaaagctcttctggaaaccaattggagaccgtcttcgaaacttaaggtttcgtttgctaccaatgcagaaagctctcccaaagaatgtcctgctaccatatctggattgaaactaccacccaacaccttgcttaaaataaccgaatgtaaaaacaccgctggttgtgtaactttggtttgttttaaatcttcggccgttcctttaaacataatgtcggtaatggaaaagcctaaaatatcgttcgcttcttcaaataactttttggcaaggtccgatttttcgtataaatccaaacccattcctacaaattgtgctccctgtccaggaaaaatatatgcattcataactaaatgtttttctgtttttagcaaaaatagaaattatattgtttttgaaaattaatctcctttaaaccaagatgcgtaggttacataactatttgcaatgcgctccacttcattcttactgagatcttcactgatatcttttactttcttagcgggaacccccgcataaatagcgcctgattccaccctggtattctgggttaccactgccccagcggctataatggcgttgctttctaccacacaattatccataacgatgcttcccataccaataagcacgttatcctgtatggtacaaccatgaacgatggcattatgaccaatagatacattattgccaatagtggtagggtattttttataggtacaatgaattacggccccgtcttgaatatttactttgttgccaatttttatgtaatgcacatcgcctcgcactacagcattaaaccatacactgcaatagtcgcccatttctacatcgccgacaacggtggcgttttcagcaagaaaaatgtctttcccaaaagacggatgttttccgttaactccttttactatcatattcccttcgtttacacaaaggtaacgttagcacattaatttaccgcagggcatttacaattatatcgcttctctccttgaccgaaatcgtaaccaatggttatttgatgaaatccgccttcatcaaagcggatatccccttgttgataagagtaattgtaagagaacataaaatgcttgaggttaacgccaataaacggtgtgaccaattgaagtttttgtgaagtagtacctccacctatttcatattgtgctccgtcgaagcttcttcgataggacaatccgccccatacagtgccaaaatcaagctccctatatactttcgcgtttaaatccaccgaagattcttcggtatattccgcaaattgcaaaagaaaagatggttctacctgccagaggttcttaccaaacacatacccggcagaaaacaaataacgcctaaggttatcaatttcttccgcagaatagagatcccttccacttcctagcagattacgcaccgtgaaatgtgcataaaactctaaaaagttataagacatccctgcatcgatattaaagtaatttacattgttacttgttccagtaataattgggtctggaataatagacacaaattccgattcgtccaatctactttgaagaaagccaacattaagaccaaaagaaagttgatttactccgtccctataatcagataacgttagatgatgtgcataagtaagcttcattccagtttgcgaatgatatccatttcggtcgttgaacaaaatcgctccaactccacttttctcacccaccctaacatttgcactcatagtttgcaaagcaggggctcgttccacatcgaaccattgttttctagctgtgagacgaattttgccgccctggcttacaccggccatggaaggatggattaaataataattatctgataaataatcgaaatatacaggaata

SEQ ID NO: 1154 - DNA, 24497 bp, synthetic construct
  misc_feature 1..24497: note = Synthetic
  source 1..24497: mol_type = other DNA
aaattggctggcctattgggtgagtccgcatctgaatttggcgagtataccgtttttacgggaattgccattttctgtattcttttcggattccttattctcctatttataaaaaaattaaaggccttgacccatggggctgaggataatgaacatgttataacagcagaggaggcttaagggctttaacacgccaaaaagctactagaaccggttttctgtaatgaataaaagatagtagtggtaattggcatttaaatttatgattgatgaataccgatattgaaaatttattcaaagacaaggttcttggacatccggcaggattgttcgttctattttttactgaaatgtgggaacgtttttcgttttatggaatgcgtattttattggtgttgtttcttacggcccccattatcagtgataatcccggttgggaatggcccagggaacatgcgttggcattaataggtacctatgcttccttattatatttaactcctattattggaggttatattgcggataaattcacaggttatcgcatcgccgtagtgatcggttgtaccattatgacacttggccatgcctcaatggctttggaaacgacggcaacattctatttaggcttggctttattggttatcggtacgggattttttaaaccgaacattacatccattatttccgagatgtacaagggaaaggaatctaaaaaagatggggcctataccattttctatatgggggtaaatgccggtgctttcttcggaatgatgctctgtggttacttggccgaaaatgtaggatggtcttggggctttggccttgcagggatattcatgttttttgggatgcttcaatttctaatggcaaagaaccttttcggtggggttggggctaaaccttctaaaaaatatgaagttgaacttcctcaaaatataaatgaggaaagtccggctgtagtcgaagaaacaagtgttgatgaaaaattgaatccgtttacccttctcgactatatcctgataggggtttcggccattggcggattgttgtacctttttaatgatccattgtccaaaatcggtgaagtgaatttacttccttttaaagtcggcaatttagacggttcttcggttgttattttaacggcacttgtcctgttcttgatccttctggtttccagggtatctagatatatacctattgttagggataggataatcgcagtggccatatttggcttgttcaccgtatttttctttgcggcttttgagcaatcgctagggtcaatgaccttgttcgcaagggattataccaaccgtgacctggttggttcttccgctatgatctttaaaattgtcgatgcattattgaccaccgttccccttatgatcataacttgggtgttgattcttttatttaaaaaaacctactcgaaaataggactttcaaatattattttgggattggcctttgtaggtatttggatattggtcttatatagattgaatgacaagtttacacaagaaggcaaccagatagaagcctcttggttcgggatattgaattcttttttcatcataaccttggcgccattgttttctagatggtgggagagtaagtacaatcctagtgccgcaatgaaatatggcttgggactgattttgctcggactcggtttcgccattttatcttatggtaccatgggaattccacaaggggctaaaacagcctcggtaagtatggttttcttgatcttggcctatttgttgcataccatgggcgaattgtgcctatcacctgtgggtctttcctatcttagtaaattggtgcccgctagaatgatcggctttatgttcggtatatggtatttggccattgccattggtcaaaaagctgccgggactatgggaggaatgatcgataagatttcggaagaatattcactcagtattttctttttgattttcactctggtgcctatcggtgtaggttttatatccattgtcttaaatcccgtattgaaaaaactgatgcacggcgttcggtaaccccaaggctttattcaagcttcaatttaaaagcgcctttggtaccggtatagtgaaagggtatgtttttttggaggcatgttgtttcccaacgttgaatataacttcgataattgctgccatcggctatcaatatttttgggtttaaagaatccagcagtcgttccagattaattttaggggattgtgtcaataccatatagtctaaactatcgatggttttaagggaaatacctaggctatcacttattgtcagttttcgtccgtctattgcataagcattcgaaagtggtttaaaggaatgtgtggtaatatgctccccaacggcataatcctcaactaagttttttgatgtgatactatcttgggtaaagaccgtaaggtggggtcctgaccgatgcattattatcgtatttttagtctgatgtgccactaaaagttcctcaatgttcttggtctggtataattggtagatagaccaaaattgtattgcaatgacacaaaatagggcaattgataatcgcctgaaggtaaatgaattcaacacccatatcaatgctatcagaaaggcatatgttaggataacttgaacggggtcaaatgggatattccaaaatataaaggcttcctgttgggctacccaatcaataataccgttcattagacctattatataattgtagaccgtaataagttcctccggggcaaaatcaataacaaccaaggcgataacgataatacccagccccaatatgaatcccaagaagggtatgatcaataagttcgatataaaaaacagacccggaaattgatgaaaataaaacaagctaatgggtaaaaccccgatttgggcggcaatactgacagagagcaattgccatactttgttcaccaaccaatttttggggtaccagaatttttgtaaaagaggaaagatccatacaatggcaaaaacagcggcataactcatttgaaaaccaacatggaacaatagcatagggtctatcaccaaaagaatgaagaacatggacaatgccaaaatattgaatgtattgctgggcctgttcaaataaagggcgtatgccacaaaagagaacatggtcaccgcgcgaaccactgaggcagataaacctgccaataaggcaaagccccaaagcaggatcacaattgttattagttttaaggtttttcctttcggaagcatttccatagggcgcagtaaaaattgcaagaacaaaaggagaatcccaatatgtaggccggaaacggccagaatatgaacggccccggcatttttgtaggccgtataggtcgcatcggtaatatcgttcctttgccccaggaacaatgcttgtataattccaaattcattttctccgaaacctgctttctgtaaagaggttctaatattgttccttaaagtcgctgtagcgccgaaaagggtcttcttcggattttcaagtacgagggtgttctggttgttcaattttaattggtcgtagattccctgtttttccaaatagtccttatagttgaattgatggggatttaaaggatgggttatttccgttttatgggttagaactaccaattcatcgtctacttctaaggatttttgggttgaatctattgcctggctcaagataattttgccagatacttttttggtattcaacgctacaacatcggcaatgaagcggttagaaaatgtggagctttttaaaacttcggtaacctttaatttccattcccctatttcgctggtgtgctgatttgaataatgatcggcataattctttggttgtgcaacccctatgatcattaccccaataaaaagtgtagtaatggccgtaactcctccaaaggtaaaggcatttgtaacctttttggagaaaaacaaataaccaagaactgttaacgataatagggttaaaattatggggcctataattccggtatcaagatagtagcctgtaagaatccccaaaactaaaagcatggttagcttaatagggataaattgaagcaatttcattttaaaggatcctattggcttttacaaacgcataattccaatacccttcacgcagggaggaaacgattacacctctagaagttgaggcgtgtataaatttaatgtcatcattttccacggcgaccactagaccaacatggtttatttttttgccttttcgggttttgaagaacaataggtcacctttttctacttggtttacccgaatacgtttaccttcattggccatggcagaggaaaccctgggtaaatcaacatcattctttttaaaggccacataaagtagtcctgagcaatccattcctttttttgttgttcccccgtatttatagcgcactcccgaataggttagggccgtattgataatgttgttgattttggatgctgctgctgggttttccggggtttccaacaccgggtcaggtgcttcttccattgaattgcggggagaagcggcaaccgatattttacgttccttggaatgggtggttctttttttggtcgcgcagctgcctaaaaaaagtaagggtagtaatataaggggtaagattcttttcatccaaggattatagattgtctttggataccaaatttaaacattttctacaattaagttggcagccttggcactggcccctttacctcccagtttctgttccaatagtttataagcctttaattgatcttcccggccttttcctcttattatttttgagagttcacccttgaggtttttggtggtaaggtcattctggatcaattccttgacgatctcttgatccatgatcaggtttaccaatgaaatatattttaaggtaataatacgttttgctatttggtaagatatccaattggccttatagcaaaccacttggggtactttgaacaaagcggtttccagggtagccgtaccacttgtgaccaaagcggcatgggatatgcttaatagggaataggttttattggccacaaaacccacgtttgcgttttttaaaaacggtgcataaaatgtattgtccaaactaggggcaccggcaatgacaaaatggtaatctggaaaatcctcggttaccgatagcatggtcgttagcattttcgtaacctcttgtttacggctaccaggaagtaaagcgataatgggtttaccgttatctagatcgttttgttttctaaaggtctgttcatcgataacatctcgattgtctattgcatcgataaggggatggccaacgaaatgtaccggaaaaccatgtttctcttcataaaatgccttttcaaatggcagaataacgtacatggcatcgatattcttttttattttatggatcctaccttccctagaggcccatatttgcggtgagatataataattcgtcttgtaattttgttgctttgcccattccgctatccgtaggttaaaaccggagtaatcgataaaaataatcacatcagggtcaaattgggagatatcatttttacagtatttgatattggcgaaaatggtacctaaattcataatgacctctaggaatcccataaaggccaactctttatagtgttttgctaaagttccgcctgctgcctgcataagatccccgccccagcatctaatttcggcttcggtatctttatgtcttaatgccttaatcaaattagatccatgaaggtctcccgaggcttccccagctataatatagtatttcatgatttgttcaagttcaaaaccgatttcaaagtgacatccgttttatattcttattcagtccttaaggtaggattttaaaatactttataatacaaaatgaccaaagcagtaagtagtgtcgcgatcaatactcctttggcacggttgtcccttcgaattttaaggaacccgaaaaaggcggctaaatttaaaatagcccctaatgccagcaaactgccaacatgtccttgttgaatggcggcttcaaaagtctctacgatcccaaaatcggaaaacaggagtatataggccaacgtacctattgtattcgctattatcccaataatgaaaccgatgataatttcttttttagtgttcatgggtaaattctcaaattcagatatgatataaatattaaagtgtcaacaacgttatccatcattaaaaattataaactccagctattgagttcttgaatggcatggtgtgctgtaaggtcgaattgggtggggacaacagagatataaccattggcaagcgcccattcatcggtatcttcccctttgtccaacaattcaaattctccggtaagccaatagtattcctttcctctggggttgattcttttgtcaaatttttctttccaattggcacgtgcctgtcggcatatttttattcccttgggcagatcggcttccattttcggaatattgacattgagcacaacgccttttggcattttattatgaagagcctcactaacgatgcttttgatagcttcacgggcaaattcaaaattggcattccatgaatagtcacataatgagaaaccgatggcgggtacaccttcgattcccgcttctattgccgcactcatggttcctgaatatatgacgttgatcgatgcattggaaccatggtttataccgctaatgcagatgtcgggcttacggtccaatatttcttggagtgctaattttacacaatcggccggtgtgccactacagctatattcgaccaaggcaccatcaggactttctttgtcatcttttgatgcctgaagggtgtcatcaacggtaattgcatggcccattccggattgtgggctgtcaggtgcaacgacgactacctccccgatttctgacataaaacgtatgagggcccttagtcccggtgcggtaattccgtcatcattggtaaccagaattagcggttttttcattttttatactttattaggtaaaaatacgtttaaaaaaacagaagttcccatatggtgtttaacaaaaatttaatggctcaggcttaagtgctggcacggttttttcagtatattagggaattggttgcgccccgaccataataaggttgtgcgtaatccttgtttttttaaagaaaagagaagtataaaatagcaaagaataatttatgaaaaggaatcttgcctacgccctaactgttatgcttgttgccgttgcatcttgcagtttcaccaataaatcttatgatttcgagaatgatgacaaggataaattgttgttggatcttatcacgtacgtattggaaagggggcattatgagccaaaatcgatcgatgacgatttctcggtacatgtgttcgaggatttcattgatgtcctagaccccacaaaaagatattttttacaaagtgatattacagaatttgaacaatataaatttcaaatcgatgatcagatcaacaataccgatatcacatttttcaatgcggtatacgatcgactcattaaacgtatgaacgaggctaaaggaatttataaagaggtgttgaaagagcctttcgattattccattgaggagagtatcagtatcaaatatgaaaatgagccttttgcagcttcaaggaatgagcttaaagagcgttggagaaaacaattgaaatatgctaccattggcacatacgattctaaattgacccgttctaaaaaagatgcggaagctaaaaaggaggaagtatttgatgtgaattcagaagctgccccagaggaggtgaaaaaaccattgacacccgaagaggcggagaaagcggctagggaggctacagagaaaaccctggacgaattttttgattttatcgatgatttggaaagaaaagattggttcgttcagtatatcaataccattgtagatgaatttgacccccataccttttattttgcaccggaggataaggaaaagttcgatgtaagtatgtcgggtaagtttgaaggaatcggtgcacgtttacaaaagaaaccagaaggggccaaggtcgttgagattatttccggaggaccggtttggagagatcaacgtatggaagtgggcgatgagatcattcgtgtaggtcaagatggtaaagatccaatagatattgttggtatgcgtttagacgatgccatcaaattgataaaaggcccagaaggtaccatagttgatcttaccgtaagaaaagtagatgggtctattgaggtcatttctttgacaagggatgtggttgagcttgaagagtcttatgccaaatctgccaacatcattaaaggagaccagaaattcgggttgatcaatcttcctaagttttatgttgatttcaatgattattctgagcgtaatgcagctactgatgtggccaaagaagttgaacgtttaaaacaggaaggcgcggaaggcttaattcttgatttgcgtgacaatggaggtggatcgttaaagaccgtggtagaaatggccgggttgttcataaaagacggaccaatagtacaggtgcgatccaatggtcaaggaaaagatgtatatgatgataaggatgaacgcattcagtgggacggtcctttagtgattttagtgaatgagctttcggcttcagcttcggaaattttggccgctgccatgcaagactataagcgagcgattgtaatcggtagtaaacaaacgttcggtaaaggaacggttcaaaatgtgattccattggaaaatatagttcgtagcaatgaacatggcgacttaggggccataaagttgaccacgcaaaagttttataggatcaatgggggctcaacacagttagaaggtgtaaagagcgatgttgttgttccggacaagtatagttatatcgatttaggcgaaagggatcaatccaatcctttaaagtgggataagatcagcccggcccaatatgatatttgggacggttatatcgactacgaacaaaccgttgccaatagcaagaaacgtatggcggccaatcctcaaattaaattgatcgaggaaaatgccaaatggatcaaacaggaacagaatgaagatcttatttcattgaattacgatacttataaggcggaagaggaaaaagacaaaaaacaatctgattactttaagtcgttgaccgaatatgattcaaagttgactttcaaatccttaaagtatgaagaggaattgtttacccaagatgccgatttaagagagaaaagagatcgctggcataagaaccttgccaaggatatttatgttgaagaggccgtaaacgttttacaagaccttaagatgaacaacttgaagcaagctaaattggccagtgtaaaaggctaataagccatacaaataatacaaatgagaaccctgaccgttagtgtcagggtttttttgtgcacagatgagaaaatggccttccaaaaagtttgggttttcattttatgtatataccgacaaaccttttatttttcttacatttaatactacaaaggttactatttctacaagtaactaaagtcggcgtttctagggcgcataggctttaaggccctatagaggatgaatgtatggggttctaaacctattgaaaaattaaaagtgatagcattgattatggaagattttatcacttggtaaaagtatggtcaagtaaattatcattgtactggagtcattgtcacatttaagaataaaaaagctccgaattggaagtcgaggcggcttaaatgttttactcgcagagtaatgaattggtttgcgttcgtgaagccttaagagtaaaaaagaaagcgacattagattaaaccaatgccgctttaaatgttttcacaacggaataatccttattgtgaattgctttcagtactgtaaatgtaaaaaaaagattattaatggcattacgcttttctgtaaggtaatgagcacggttatttttaaatttaaaaaaactctatataaatgaaacgaatattaggtttggatttgggaaccaacagtattgggtggagcttaatacaacacaatttcgaaaaaaaagaagggcagattaatgacttaggcgttcgtattatacctatgagcgctgacattttagggaaatttgatgcaggccaatcacattctcagacagcagagagaacggcttaccgtggtataagacgtttataccaacgtgataatttacgtagagaacgtttgcatcgcgtattgaatatacttgattttttaccacagcattatgccgaacatatcgattttgaaaaacgattaggccaatttaaggaaggcaaagaaataaaactcaactataaacctaaagcacatggtaaatacgagtttatttttcaatcctcttttaatgagatggttgccgaatttaaaaaagaccaacctgagttgttttatgtaaaacccaacggaaaagaaactaaaataccttatgactggacactctattatttacgtaaaaaagcgctttcacagccattaaccaaacacgagttggcttggattattctaaattttaatcaaaaacgcgggtattatcaattacgtggagaagaactagatgatgaaaaagacaaacaatttgtagagctgaaggttaaggaagttattgactctggcgaagccgtgaaaggaaaaccactatttgatgtgatttttgaaaacggttggaaatacgataaacaaatagttaaaaccgaagattggatagatagaacaaaagaatttatagtaactacaaaaacactcaaaaatggagatataaaaagaacctataaagcagttgattccgaaaaagattgggccgccataaaggcaaaaaccgaacaggatatcgagcgttcagacaaaacagtaggcgaatttatttatgaaactttacttgaaaacccaacccagaaaataagaggtaaacttgtaaaaaccatcgaacggaagttctacaaagaggaattaaaaaaaatattagccaaacaaattgagctacaatccgatcttttttctgccgagttatacaaagcttgtatagaagaattataccctagaaatgaagcccacaaaaatgccataataaaccgggactttctctatttattgatggatgatattattttttatcagcgtccacttaaaagtcaaaaatctaatatttccggttgtcagctagagcagcgtatttattttaaaacaaataaagacacaggcaataaagaggaagttaagcaagctgtaaaagctattccaaaatcccatcctttatttcaagagtttagaaattggcagtggttacaaaacttaaaaatctataataaagtagctacggataaaggtgagctgactgatgaaactaaaaagttattaccaaacgaagaagattgggtgaaattgtttgactttttacagagcaaaaaggaattagaacaaagtcagttcataaaatatttcattgacaaaaaactaatcaataaaactgaaaaagatcattacagatggaattatgttgaagataaaaaatacccttttgcagaaacccgggcacaatttatttcgcgccttaccaaagttgaaggtattgatgacgtcaacacatttttagattcaaaaacaaaactcggcaataaagataacagtccttttgtaactataatcgagcaattgtggcatattatctattcggtttcagatatcaaggaatacaaatctgctttagaaaaatttgcaagtaagcatcatatagacaaattgtcttttgtagataattttatcaaattccccccttttaaaagtgattatggtagctactctaaaaaagcgttaaacaagttattgcctttaatgcgtaggggtaagtattggaacgaaaatgatatttcagagcaagtaaaaaagcgtgtttctgaaattatggaaagggtaaatgcgctaaacttaaaagaggattacaacactaaagaattatctgaagctatagcaaatgttagtgatgatgacgtaaaaaagcaactaataaaaagttttgtgccgtttaaagataaaaatcctttaaccggcttaaatacttatcaagctacgtatttggtttatggtaggcactcagagattggtgatatccaaaattggaaaactccagaagatatagacacttatcttaaaaactttaaacagcactcgcttcgcaatcctattgtagagcaagtagttacagaaacattacgggtggtacgtgacatttggaaacaccacggagaaagccaacctgaatttttcaatgaaattcatgtagagctaggtcgtgaaatgaaaaacccagcggataagcgaaaaagaatttcagatagaaacaccgaaaacgaaaataccaatcatcgtattagagaagttttaaaagatttgatgaacgatgtttctatacagggtgatgtgagggattattcgcctagtcaacaagatttattaaaaatctatgaagaaggcgtttaccaaaatccaaaggtggattattcaagagttagcgaagatgaaatcactaaaattagacgcaataacagcccaacacaaaaggaaattcagcgttatcgcttatggctagagcaaggctacatttctccttacacaggcaaacctataccgttgtcaaaactgtttacgcacgaatatcaaatagaacatattataccgcagtctcgctattttgacaactcaatgagcaataaggtgatttgtgaaagtgccgtaaacgaagataaagacaataaaacagcatttgaatatttaaaagaaaaaagtggcagcgttattaatggtcataagttattagttctttcagaatacgaagcccatgttaaccaatacttcaaaaacaatcgacaaaaacttaaaaacctattgagtgaagatatcccagaaggtttcatcaataggcaaatgaacgacagccgctacataagtaaattggttaaaggtttgttgagcaacattgttcgtgaagaaggagaacaagaagcaacatctaaaaacttgattcccgtaactggttctgtaacctcaaaacttaaaaacgattgggggctaaacgataagtggaacgaactcattttaccacggtttgagcgtttaaaccaattaacacaaaccaatgattttacaacaaccaataccaatggcaacaccataccatgtgtaccggatgaattgctaaaaggctttagcaaaaaacgtatagaccatcgacatcacgcgttagacgctttggtggtagcttgttgtacgagaattcatgggcactatttgagcgctttaaatgccgaaaataaaaattacggcttacgtgataagttattggttaaaaacaaaaaaggtgattataccaaagcattccaaatgccttggcaaggttttacaactgaggctaaagaacaactagaaaaaacagttatcagttttaagcaaaacttgcgggttatcaataaagctaacaataaattttggtcttacaaagatgaaaatggcaacttgaacctagacaaaaacggcaaccccgttaaaaaacttagaaaacaaaccaagggagataattgggcaatacgtaaggcaatgcacaaagaaaccgtttctggtaaataccatattgaaactcctaagggtaaaatagcaactgctgtaagaggggctttggcagatattaaaaacgaaaaacacctagctaaaataacggacccacaaataagagaggtgattttacctcaccatttaaaaaactatattgacgaaaaaggaaaaataaaatttgatgctgcttttagcgacgaaggaatcgaagatttgaacaaaaatattgtcgttttaaacaatggtaaaaatcatcaaccaatacacaaagttaaattttttgaaataggaagtaaattttccatatccgaaaatgaaaattcagcaaagaatatgaaatacgttgaagctgcaaaaggcacaaacctattttttgctgtgtattgggatgataaaaagcagaaaagaagttacgaaacagtaccgttaaatgaggttattgaacatcaaaaacaaatggcacatttacctaaaagggaacgtttaccaatacagcccaacagtaataaaggcacttttctatttacgttatctcccaacgatttagtttatgttccaaccgatgaagagttaaccaacccaagtgcaattgattttaacaattttaatcaagaaaaagcaaatcgagtgtataaaatggtaagttgtacaggaagtgaatgtcatttcatttttcatacactagcatctttagttaaaaattatgattcgaagtctaaaaatggagaattaggcagtttaaataaacaggaaacaacaatgtattcgaacgccattagaattaaagaaagatgcatcaaactcaacatagacagactcggaaatatatccaaagcttagtgttatgattaaacgtactctcttttttggcaatcctgcataccttagttccagaaatgaacaattggtggttagttttccagaggaagacaataaagacgctaccacccccatagaagatttagggtttgtggtattggaaaacccacagattaccatgaccaatggtttgttgatgaagctggtgcaaaataataccgctgtaataacctgcgataaacagcatttaccatgttctatgttacaacctttagtggggcatagcgaacagactgagcgtatgcgccaccaattaaatgccagtttacccctaaaaaaacaattatggcaacaaaccgtaatggccaaaatagaaaaccaggctcaacatcttttggcacaaggtaaaaatgcccttaaattaaaaagatgggctaaagaagtcaaaagtggcgacactgacaaccatgaagcctatgctgcggctttttactttcaaaacctatttgatatagaaggttttagccgtaaccaaaaaggaatggctcctaataatctgttgaattacggttatgcgatacttagggccgtaacggcaagggccttatgcagtagtggccttttgccctcgataggtatttttcaccgaaataagtacaacgccttttgtttggccgatgatattatggaaccctatcggccttttgtagatactttggtgtacgatattgtagaaacgggttgtcagttagaagaattgaaccagaatttgaaagccgaactattaagtataccggccatggacgtggtaatagatgggaaacaaagcccgttaatgaacgccatgagtcgtaccaccaatagtttatatgaatgttttgagggtagtagcagaaaattgctgtatcctacattcatatgatataacatggaaatagaaagtgaaatgtaagaagatttggttaatacggacagtctccatttgaaaatataggcatgagcgacaaccgattttcacgcttaaaccaataccgaagcatgtgggtacttgtattttttgatttgccaaccgaaaccttgaccgaaaggaagtatgccgctaagttcagaaaagatttgttgaacgatggttttgccatgttccagttcagcatttatctgcgtttttgtcccagtcgggaaaatgcagcggttcatataaaacgaaccaagagcgctttgcctaaaaaaggaaaggtgggtattatgcagattacggacaagcagtttggaatgatggagctatttcatggtcaaaaagaacaaccgcccgaactaccaagtcaacaattggaattattttagaatataaaaataggtggttagagcttgatattggtctaattgcaggactcattttttattcctaagacgggtcttaaataacaggataccagtgttttgcagctggtatcctgtgaatcatccttaaaattaaagaactgaaagcaattcacaacagttggtatcattccaaattcttttatttcctgtgaatcatccttaaaattaaagaactgaaagcaattcacaacctactcaatcacacgggcagacggtttcaacctgtgaatcatccttaaaattaaagaactgaaagcaattcacaacagggcagcataccaacggcacaagttatagcctgtgaatcatccttaaaattaaagaactgaaagcaattcacaaccagttcttatcaaacacccatctatcatctcctgtgaatcatccttaaaattaaagaactgaaagcaattcacaacgattacgtcgatagcttcggtatctttccacctgtgaatcatccttaaaattaaagaactgaaagcaattcacaactgattatggcaaagaaaaaaatacaaacacctgtgaatcatccttaaaattaaagaactgaaagcaattcacaacacagtccatcacatagttagaccctttcttcctgtgaatcatccttaaaattaaagaactgaaagcaattcacaacattcattacaaatgtctataatcattaaacctgtgaatcatccttaaaattaaagaactgaaagcaattcacaactaaagttatccttgaatttctggaaggaacctgtgaatcatccttaaaattaaagaactgaaagcaattcacaacaatggatggtgacattgatagataaggtttcctgtgaatcatccttaaaattaaagaactgaaagcaattcacaacgggttcttgtttttgggtttttccgcagctcctgtgaatcatccttaaaattaaagaactgaaagcaattcacaaccatatcctcatgcctaaaacctatcgctgtcctgtgaatcatccttaaaattaaagaactgaaagcaattcacaacttaaactacctagatatacaggactttctacctgtgaatcatccttaaaattaaagaactgaaagcaattcacaacggaaatgttggacgccgggttgatcaaccacctgtgaatcatccttaaaattaaagaactgaaagcaattcacaacttacggtactcaatgccgcttggttcgcggcctgtgaatcatccttaaaattaaagaactgaaagcaattcacaacccatcttccatgcgtaccacgtcatttaacctgtgaatcatccttaaaattaaagaactgaaagcaattcacaacaaccgctatttaagtacgttggacaatatcctgtgaatcatccttaaaattaaagaactgaaatcgaagattcaacgaattcctataaaaataagcgttaatgagttaaagcaattcacaacaaaatgtcaaaatactcttttcggttactcctgtgaatcatccttaaaattaaagaactgaaagcaattcacaacaattaaagttagtgcgtaatttaaagaaggcctgtgaatcatccttaaaattaaagaactgaaagcaattcacaactgctgttttcaatttccgcaatggttttttcctgtgaatcatccttaaaattaaagaactgaaagcaattcacaacacaggactagtatcatttgtgtctataaaacctgtgaatcatccttaaaattaaagaactgaaagcaattcacaacaaacaataattaaccgatgggctggtattcctgtgaatcatccttaaaattaaagaactgaaatcgaagattcaacgaattcctataaaaataagcgttaatgagttaaagcaattcacaacaccttcaaggaaacccaatgttgccttgatcctgtgaatcatccttaaaattaaagaactgaaatcgaagattcaacgaattcctataaaaataagcgttaatgagttaaagcaattcacaacgccattgtcgatgatgtgttgacagaaatacctgtgaatcatccttaaaattaaagaactgaaatcgaagattcaacgaattcctataaaaataagcgttaatgaattaaagcaattcacaacacggcacatattctgatttatactacgagtcatgtgaatcacccctaatccttcgggtgttcggaattgaattttaagaactggtattgcatgcttactgtgtatattttaaagcgtatgaaatcattaataatgcgtagtgtcgttaatatgaaataagtagaaaaagaaaaaatgccccacataatcctgcagggcattcttctatatgataattaggaattgaaatagaatgatttctttatttcctctcgaacaaggcttccatctcttccaatgtttttcctttggtctcaggtatatatttgtaaacaaatacgataatgataacgataaaggccgagaaaaggaaataggggagtgcgttgttccaggttcctccgttcatgataaggccgtttgcctcactttcaacgaccatgggaaaggtctgtgaaacaaaatagttggccaaccattgaacggcgacggccactgccattgctgcactacgaattttgttagggaatatctcggataacaatacccagacaattgggcccatagacatggcgaacgaaccaataaagataaggacaccaattaaactgatgattccttcagttgtcgaaatcgttggtagtccggcagaatttacattggcataatcactgaaatacagggtaaagcccattaataagaacccgatcagcattccaaaaccaccaatgatcaacaatggttttctacctagtttatctacggtgaacattgctatgaaagtaaagaccaagttaacggtagccaacagtatctgttgtaaaagaatatcatcttgcccaaagcccaaggcttgttcaaaaatatcggctccataataaagtacggcattgatacccgtaaattgttgtaaggcagataatacggtgcctatgattacgatcggtagcatggtcttactaaagatagaagcttttttcttggtgctttccgctataatcgaatctttgatgtctttgaattccttggctgcgatttcttcaccatgaatccttgtcaagatattttcggcctcttcctcttttccattgatcattaaccaacgagggcttttgggaacaaagaaaaggaaaaccaaaaagattccggccggtatcaattctgaccagaacatgttacgccacccaaaggctatattttcactttcacttaatttggcaccaatgaaataggtgaccaagaatactacgaagaaccctataaccacagctagttggtaaaaagttaccaagattcccctattctttgcaggggcgatctcagcgatgtacataggggcgttcatagaggcaatacctatcgcgattcccccaataagcctaaaaacgaccaataaggttgtagattccggtaatatgctaggcaatcccgatccccatgccgatattataaataaaatagcggaaataataagggagttcttacggcctatcgccttacttattatgccggccgtagctgcacctgccaaggcgcccaatagggcactactaacgataaagccttttaatgctccggtaagctcaaaatatttggaaaaataaaattgtgttccattgataacacccgtgtcataaccgaataacagtccacccaaagtgatgacaatggtaatgaaataaatgttgattttagtggttggtcttttccccatggtattgattggttttaggttttgaaattgctctaccaaagataactttttgttagctaagattcccttttaggcatttaataattttagggttctattaatttcaatatcctttttattgttggttataattatcgatttcgaacaaattaccgatgtattaattacttcttattgttgtttaattttgtttggatgcatctttcttaatttcaataacttaggggtaataacaactttacaatacatttgtgacggattgtttttgtaatattcctgatgataatcctcggctttgtgaaaaataggggatggaagtatttcggtcacaatgggcttcctgaacgtatgaaccatatccttaattaattcattggccgtttttttctgggcgtcattgtggtaaaaaataacagagcggtattgggtgcctttatcagcaccttgttggttcaaggttgttgggtcatggcttgtcatgaataccgtcataatatctttgtaagtaatgatatctggatcaaaagtaacttgaacaacttccgcatcacctgttaatcccgaacgaacctccctataggtcggtctgcctggggccctacctccggaataacctgaaactacctttttgactccttttatttgaccgtaaattgcctcgatacaccaaaaacaaccacctcccaaagtggccaattgtaatttagtcttcattcttatcctcaatggcttgtgggtctaactccatagattcggaattaacacagtatcgcagaccgctaggctcgggaccatcaggaaaaacatgtcctaaatgggcatcacatgtattgcacatgacttctacacggatcattccaaagctactgtctttttcgtatttaatggcattgtcctttaccggttgggtaaaacttggccaacctgttcccgattcaaattttatggttgaatcgaataatggtgtgccacagcatacgcatttatattttcctgcctcgtgaatggagcataaggcacctgaatggggtgcttcggtccctttttttctggtaatcctgaattgatccggacttaagacctcgcgccattctgcctctgatttctctaccctcctgtctggtttggggttgcctttcactgtaaaattgattacctctttccaagttatcatttttgccttcttttttagtgtagatcagctttgtcccattttctagttcccattatattgggacctgtttaaaggttggtatgggactttactaatttaaactaaatttgccagatgaactatactggaaaaaacaaaaccctatatactattttaattgcagtatgtatcgttggattttggttattcgataatttttatacaccggacacctattcaacatcggatgatgatgggcaggaaaccgaaattcctgcttatctgttgcctaattcatcaactggtgatattacggttcatgatcattttatgttgtcgtacaacgaaccatttgaacaggcagaatgggtggcttatatgttgaaaaagagccatttgacctatgacgatcgcaaacggccttattttattgaggatcctaaggtaaggaccaaatcggcggattggcgtaattataaaggttcgggttatgatcggggacatttatgccctgccggtgatcgccggttttcaaaatatgcttatgatgaaaccttctataccagtaatattagtccgcaagaccgtgatttcaatgccggtatttggaatcggctggaaatgcaggttaggcgttgggccaagcgttatggtgaggtttttgtcgtaaccggcggtgttttggaagagggtctagaggaaatcggcgaagaagatgtagatgttccaaagtattattataaaatcatagccaaaggggataaggaagacttagaggttcttgcttttttaatgcccaatcgtgaaagttcggaagcattgcaaatgttccttgttcctgtagataaggttgaaaaggttacgggcttggatttttttgaaaatctgcccgataaggtagaggccaaattggaaagccgttcttcagtggccggatggaaattctaaatcccttccttcagtcggttagaatccagtttcaggaaaataaaaagcaagatggtaaaaaagagcagaccggagccaccataactgaaaaacggcaaaggtataccgatagtaggtaaaactccgatgaccataccaatgttaatgaaataatggatcaataagatagagatgaccccatacccgtacattcttgaaaatgggttcttttgtctttcggccaaatacaccagccgtagaaataaggatgtaaataggagtatcacggtagcagtacccataaatccccattcctcacctacggtactgaatatatagtcagtatgctgttcagggacaaaatcacctttggtccttgttccttctaaaaaacctttgccaaaaaaaccgccggattctatggccttttccgactggtaggtgttatatccaatggtctttcttatctgttccagttttttagggtctttttccagacgaagccataaactaaatcgatctctatgcctttgttcaaaaacattgttgaatacaaaattgaccgacagtgaaaacagtatggtaaccgtaataattcccagcaatggaaataccggtaccttgaatgatttcttttttagaagaaaaaagaggacaatgagcaggcccaaaaatatgacgatccatatggtaccgaacatcaaggtcgcaataaaaaccaaaatggtcaaaagcgatatggtcagataataaagagggagtccttccctgaatataacgaatattaaagcaaagaaaaccagggcactaccagggtcgggttgtggaataatcaaaatcgcgggcagcaaaatgattcccagtgcataaaattgatcttttcgccttttgatgtccgtttgtatatcacttaaatatttcgccaacgccaaagcggtggcgactttagcgaattcggaaggttgtaagttgaaaaacccgagattataccatgatgtggccccagcaatggtttttccgaatacaaaaaggcctagcaataaaacaatggcgattacatacattaagctcgagaagcgttcatagaaattggcctcaagtcccatgattataattatagcaatgatgctggccccgaaaaagaacaattgcttaccgtgtaaggtggtcaaattgaaaattgaagcatcattttcggtaaaggtactagaatagatatttagccaaccgattaataccaatgccacataaatgagtatggaaaaccaatcgatacgttttacgatacttttaccaaacatattcgtttatcttgaactcttctccactatatggttttgcgtattcgtggtccagggttttttccaacatccttttttctaggtcttttcttgtaatttcgcctttaatatatttttcaatcatcaaagaagctatatgtcccgcataccgtgacccataatatccattctcaatgtaaaccgcaattgcgattttagggttgtttacgggtgcaaaagcaacgaagatagaatggtcggtaagttgggtctttacgccatcaataatcgtataattttccactgtaccggttttaccggcaatttcaatatcaggtatttgcacccaacgagcagtacctttatgataaacatcggccattccttggatcacaggttcaaaatatttacgctcaatcgtggtttgtttcatttcggtgaattcgggaatggtaatatcctcaccatttacctttttaaggatatggggcgtaaagaaatgccctctgttggcaatggccgccgtcatattggccagttgaatcggtgttacggcaacttctccttgtcctatagagttcgatatgatatatgaggaactccatcggttgtccccataccatttgtcgtaatattcttttgaagggatacggcccggtcttcccgtatgaaggtcagagcccaaataccctccgagaccaaagcttcgcatgtgtttttcccagacatccatggcctcatccgtggtatcgaatttgtcgaatatttttctgaaagtgcctgcaaaataggcattacaagacttgtaaataccggaattcagattacggaccccgcccccacaatgacaaccacgttttgtttttcctacgtaaaaaccatgatggcaggtaatcttggtgtctggggttataacaccctcttgcaaggctattaaggcatttaaggttttaaaaggtgaacctggagagggttctgccaatagcgcccgatcccaagtagggtttgctatggagtcgttataaagtttagtgtaattcttggatcgttttcgaccgaccaaaagggatgggtcataagtaggaccggaaatcatggacaatatttctcccgttgcaggttcaatggctacgatacctccacgtttaccatgcatcaataattccccatattcttgtaaatccttgtctatggtaatactgatttcctttccttgctctgggggggtgtccaaagtaccatctttatatgggcctatgtccctgttgaacctgtctttttgaatatactgtacccctttttttccccttaaaacgtcttcataggttttttcgacccctgttctacctttgagttctccttgaacgtaataagggttttgagctaggtcgcgttcatttacctcactgatataaccaagaacattggctgcacttttcgtatcataataacgcaatgacctttt

SEQ ID NO: 1155 - DNA, 24497 bp, synthetic construct
  misc_feature 1..24497: note = Synthetic
  source 1..24497: mol_type = other DNA
ctttcactatttataaggccttaaattaccaagaccaaggcttaatttatgctgctttagtaggattaacaagccttgccatcatgctgttttactcaaaaataagaaataaatattttcaacttatccccgctccgatgtggattgttattttgtctattagctttagttattatttcgagtttgtattaaaacaacccaatcccattgctaaagaattcatgatttctagcatgccaaccattcaaaatgtttttgccgacatccccacccctaattttagcagtattggaacttttcctttttggagcagtgttttagccctaacatttatttcgagtatcgagtcgcttttaagtattaaagcgatcgataaattagacccacaaaaaagacgatcgaacgttaataaagaccttaaagcgttaggtgtagccactattggaagcgggtttctgggcggcctaaatgtagtaaccgttattgcccgcagctcggtaaacgttaataatggtgccagcaatagaacgtctaatttttttcatgctatttttttaattctttttattggtatatttaatcaagatcttaccagaatccccttaccggccttaatggctattcttgtgtacacgggctatcgactggcatcaccacgcattattagaacggttttccgtattggtaaagaacagttaattatcttttttatcaccctaattgtaaccctaaaaatggggataattaatggtataattgctggtgtatgtaccactttactcattcattttattctaaataagagcataggcttatttctaaaaaacgtttttaaacccaacgttttaatgtttagagaaagcagtgatgaaaacaatttttacattagtgtgaagcatttttgtagttttttaaatttctataagcttaaaaaacaactcgatgccgtaccagaaaacgaaaccgttattgtcgacttttccttgtgtaaatttgtagaccatactgttatggaaaacatgcatagctaccaagaactgtttactaaacgcggtggtcaatttgaggttattggtttagatatgcacgatacagattctaaacatccatttgctttaagacgcctacttgctgctcccaaaaaaaggaaaaccagtttaactaagcgccaaacaaatatgaaagctttagctaaagactacgactttatctataattctaaaaaggaaaaagagctggcctttcttaatgatttttgtttttttgataccaaacaaattaatcatgtttacaataggttatcagacaaaaactgtgatatttgtttgtttgatatcgagttctcagaaggcgaatttattgccaaagaagttattcgctcttcgatgctacacataaaactaagccataatattccaaaatttactttaagcaaagaagggtttattgaaaaagtagccgcttttgctggctttaaagatattaatattagagatcaccacgatttttctaatcgtttttatttaaggggtgataacccaaaagaaattagagctttttttaatgaaaaaataatccgattcttcgaaagtaacccctattacaacatagaatctaatggcagtgccttacttgtttttagaaaagaacgcctagcgagtttaaaagaaacaaaagctttattcgattttgggaaacgtttaaaaaacattctcggccctattaaaatgaaaaatccttaatatattcttaagcctaatcatatatcacaatagatttgttaattttacgcgtgtatgaaactatatcccataaatgctggaaattttaagttagacggtggtgctatgtttggtgttgtgccaaaatccttatggcaacgtaccaatcctgccgatgctaataacatgatagaccttacagcgcgctgtttgcttattgaagatggtaagcgtcttattttaatcgataatggtatgggcgataaacagtcggccaagttttttgggtattaccacccttggggaaaccacaatttaaaggattcgctaaattatcacggttttcatcctgatgatattaccgatgtgtttttaacccatttacatttcgatcattgtggcggcagtatacaatggaacgccgataaaacaggttacgaaaccacatttaaaaatgcccactattggagtaacaaacaccattggcaatgggcaacccaacctaacagaagagaaaaagcatccttcttaaaagaaaatattttacctatcgaagagagtggccaattaaagtttaccacacttccagaaaccgatttacttaaaaactccgaactgggttttgatatattttttgctaatgggcacaccgacaagcaaatgattcccatgataaattacaaaggcagaaccatttgttttatggcagacttactgccaacggttggccacttgcccttaccttatgttatgggttacgatacgaggcccctattaactttagacgaaaaagaaaaatttcttaatattgccgcgaacaacaattactatttatttttagagcacgacgcgcacaacgaaattattacagtaaaacacaccgaaaaaggcgtgcgccttgaccgtacattcaccactaaagagatatttaactaacacctaattattaaaaaacaatgaaattatctagattattcttagcatccgtatttatagcaaccgtattttacggttgtggcagcactgcaagtgttattgcaacccctgttgaaaatattgatgctataccattaaaagtttcagaactaaccgaagccgaaaaaaaacactggggccatttagacttgattaaagacaccattccaggaatgagtgtagatcgcgcataccaggaaatcattaaaaataaaaaaggtaaaaaagtcattgtagcagttatagattctggaatcgatattgatcacgaagatttaaacgaagtgatttggaccaacaaagatgaaattcctaataacggcatagacgacgataataatggttatgtagacgatattcacggttggaacttcttaggcgatgcctacgacgagcagttagaatacgtacgattaattgccagtggagaaacttcaaacccaaggtacaacgaagctgttgctttattagaaaaagaaactcagaaatacttaggcactaaaacaagatacgagcaaattgctcaagccattaaaaatgcagacgacattttaacgaagcattttggtaaaagtgattacaccattgatgaagtaaaagctattaaaacagaagaccaagccttatctcaagccattcaaatggcaaaaaacatggatatcaacgaatcgtcactatctgaagctatagaagaaattaatgaggctttggtaagcatcaacgagcgcttaaattaccactttaacaaagacttttcaggacgaactactggcgacgacataaacgatttaagcgatactggatacggtaacccaaacgttaaacccgtaaaaaaagcagaatctcacggcacacacgtggcaggaattatagcggcagtgcgcaataatggtcttggcgctaacggtgttgccaataatgtagaaatcatggctattagagctgtgccaaatggcgatgagtacgataaagatgtagctttagccattcgttatgctgtagacaatggagctcacattattaacggtagttttggcaaatcgttttctccacacgccaattgggtgagagatgctataaaatatgcttcagataatgatgttatatttgtacacgccgctggtaattctagcgaagatattgatgtcgcaccaaactttccagatgataatgtagatttcgtagaagtttctaacacctatattcgagtaggttcgttaacctcaagatatggctctaaaatggtgtctagtttttctaactacggcaaaagaaatgtagatgtctttgctccaggatcggcagtatactctacgttcccagagaacgaatataaaagcattagcggcacttctatggctgccccaggagttgctggggttgcggcattaattcgttcgtattacccaaaattaagcgcggctcaagtaaaacaagttattctggattctggtctggctgttaagactaaagttattgttggtggcgatactaataacgtcaagccttttgcagacttatcaaaatcctctaaaatggttaacgcttataatgccttaattatggcctcaaaactttaaaaacttagtgttttacaacaaaagagacctaaaacgtctcttttgttgtaaaagtttaggacgtatgtgccaacaatttatttttagatataaaaaattataacacccatgaaaaagttaatcctctctatttttagtttatcgctgttgctatggtcttgtcatagtcagaaaactttaacaaccacagaaagtgagtcgttctccgtatcatctacagaaataccgggatattggcaacaacatgtcgaatataaaatggaaatcgatatggatgtaaacacttatcaataccagggcaaacaagagttggtttacaccaataactcacctgatgttttaaaccgtgtttactatcacctctactttaatgcgtttcaaccagggagtgaaatggatgtgcgatctagaaccatagcagatccagactctagagttggcgatagaattagcaaattacaacctaacgaaattggttatattaaagttaatagcttaaaacaaaatggtgttgacatagaacacgaaaccgttggcactgttttagaggttaaattagcaaaacctatccagccgggagaacgtgttacctttaatatggattttgatgctcaagtgcctgttcaaatacgtcgttcgggcagaaatagtaaagaaggtgttgccttatcgatgtctcaatggtatccaaaattagccgaatatgattttgaaggttggcacgcagacccctatataggtcgagaatttcacggtgtatggggtgattttgatgtaaaaattagcatcgataaaaattatattataggaggcacggggtatttacaaaacccaaaccaaataggttatggttacgaaacaggcacggtaaaccgtccagataccgataaacttacttggcattttaaagcccctaatgtacacgattttacttgggctgcagatccagactacattcacgatgttgtacaaataccaaatggccctaaacttcattttctctacaaggataatttgaatacggttgaattagaaaattggaaaaaccttcaacccaaaacggtcgatttaatggcgttttttagcaagcatattggcgagtatccctatgatcaatattctgtaattcaaggcggcgatggcggtatggagtatgccatgtgtaccctaataactggaaaacgaagctttggaagtttggttggagttacagctcacgaactggcacatgtttggtttcagtttttgctagccacaaacgaaaccaagcacgaatggatagacgaaggatttacggtgtacattagtaatcacgctatgaatgctgttatgaatgaaggaaaggaaaacccacttgaacgcgcctataaaacctatataaatttggccaactctaatttagaacaaccgctaactacccatgcagaccgttataattttaacagtacatatggggcatcggcatatagtaaaggtgctgtgtatttagcgcaattaggctatattattggtgaagaaaacttacaaaaaaccattaaaaaatatttcgacgattttgcttttaaacacccgaaacctttcgattttgtaagaactgccgaaaagatcaccgattttgaactggattggtatcatatagattttgcgcaaactacaaatactatagattatagcattaagactgtaaaagacaataccattaccctagagcgtatcggccttatgccaatgcctttagatttaaccgtaacatacaccgatggtagcacggaagatttttacattcccttacaaatgatgcgtggtgaaaaaccaactaaagccactataataggcgactgggcttgggcttatccaacctatacttttaaaacaccaaaaactataaaaacggtgcaaatagatcctacaaacatgatggccgatacagataaatcaaataatgtttttacactgtaatacatcttgcataccggacatcgtttttagcaagttatatcatattaaaaagccacccagacaatctatcgggtggcttttttttgttcaaaacaaaatcaaattagcattaaaaaagttagacaacacttttaaaagttagtgttttaaaaaacctctaatatgctagcctcatactaaattaagaatgtcatgttgcctgtaattaaacattatcggcagcaaaccactcggcataagaggtatcggtttcttgtagttttaatgagtgtaatgtaatgtgtttaggtaggcggcttttaatttttttagaaaaatctattaccatcatctcactagtaggctggtaatctactaaaagcacgtcatgacctcggttttcaagctctttagccaattctacatgtggtgtgtttttattaaaaaccgtggcgtgatcgaatacgtcgacaatttcttcttttacaattttttttaaatcgccaaaatctataaccatcccaagtttaacattatcggtgtctgtaataggtgtaccgtaaacggttaccgataacttgtagctgtggccgtgtacatttttacacttaccatcgtagccatatagggcgtgaccagtttcaaaagaaaattgttttgtaatacgaatattgctcataatatgataatttttgcagcgcaaagataacatcttctttttagtgtttacctcctgtgccattataaaattaaaccaaggattttactgattttaaagttattttttgatgaatactcaaaacatctagtcgttatccattctatttttattatatctataaattaaataagctataaatacaagggtaacaaaaggtaacatagaacctataaacacgccaataccataacttgaatctggtgcgtttttaattttctcttctatatttatttgaataaaaaaggttagtaatacgagcattgtaatagtttgttttacttagcatcaattaaaacccaaagttaattgttttttgaaaggggtataaatgtttttctaaaaataataattaatggaaagcctctcgcgacaatccagaatgttagtgctataaaaatggcgtaaagctcgagatctaaagcatctaaccagaataaaataggaataaaaactaaaaaggtggctactaaaaggacgtttcgcaaggccttcatttttcctaaacctttaaaaataccatcaaaaataaaagccatagcacataagggctgcatagctaaaaccaaccaaaaaatcttataaaattgttctaaaacctcgggctctttggtaaatatagcccctatcggataataaaacaggcctccaagtacggcgattacgacccctaaaataatcgcgtattttataagtttattacttagggtaatgagtaaattgtattcttttccgccgtataatttaccagataaaatatttcctgcgctagaataaccatctacaataaaagcgcctaaaaaccataagttaatggcaatagtgtaagctgcaatatagttggctccataactcgtagcaaaagcactagcgtaataaagcgtaacgtttaaggcaatagtgcgtacaaacagattaagaatcattaaagcaaaacgattaatttctttgttaaaaggaaaacttaactttaaaggaattatcgtttttttaagcaaataatacgccgataaaacagccattgttatttgcgcaattacactcgcataggcggcgcctttaatgtgcatggctggtatgtaacctttaatgccataaaccaaaacaaagtctaaaactatatttattacagctccaataatagcaattatcatggggtaataggtgttttgcaaacctctaaaagctccaaaaacggcaatggtaaaaagtgtaaacggaaagccaaatacgcgaattttgtaatacacgacactatagtctaaaattaaaccagaggcattataaagtttaaaaataaaattggcaaagggatatgtaccaataatgattaaaaggcttaaggaggtaattaaaaaaattgcttgggcaggcaaatttttaatcttatccagtttattggcaccaacatattgcgacacgatagatgaaatagcacttctggtttgacctaaaacccaaattaacatcgataaaaaagtagttacaatacctaccgcggccaacgattctgtggcattaatggctatgttacctactatggccgcatcggttaaggacaatataggctcggatattccggcaattaaagctggaattgccaatttgttaatatgcttaaaacttatgtttgtgctcaccatactaattcgtaacaataaaaaggatgtgtactctgttttgggaaataaatttcagctaatctttgataacctcgacgttcgtaaaatttcaaatttcttttgttttgcgaaaaggtatctaaccttacggaactaaacttgttattttgggcaaattgttctgcaaaatccattaatttctgggcataacctttgccttgatgtttagggtgtatggctagacggtgaatgtatatatttttttcgtttttgcttaaccaagtaatggggagatactctttgtccataaaagtagaaataacaatacatcctattcgtgttttgttgtcttctaaaacgtataactcgtctcttaaaacatcattctcaaaggcagctctattaggataatgggcgttccattggtacaccccttgtgctatcatagcacttgcgcatgcttttgtaatctctaaaataggttctatatcttcaatggttgctttacgaatcatgaattgttacagcttggttacaaggtgtcaaatttaggcttttcaaattattcattatgcccttaccctaaacaattattcagaacacagacatcatatggctctatttatctatgactagagagctcttttctcattataggcagtaattgaagccttattttatagggtttctaaaaaaatgctgtattttcttgtttttagtacaaacaaattgagttttattcgtaaaaaaatgtaattttgaaaactcatagtaaaaatgttttactatgcttgaattttggggatgtagctcagttggctagagcgcttgactggcagtcaagaggtcgtcggttcgaatccgatcttctccactagtaaaaccagtaattaccattgttttttggaatttctggtttttttttgcggaatatttgcgtactatttgagaatttacgccggtaatttgctagtttttagacccgcattcaccacactttctacattgaacaagctcgaccctatgccgagaactaaacattttacatttgtactttatcggtttactaccaaaccataacacttaactatttgtatgtaattacatttatttaaagatattttttcttacctaagctaaaaaagttatttttatagcattggcttaaaattcacaaggttatatttatcagtaaagctacgggaaatactattatagaacctgctttagtctaaaattaatcaggtaaacaatataaatgtaaaacttaaaaaactggaataaaaaaaggcgagttgccccgccttgaatgttttcacaacggaataatccttattgtgaattgctttcagtaaggtaaagatataaaaaagaagttaactcgcaaataagtattaccacaatacggaaaataaaaacaacttacatttaaaggaaaaagaatatatgaaaaaagtattaggattagatttgggaactaactcgattggctggagtttaatacaacataattttgaaagaaaagaaggtgtaattaacggtttaggtgttcgaataattcctatgagtgcagatgttttaggcaaatttgatgcaggccaatcacattctcaaactgctgaaagaacaggatatcgaggaacaagacgcttataccaacgagctaatttacgcagagaacgtttgcatcgtgtattacgtattcttgattttttacctcaacattatgccgatcatattgattttgaaaaaaggcttgggcagtttaaacaaggtaaagaagttaaactaaattataaaccaagcaactcgggtaaacatgagtttatttttaaagaatcatttaatgagatgcttaacgaatttaaaaatgttcaaccagaattgttctactttaaaactgatggtgtagaaacaaaaattccattcgactggacgttgtactatctgagaaagaaggcacttacaaaacctctaacaaagtatgagttggcttggataattcttaattttaatcaaaaacgaggttattatcagtcgcgtggagaagtagttgatcatgaaaacgacaaggaatttgttatattaaaagtgaaagaagtcattaattctggagaaaacgttaaaggaaaagttttatacgatgttgtttttgaaaacggttggaagtatgacaaacaagttgtaaaaattgaagattgggttgctagaacgaaagaatttattgtaaccacgaagacattaaaaaacggtgatgtaaaaagaagttacaaaaccgtcgattctgaaaatgattggattgccataaaagctaaaacagaacaggacatagaaagttcaaacaaaactgttggagaatttatttatgaaaccttacttgaaaacccaacacaaaaaataagaggaaagcttgtaaaaactattgaacgaaagttttataaaaatgaattaaaaaaaatactcaccaaacaaattgagctacaaccagaattattttcagaaaagatttacaatacttctattgaagcattatacccaaacaatgaagcccaccgagatgcactgaaaaatcgggatttcatttatttattaatggaagatattattttttatcaacgcccattaaaaagtcaaaaatcaaatatttctggatgtcaattagagtcacgagttttcaaacaaaaaaataaggaaactgggaaagaggagtttataaaaaaggctataccagtaatttcaaagtcacacccattatttcaagagtttaggatttggcaatggttacaaaacttaaagatctacaatagagtaactaccttaaaaggcgaactcatagatattacagaaaaactgttagcaaatgaaaaagattgggtagctttattcgactttttacaaagcacgaaagaactggatcaaaaacagtttataaaatattttattgataaaaaattaatagataaatcagaaaaagaccattatagatggaattatgtagaggataaaaaatatccttttgccgagacaagagcacaatttatttcacgtttaaaaaaagttgacggcgttaatgatcccaactcttttttagatgaaaaaacaaaagtaggtaaaaaagaaaccagtccccttataagcagagtagagcaattatggcatattatttattctgtttccgatataaatgaatataaatcggcactaaagaaatttgccgaaaaacacaaattagaacaagatgcctttgttgataattttatcaaattccccccttttaaaagtgactatggtagttattccaaaaaagccattaccaaattattgcctttaatgagaaaaggcaggtattggaatgagaataaaattgcagatttagttaaacaacgtgtaaaaaccataatgaaccgtgttaacagccttgggttaaacgagaattattctaaaaaagatttggcggaagctttagccaaggtaagtgatgacgatgttaaaaaacaactcattaagagctttattccatttgaagataaaaatccaattaaaggcttaaatacataccaagctacttatttggtttacggcagacattctgaaattggcgaaattcaaaattggagaacaccagaagatattgacacgtatttaaaaaactttaaacaacactctcttcgtaatcctattgtagagcaagtggtaaccgaaacccttcgtgttgtgagagatatttggaaatatcacggcgatagtaaaccttatttttttaatgaaattcacgtagaactaggtcgcgaaatgaaaaatccggctgataagcgtaaaagaatttcagacagaaatatcgaaaacgaaaacaccaatcaccgaattaaagaaatactaaaagatttaatgaatgacagctctattaatgctgacattagagattattctcccagccaacaagatttgttaaaaatctatgaagaaggcatctaccaaaaccctaaagccgattttacgaaagtaggtgaagatgaaatttcgaagattagaagtagtaataacccgactcaaaaagaaatacaacgctataggctatggttagagcaaggctacatttctccttatacaggaaatcccattccgctatctaaactctttactcacgaataccaaatagagcacattattccacaatcaagatatttcgacaactcattaagtaataaaattatttgcgaaagtgaggttaacgaagacaaagacaataaaacagcttttgaatatttaaaagaaaaaggcagtaatattatcaatggtcacaaacttttaagcctctcagagtacgaagcccacgttaaccaatattttaaaaacaacagacaaaaacttaaaaatctattaagtgaagatattcctgaaggttttataaatagacaattaaatgatagtcgctatgttagcaaattgattaaaggcttgctaagcaatattgtacgtgaagaaggtgaagaagaagctacctccaaaaatttaatccccgttactggtgcagtaacttcaaaacttaaaaatgattggggtctaaacgacaagtggaacgaacttatcttatccagatttgaacgtttgaacctattaacccaaaccagtgattttacgactttaaacactaatggcaaaataataccaactgtaccggatgagttgagtaaaggctttagtaaaaaacgaatagaccatcgacaccatgcgctagacgctttggtggttgcatgctgtactagaaatcacagccagtatttaagtgctttaaatgctgaaaagaaaaactttggtttacgcgataaattattaattaaaaataaacaaggccaatacaccaaaacattccaaaaaccttggcaaacctttactactgaagctaaaaaccaattagaaaaaacagtgattagttttaaacaaaatttacgagttattaacaaagctaacaacaaattttggtcttatagagatgaaaacggaaacctaaacgtcgacaaaaacggaaaccctttaaaaaaactacgtaaacaaaccaaaggtgataattgggcgatacgcaaaccaatgcacaaagagtctatatatggaatttacaacattaaaacaccaaaaggtaaaatagctaccgctataagatgttttttgggagatattaaaaacgaaaaacacttagccaaaataacagataaaacaataagagaggtgattttgcccaatcacttaaaaaagtatttagatgaaaaaggaaaaattaaatacgaccttgcttttaatgatgcaggaattgaagatttgaacaagaatataactgctttcaataatagcaagaaacaccaacctatttacaaggttaaaatgtttgaagtgggtaataaatttgccgtttccgaaaatgaaacttctgaaaaaagcaaaaaatacgtagaagctgcaaaaggaaccaatttattctttgccgtttattgggatgaaaaaaagcaaaaaagaaactacgaaaccgttccgcttaacgaagttattactcatcaaaaacaagtagcaaatttaccaaaaacagaaagattacctattcaacccaacccaaaaaaaggtaatttcctgtttacattatcgccaaatgacttggtgtatgtacctaacaatgaagaattagaaaacttagataggattgacttcaagaacttaacgccaacacaacttaatagggtttataaaatggtaagctgcacgggaggagaatgccatttcgtttctcaagtaattgcttcattaattaaaaattatgattcaaaaagtaaacttggagaattaggaagtttaaataagcaagaaacaaccatgagtgatgatattgttcgaattaaagaaagatgcatcaagcttaaagtagatagattaggaaacattatcaaagcttagaaatatgataaaacgcatcttattttttggcaacccggcttatttaagcacaaaaaatcaacaattggtggttaattttccagaagatggaaaagacgaaaaaactatacctattgaagatttaggctatatcgtgctagaaaacccacaaataactattaccaatgggctattaagcaaattaatagaaaacaaaacagcagttattacctgtaacaaacaacatttgccctgtgggtttttacagcctttggtgggccataccgagcaaaccgagcgcatgcgttaccaacttaacgctagtacaccattaaaaaagcagttatggcaacaaaccgtgatatcgaaaatagataaccaaggcaaccattttgtgctgcgtgagaaaaatgccctacgcttaaaacgttatgccaaggaggtgaaaagtggtgatttagaaaaccaagaagccttggcggcggctttttattttcaaaacttatttgaactcgatgggtttagccgtaaccaaaaaggtgtaccacccaataacttactcaactatggttatgccattttgcgagctgtaaccgctagagctttggtaagcagtggtctgcttccatctgttggtatttttcatcgcaataaatacaatgctttttgtttggcagacgacattatggaaccttacagaccctttgtagataagctggtgtacgatattgtagagagtggctgcaatttagaagaccttaataccaacattaagtctaatttgcttatgattcctgctatggatgttttaattgatgggaagcagagcccattaatgaatgccatgagtcgaaccacctcaagcttatacgagtgttttgaaggtagtaggcgcaaaattctgtatccagaacttaaatcgtctttagaaacctttataagataaaactgattgtaaactatggagtcgtatttaacccgtttaaaccaatatagatgtatgtgggtactggtattttttgatcttccaacggaaactattacagagcgcaaggctgccacgcgatttagaaagaatttattaaacgacggttttggtatgttccaatttagcatctatacccggttttgccccagtagggaaaatgcggccgttcatatcaagcgtaccaaaaaggcactgcccaaaaaaggaaaagtatgtattatgcaaataaccgataagcagtttggcatgatggaactttttcatggccaaaaagaggccggtttagaacctccatctcaacaattggagcttttttagaaaccgaaatatgggatcacgtatagtggcacctttgtaaattttaataattcgggagattctattgtgtttgtaaaaaacaggataccaacgttttaccgaaggtatcctgtgaattctctgtaaatttaaagaactgaaagcaattcacaacgatattggtattgttctatattgtgattttcctgtgaattctctgtaaatttaaagaactgaaagcaattcacaacacattacaaaaacttctttattaacaccatcctgtgaattctctgtaaatttaaagaactgaaagcaattcacaacagtgttttaatctaccctcattattactttcctgtgaattctctgtaaatttaaagaactgaaagcaattcacaacaagtagaataatatctacttgaagaaacacctgtgaattctctgtaaatttaaagaactgaaagcaattcacaacggagcaggagcaggatttagtattcaaaagcctgtgaattctctgtaaatttaaagaactgaaagcaattcacaactcattaaaacacttttttagaaaacggctacctgtgaattctctgtaaatttaaagaactgaaagcaattcacaacagaatttaaaacgcttacaggctcgcaaagcctgtgaattctctgtaaatttaaagaactgaaagcaattcacaacagataggtactttttgattaaatctctaaacctgtgaattctctgtaaatttaaagaactgaaagcaattcacaaccgtttattacaacatcaaaaaaatcatacgcctgtgaattctctgtaaatttaaagaactgaaagcaattcacaactatattattgagcacgtaaatattatcgtcctgtgaattctctgtaaatttaaagaactgaaagcaattcacaacacaaagtaactcttttgctaaattgataaacctgtgaattctctgtaaatttaaagaactgaaagcaattcacaacacccgccagtggcttgacactagggtctgcctgtgaattctctgtaaatttaaagaactgaaagcaattcacaacactaccaaggtaatttatcttacaatgttacctgtgaattctctgtaaatttaaagaactgaaagcaattcacaaccataacctcctaaatgtttcatcagttcgacctgtgaattctctgtaaatttaaagaactgaaagcaattcacaacagattttttcgttttcattatcgtcaaaacctgtgaattctctgtaaatttaaagaactgaaagcaattcacaactttggccggttcgaaatatacgttttataacctgtgaattctctgtaaatttaaagaactgaaagcaattcacaactgccattatagtaggcccgagtgtttttcccctgtgaattctctgtaaatttaaagaactgaaagcaattcacaacactattgccgagagggcaatactttttattcctgtgaattctctgtaaatttaaagaactgaaagcaattcacaaccagtccatggtgtgtgttgcgtaccaaagtcctgtgaattctctgtaaatttaaagaactgaaagcaattcacaacaggattgaaacatacggtcgtctatcttatcctgtgaattctctgtaaatttaaagaactgaaagcaattcacaacactctctgtttatgtactcgggcgtataatcctgtgaattctctgtaaatttaaagaactgaaagcaattcacaacagcattcttcaacacttggaagaagatgaacctgtgaattctctgtaaatttaaagaactgaaagcaattcacaacccaatcggattgcgctgtaaagtttgaccacctgtgaattctctgtaaatttaaagaactgaaagcaattcacaacatcgtgcataattctcaacccaaatattaacctgtgaattctctgtaaatttaaagaactgaaagcaattcacaacgtcgtgaagctctatatttaaatagttatgcctgtgaattctctgtaaatttaaagaactgaaagcaattcacaacacgctgtgagaactcgccaccaaagcaaatcctgtgaattctctgtaaatttaaagaactgaaagcaattcacaacacgctgtgagaactcgccaccaaagcaaatcctgtgaattctctgtaaatttaaagaactgaaagcaattcacaacgtccaactaaagcaaaaaccaatctagaggcctgtgaattctctgtaaatttaaagaactgaaagcaattcacaacagatagaccgtgacttgtttccgaaaatagcctgtgaattctctgtaaatttaaagaactgaaagcaattcacaacacctgtgccatcgtcttgtcccgtcttttccctgtgaattctctgtaaatttaaagaactgaaagcaattcacaacgcttgttgtcctcggcgtagaaacctaaatcctgtgaattctctgtaaatttaaagaactgaaagcaattcacaactaacggtgaaaccatttgaacgaattgtcacctgtgaattctctgtaaatttaaagaactgaaagcaattcacaacagttaccgaaatgttaatcaacgcttcaacctgtgaattctctgtaaatttaaagaactgaaagcaattcacaacccgaagaggaatttcaacaaatgcgcatacctgtgaattctctgtaaatttaaagaactgaaagcaattcacaaccgtaagccaaacgctctgcacgttgcttttcctgtgaattctctgtaaatttaaagaactgaaagcaattcacaacgtttgaggtaatctgaaaacgttttgtcaccctgtgaattctctgtaaatttaaagaactgaaagcaattcacaactaggcttacaaccaaataacacccactttcctgtgaattctctgtaaatttaaagaactgaaagcaattcacaacagttgataagatctaattttttacgcttatcctgtgaattctctgtaaatttaaagaactgaaagcaattcacaacacgagggaaatttaagtacagaagttagtccctgtgaattctctgtaaatttaaagaactgaaagcaattcacaacattctaaggcttctttatttagtaataaaacctgtgaattctctgtaaatttaaagaactgaaagcaattcacaacagattgaattgccttcaattttttcagcgacctgtgaattctctgtaaatttaaagaactgaaagcaattcacgaccttatatttagcgaaaaacctcatcattttacctgttctttttatttaaaagattgcttcgtcatacttcctcgcaatgacggattgttatggtgtgctgcactttaaagtagcctgtaatgcgcaacgcaacgaagcacctagtgttctataaattaagtgtaaaaaccattaaaaagattcttcagtcgtccctccttctgaatgacaaaacgtgctacggtaaacagaatattattcgaagcaaaatgtcattcagagcatagcgaagaatctcatgattttacccattctttttatttaaaagattgcttcgtcatacttcctcgcaatgacggattgttatggtgtgctgcactttaaagtagcctgtaatgcgcaacgcaacgaagcacctagtgttctataaattaagtgtaaaaaccattaaaaagattcttcagtcgtccctccttctgaatgacaaaacgtgctacggtaaacagaatattattcgaagcaaaatgtcattcagagcatagcgaagaatctcatgattttacccattctttttatttaaaagattacttcgttatgcttcctcgcaatgacggattgttatggtgtgctgcactttaaagtagcctgtaatgcgcaacgcaacgaagcacctagtgttctataaattaagtgtaaaaaccattaaaaagattcttcagtcgtccctccttctgaatgacaaaacgtgctacggtaaacagaatattattcgaagcaaaatgtcattcagagcatagcgaagaatctcatgattttacccattctttttatttaaaagattgcttcgtcatacttcctcgcaatgacggattgttatggtgtgctgcactttaaagtagcctgtaatgcgcaacgcaacgaagcacctagtgttctataaattaagtgtaaaaaccattaaaaagattcttcagtcgtccctccttctgaatgacaaaacgtgctacggtaaacagaatattatttgaagcaaaatgtcattcagagcatagcgaagaatctcatgattttacccattctttttatttaaaagattacttcgttatgcttcctcgcaatgacggattgttatggtgtgctgcactttaaagtagcctgtaatgcgcaacgcaacgaagcacctagtgttctataaattaagtgtaaaaaccattaaaaagattcttcagtcgtccctccttctaaatgacagacgtcttattatattattactattgttattacagagaggaagtcccctactccaaaatagctgcaattccaggaagcgtttttccttctaggctttctagcatagcaccaccaccggtactcacataactcacttttttatcgaacccaaattgtttggctgctgctaccgaatcgccaccgccaacaagagagaatgccccgttttttgtggcctctgcaatcgcattacccaaggcaatggtgcctttagcgaagttctccatctcgaaaacgcctaaagggccgttccaaagtatggttttacattctaaaaccaccttatggaaattttcttgagattttggcccagcatctaaaccttgccaaccctctggaatattattgatatcggtaatttgagtttctgcatcgttactaaaagcatttgcggcaattacatcaacgggcaagtgtatttttgtgtttttagctttagcttgctctaagatgcttaaagctaaatccattttgtcgtcttcacaaatagaatcgccaatatttccaccttgcgcttttataaaggtataggccataccgcctcctataataatatgatctactttatctagaatattttcaataatggtaatttttgaagagatttttgcgccacctaatacggctaaaacaggtttttcgcctgtttgcatcactttttcaatgctttctatttcttgcgccaacaaactaccaaaacactttttaccttcaaaaaactgagctattacagccgttgaggcatgtgctctgtgtgccgtaccaaaggcatcgttaacataaatatcgcctaattttgatagtttttctgcaaaccgaacatctccggcagtttcttcggcataaaaacgcaagttttctaacaataaaatttttccgggctctaagcttgctgcagccgtttcggcttccactcctatgcaatcggctacaaaggttacctctacgccgataatatcttctattttttctgcaatatgtttaagcgataaatcctcttgaaaaccttttggacgacctaaatgcgacattaaaatgcagcttccgccgtcttctaaaatttttataatagtaggctttgcagacacaattcttgtggtatctgtaacttcaaaatcagcatttaaaggcacattaaaatctactctaattaatgcttttttgtttttgaaattaaaatcgttaagcgttttcatgcagttgtgttttggattacatcaaattgatggacaaatataaccaattaaaaacgggttaaaaatgacattggtaaggaaaaacacgacattcgtaaaacattttgctcgggttctagtggttttacatgattaaaatttgattttatattatgcttttttctcatgtaaaatacagaccaatcaactctgcagcaatctttacaataatacactcataaattctaaaacagccataaacaacttcaaacgactcctaggtatcacgtttaccgaaaggctgggattaaaccaaaatggtaaaccgcattagagcatcttaagtgttttacatctaacaaaatttatgtaggtttgtgatatgctttttgaagacattttaggccaagatcacattaaaaaacatttaacccagagtgcggataatggaagaataccgcatgcgcaattatttgtgggtaaagagggttctggcaccttacctatggcgcttgcttatgctcagtatattttatgcgctaattctggtggtgaaaacaatacgggtaacgcggcttgcaaccaaaactttaaaaatttttcgcatcccgatttacattttgcttttccggtgacaactagcgataaggtaaagagcaaacccgtttctagtttttatttggaagaatggcgccaattattaaaagagcaaccttacggaaatttatttgattggtataaactgcttggtgtagacaataaacaagggcaaattggggttgaagaagcccacgacatcgtaaaatcgcttactttaaaagcctatgaaggtggctacaaagtgatgcttatttggatggcagaaaaaatgaataccgcctgtgctaacaagctactaaagcttattgaagagcctcctaataaaacgatatttatattaattgctgaggatgaaggacaaattataagtacgattaaatcgcgttgccaagtgttacattttccgcctctagcggaagatgtaattaaaaatgccttgattaaaaattataatttagaactaactacggccacaaaaattgcccaccaagctaacggaaactataataaagcttgcgatttagtgtatcaggattctgaagatattcaatttgaaacctggtttattttctggattagaagtgcttttaaagctaaaggtaacaaagccgctattcacgatttaatgacttggagtgaggatattgcaaaaacaggccgcgaaacacaaaaacaatttttacatttctgtctagactttttccgccaagccttactgctaaattacaaagcaaacgatttggtttttatagcacccaaaaccgaaaactttaaactagaaaactttgcgccttttgtgcatggtaataatatcttagatattagtaacgaactacaagatgctatttaccacattgagcgcaacgggaattctaaaatcattttaaccgatctttctattaaattaacacgactactgcataaaaaagcagaataatctatctgtactagtctacataaaaaaaatataagacctcaagcaccaaataataatataaaacaaaaaaacgctcttagaactgtttctaagagcgtttttttggctgtttcaccgctatagtctatttagcgatagtctattcttttacgtcttcggcggttttagcagaatccttttcagtaccatttaaagcctctaaaataatctgtgttaaatcattctcctctggaccatacattatggtagatgccgcatcggtagttcctaaaatgtaagtataaccgtttttctttccgtaatcttttacaaaatcttttaccttaataataacagaatcaatttctgtttggaaagattgggttaacatttgctgctcgaattgcatttgttgctgtaactgctgctgtttttgttgtaagccacccattagttcttgagctttcttttgtgaagatctttgagcaagtgcttgggttttttgaacttctgcttgaaaagcctgcccgatactatcggctcttttcttaaaggcttcttctttttcttgaaatcgcttttcaaggtcttttttctcttgaaattcgttaattacagtgccattattaacgtaacctatttttgcttgcttttcgcatgaagacaaaacaataagagcgcatactgctaaaaatatatttttcattggttcgggtttatctggttttaattatctcacaaatgtaagaaagtatgcgatattttaaagcggaaataatttgaattttaactataaggtaatcttataacgaaaaactaaagaataacaataaactattaaaaacaaagcgtttataaagcgtttaaagcacgaaaaagaattcttaacccatttatatgttgtttatacaaaaaccctaaatacgtgcttaaaaattcgttttaattctttttaatcacataaattaaggaagagggctcttttgagcttaatgatttcaaatttgaaaccaaacctatccaaatacctgtaattatattcatttttcccgatttgtatttttctgataataagctcacataaaaggcatcaaaccacatgggtttatgattaacaatttttaagtcgtattttgaaataagtttagaaaacgataatttatcgaaatgccataaatgtcttggcacatcgtaagccgcccaaaactgtttataatatttggcatcgtaacttttataatttggcaaagcaataattaaagtgccgctaggttttagtaattgtttaaaagcagtaatatgattttctaaatcgggtaaatgttctaaaacatgccaaagcgtaatcacatcaaaactcgaaggttcaaatttagctaaggcttcggttttaaaaacagcatggtttgtttttttattcgcgatttttctagcctgttcattgggttctattccagaaaccacccaattattttgtttggctgtttgtaaa

SEQ ID NO: 1156 - DNA, 24494 bp, synthetic construct
  source 1..24494: mol_type = other DNA
  misc_feature 1..24494: note = Synthetic
aggttttccttaccgaggtatcggcaaccaaccccgattttgtgatagagtatattgaagagcaattacgtaataccatcgtgtcgcggggcatggatgcagtagcccaatcaaaaataccggtattagaccttgctgccagctacaacgagatgggccagctaatagcccaaaccatacagcccgattttgccgagcttggccttaaccttaccaaaatactggtggagaatatctcattaccacccgaggtagaagaggtgcttgataaacgcagctcgatgggcatattgggcaaccttggtgcttatgcgcagttccaggcagcaaacgctatggagaaagccgcagagaataccataggcggcaaccttggcgccgcaggcatgggcttgggcgtaggcgctgctatgatgggccaggtaggcaacgtttttaagcccggcaacttcgatggcaacaacccatccggggcggatggaccgccgccattgccatctacgcaataccatattgctattgacggtaaatctgacgggccgcacagcctcgcaaatatcggcgcgatggtggcatccaaagccattactaaagatactgtggtttggaagaaaggtatggccggatgggccgccgcaggcaccgttgccgaacttgccggtttctttgacaacgaaccgccaccattaccttaagtatcaccctaaaaccattaataaatgagcggaccagcaaagccggccgatagcatcagcaaatcattaaaatgcgggggatgcggagccctgttgcactttgtacccggcacacgtacccttaaatgcagttattgcggcgaaagtaataccatagccgatgcgggggacaatgatgtgattgagcctgttgactatgatgaatttgttgcaggcatcgatgttaataagcaaatcgacgacatcaaggtagtcgactgcaagaactgcggctcgcaaacggtgcttgatgcatcggtaacagccgacaaatgccctttttgcacagcgccattagtgttgaacctgcaggcaggcaaggaatatttgccgccgcattatattttacccttcgaggttagccaaaaggaaggcgtagagttttttaggaaatggcttaagggattgtggtggtcacctaacgatctggcgcaaaaggccgggggtagcacatcaactttaaatggcgtgtacctgccttattgggcctacgataccgatactgtaaccgattataccggcgagcgcggcgactattactacaccaccgaaacttacaccgaaacggtggacggcaaaacccaaacccgtacccggcaggtgaggcacacccgctggtcgtatgcttcgggtacggttgaatgcagcttccgcgaccttttggtggccgccagtaaatcgctcccggagaaaacactgaacaaacttacgccctggaaactgcagatgctggcccggtttgatgagcgttataccagcggtttccgatcagaaacctaccagctgagcccggaactgggtttgctaaaagcccaggaacagaccgtttcggaaattgaatcggctattcgcgatgatattggcggcgatgagcagcgcatcgacaacagggacaccgattaccaaaacaaggccatcaaatacattatgctaccggtgtgggtgagtgcttacaattacaacaataaagtttaccagtttaccgtaaacgccagcactggcgaagttattggcgaacggccgctaagcgctatcaagattacgctggcgatattattgggtttggctttgattgccttggctgggttcctgtatatgcagaatgcgaacagataggaatggttacagttaaatattagttaaataagcctccaatcttcctgccgtttgcgcaaacccgtcgctggcttttttgcggtaattgttagtcgtctagccctttgcctgccagtatccggggtatgcatttctccacccttgcctcacgtgttttggcttgcttaggctgcgcaatatgcagtaggtagccacgttgcctaccgggcgttagtgcctcaaaggcggttttaagggcaggaagttcctctaatttaagctgaaattcttctgccatttcaaattcctttgtctttttcaactctaccttcaagtcggcttgttccacttctatggcttcgtggatgtaagcttttaatgccggttcgagctcggctattgccgtagtacccgtaaaccttatctgccgtgcggcctgcacattctcagtctgttggataaggatgccattcgcatcattcaataacgcacctttgaagaacaggtaagcgcaatattctttaaatacatgtatcaatacaatattactttgcttgtaggtatagcaggggcatccccactttaactcttcctccaatccgcaatccagtgcgatacgcctgagtaaggcaatctcctgctgccatttgccgggcttggcgaaataaaaatctactttggggttcatgatatcggttttgatatgactaagttacaaaacctatccacaccataatacatacccggaaaactttacacagtgtaataccgtcctggtttgtcttggtgacagaccacctgaacccccgccaataccagccagttttgtgcagattttgttttatagaaatttggaaaatagatgcgcaaagcgggcatgcatagcggcgggctttgcctcaacaacaagatatctcctcgctatcgctcgttcgataggacaagttttattaaagtccgccgctaattgatctgtttgatagcctaatcccttttataggcattcattttggggtatttttcatcttcgtaccaaggcttttgcggccggttggcagcaaagccatgttgttcgcggtaggccttacgttcggctgtaaaatgccaccagcgtttgctatcgtcacgggtttcgatgtaatgcaccagcagtctgtaggaatcttccacacaggggtcggcccaggtaccacaatgattttcaaaggcatcaaagagttctaccgcgtctttccctttaagctgggctaaggaataatacccctggccgataagttcttctgcgaaattgatgcccaacgaggggatactttgaaactccgcaagcgcttgtaattctttggcgcgatgcggcgatgcattcagtagtacagcaacttcatccggagcatgatcctgtaacatcttttggctgattttttgggctttcagcgtttgcttttctgtttcggttaaccggtaattgatattctttttcatagcacctccacatagttgataatgaatttcgctacctgttcctgctcaataacatttaggtcgtcgccatcgtatatccaataaccatccgaatcaaataaaaccctgcccaggttttcgccggtttgatcataagcggtatatagttcgtaacactggtgcccaacaggtgcataagatggcactaccctgattacctcactgccaccgttatgccggttaagccaggctttcgcctcatcccgcagaaatattttcgacttgagctgctgcatcattcaaagctttttttcaaagataaatgaaaagctaatatttttagtataaaacccgcccgaaatatcaaaaaaaaatgactgatggttctgccggacggtttccgccagtgaaattgtccttgcaaattgaatatttaatgttatgattgcaaggatgatgacaagatttgcagaagtcgaaatagcattattgatgcaggagtttcctgccgtgggcttattgggcccgcgccaaattggtaaagctaccctggcggagcatattgcgcttaattttgattcgtcgctctatttagatttagaaagcccggccgacctggccaagttaagcgagccggaagattattttgaacggcataaaggcaagttgattatactggatgaagtacagcgggtgcctgaattgttcgggatattgcggggagtaatcgacaggcggcgaaaggatggtttaaaaaaggcccagtttgtgatattaggttctgcatcgctcgaacttttaaagcaatctgaaacgctagctgggcgcattgcttatataaaccttgccgggataaacgtaaaagagcttttagcaacaaccattccgcaacaccaattatggttgcgcggaggtttcccggacagcctgttggcaaatagcgatgatgcgagtttacgctggcggttgaatttcatcaccacttacctggaacgcgatgtgcctcaattcgggccgaggataccttcggttacactaagaaggctgtggacgatgctggcacataaccacggcggccaacttaatattgcccagcttggggctaacctcgatttgtcgggccctaccgtaaaacggtatatcgagctattggaagatctattgctcatccgctctatccgcccatggttcggtaatgttggcaagcgcctggtgaaagcgccaaaggtttacatccgcgatagcgggctggtgcatgccctgctcaacctgaaaacattagacgaggtgctgagccatcccgtaattggtgccagctgggagggttttgtaatagagaatatcatctcatgcctgccgcagggcgtaacctactggttttatcgtacatcggccggtgccgaaattgatttggtagtagagaaaagcaacaccaacaaattcgccatagaaataaaacgttcgttaaccccaacagtatccaagggcttttacctggcgtgcgaggatatagcggcaacgcatcgttttgtggtttatccgggcggtgaaaaattcctgttaagcaaaggcgtttatgccatctctcttatagagatgatggatttgttgacgcagatataatctaaacggtattttccccctttgccatcctgagcgatagcgaaggatcttacaccccccttctacaagcttagctacgtgcctgttatctacaggtcagcgcgtcgctctacagctccgctaccactaatcaacctgtatttcgcgggttcttaattcttctttgtggtatccctaaaccggcaatcggtttctgatccggggtgcgcgttgttttcgcgggcctcaaaggcgcggaactcgtcataagttttatcgcacactatatagctagtatcgcgccccgggcggttgacggcgtaccggcgatcgcagcgtgcgcagtgcggtacctggtcgtcatagcaaccggccagcatggccagtagtaggatgatagataattttttcatatggtagttgttaattttcttttcaaaaagcctcctcaccctcgcctgtcgggtacttcaacataaaccttatcacaataatcacctgcccggagggagaaatcgaatctctcattaaaccgttagtctaaacaggcaataccggcgtggctaacccacctaaattccccccgtgttctcgctatggtataaagaataaaaccactgtatttcaatgcgccaaatggccgaaggcatcgctgatatcgatgtgtttaaataaggcatctatttttccttcaatcacttccatcatgcggcctgccagtgtttttttagaagcagtcaccaaatggcccttagctgcacatcgtatcgccacaaaaaagcaggccatgcagatgttgtgatttgctttcattttttgaacaagtgatatttgaaacaacggattcgccgtatagcaacaaagcagatatagtatggtgcccgtctataggcagcatcatgccagtgatgtggcgggtatggttgcaagtaataatggccgaattgttatataacagcgcggctatacagccatgggtaatggtaatttgctgatgattgagcactacgatgcctgtgtcttcaatcggtaccgattttttactttccatttcgcctaacactttcagttgcgggagatctatcagcaactggccttcctttaaacttaggtaagccgggttactaaagtgaagcgtgcgttttatcatattgcctcatttaaatggtgatgggtttagcaataggctggtgttttgagacttcaccaacctaccaaaaggccggtaattgacgtttaattacttacacaaatatatacttgggcgcaacaggaaaaaaggggtgaaaacacggtattttttgatttgaaaataattgtaccttgtttggctatagggacgaaaatgtgcctgcataaaaaaagacgagagttccccccgccttaaatgttttcacaacggaataatccttattgcgatttgctttcgatgtaaagagatacaatttagttgtgatttgctttcattctttgaacaactgatatttggaacaactattggtatagatacaccgcccggcacgttgttgtgatttgctttcattctttgaacaactgatatttggaacaacaagtggcgcaacgaaagcatcaaaggtggagttgtgatttgctttcattctttgaacaactgatatttggaacaacgggaaggtaatatcattcgttaagcaggttgttgtgatttgctttcattctttgaacaactgatatttggaacaaccttcatgggcgcatacatcaacacgggagtgttgtgatttgctttcattctttgaacaactgatatttggaacaacctgaaaagcttaaagtatcgctcgatactcgttgtgatttgctttcattctttgaacaactgatatttggaacaacaattaagtataaaggggcagaaccatattgttgtgatttgctttcattctttgaacaactgatatttggaacaacggtaatggaagtataagcgaagtaacagcagttgtgatttgctttcattctttgaacaactgatatttggaacaaccacattcgaaatagacctagactgcgacatgttgtgatttgctttcattctttgaacaactgatatttggaacaacgctgaaaggaacattgcagtttatggtacagttgtgatttgctttcattctttgaacaactgatatttggaacaactaaatgcaggtaaaatgaccatgggaagtggttgtgatttgctttcattctttgaacaactgatatttggaacaacaaaaaatagaacaactacgcgaagtccttagttgtgatttgctttcattctttgaacaactgatatttggaacaactgtaattatttgccgccgctacccgcgctagttgtgatttgctttcattctttgaacaactgatatttggaacaacggtgtatgcgatttagatgcgtggtttaccgttgtgatttgctttcattctttgaacaactgatatttggaacaacgatactttcacggataagccgatttatgaagttgtgatttgctttcattctttgaacaactgatatttggaacaacgccgtacttcgccgggcggtcccattcaatgttgtgatttgctttcattctttgaacaactgatatttggaacaactgtaattcgtgttgccatagtagtaagatagttgtgatttgctttcattctttgaacaactgatatttggaacaacagcagaggctttaacgcattatggcgtattgttgtgatttgctttcattctttgaacaactgatatttggaacaacagaccacgttaccgatgtgagcgagaatgtgttgtgatttgctttcattctttgaacaactgatatttggaacaacggctttcccgcaatgccgctattattgggagttgtgatttgctttcattctttgaacaactgatatttggaacaaccaaacggtagctcatcctcggtaaatcggtgttgtgatttgctttcattctttgaacaactgatatttggaacaacggcaacgaggccgttatcgatgatgaggttgttgtgatttgctttcattctttgaacaactgatatttggaacaacatcaccagcagcaacgccgttaccaaggtgttgtgatttgctttcattctttgaacaactgatatttggaacaacgagggtgtgcgccagggcgatgatatctacgttgtgatttgctttcattctttgaacaactgatatttggaacaacctctacgagcatgggctatacctgatttgtgttgtgatttgctttcattctttgaacaactgatatttggaacaacataccctgtattaattgtctaaatatcagttcattgcgttcaaaaccaggattaaaaaaaccggttgctttggcttccggttttttaattttaaaacaattccaattgctgcggtgtgttgggcagctctttttcttccttgccataaaataattccatcatgccaaactgcttatcggtaatggtcatgatgcctacatgccctttaggcgggagtattttttttacgcgtttaatgtgtacatcggcgttttcgcggctgctgcaatgccgcaggtaaatggaaaattggaacatgccgaagccatctttcataatatccttacgaaagcggctggcgatctgcctgtcctttttggtttctgtaggcaggtcaaaaaatactaatacccacaaaatgcggtattcatttaagcgcatccattaaaaaggtaattcttcgtcttcatcctcactgcttgtcatattataaactccctcatcctcggctactaagcttataggcccctcttcatcaattttatacagtattccacgcttagtgctgaagtctttcattatcgggtacgtaatcttccttattttgccttcataacaccgcgctaaagaagcggtagtattttgtaccccaaccattaaagggctcctgcttttttcaaactgcacgtctaccgtggcaatagccaataattgcgacttgatggaagcacccagttctaaaaaattctcgccgttatcaattatccgcaaaacaatcagatctacatacgggcggtaaggctccataatgtcatcagccaggcaataagcattatatttattccggtggtggatgcccaaagtggggatgaggcccgagcaaaccagcccgcgtgccactatggccctcaatatggcgtagccgtaattcagcaggttgttaggcgggtcgccctcccggccccgaaagaacgctaccttttttgggaaaacatttttccaatagtaagccgctgcccgcccctcgtaattatcagggtcgccagaccgtacggactttgcccaatgcagcatattgtcataagcaacacccctgtctgccagtacagcggcctggtttaatattttagtttgtatggtttgctgccaaagctgcttttttaaaggttgcgaggcatctatctggtgcctaaagcgttcgctttgagtatggtgcccgtctataggcagcatcatgccggtggggtggtgggtatgatcgcaggtgataatggccgaattgttatacaacagcgcggctatgcagccgtgggtaatggtaatttgctgatgatccagcacaacaatccctatatcctcaataggtaccgatttcttactttctttttcgcccagcactttcaggtgcggaaggtctatcagtaactggccttcctttaagcttaggtaagccgggttactaaagtgaagcgtgcgttttatcatactggcccagtttaatcgtgataggcaaatggctacgggcggttgggggataccgcgccgccaaattggttgtaattggtatttagttacttaaccaaatatatgcctgggagcaacaagaaaaaaggggtgaaaacacggtattttttgggaggggaataattgtaccttgtttggctataaggacgaaaaggcgcttgcataaaaaaagacgagagttgccccccgccttaaatgttttcacaacggaataatccttattgtgatttgctttcattattccaaagtaaaaactttaatattacatttcctaattttaaccaatcacaaatgaaaacaattcttggcctcgatcttggcacaaattctattggctgggcgcttattcagcaggattttgaaaataaacaaggaaaaatattgggtttgggaagccgtatcatcccaatgtcgcaggatattttaggcgattttgataaaggggtatctgtttctcaaactaaagaacgcacccgcctaagaagcgttaggagattacgggagcgccatttgctgcgcagggaaaggttacacagggtaataaatgtgcttggtttgttaccgcagcattacgcagccaaaattgactttagcaaacgtttaggtaaatttttgccagaaacagaaacgaaatttgtttacgatgataacggagctttcatttttaaaaaatcgtttgaagaaatgttggctgattttaaaagccatcagcccgaattgctaaaccggaagaacagaaaaggcgacgatgccaaaataccatatgactggacagtttactatttgcggaaaaaagcgttaacagaaaagatagaaaatgaagaattggcctggttgcttttgcacttcaatcaaaagcggggatactaccaattgcgtggcgaagaagctgaagaaaaaccaaacaaactggaagaattctattcgctaagaatagctgaagttactgcggacgaaccgcagcgtggcagcgacaaaatatggtacaacctgattttagaaaatggctggatttaccgcagggaaagtaaacaaccattgtttgattggaaaggtaaagtgcgcgatttcattgtaacttcagatttgaacgatgatggcagcgtaagaaaagataaggagggtaatgagaaaaggagtttccgttctcccaaagaagatgactggaaattactcaagaaaaagacagagagcgaaatagagaagtcagataaaactgttggcgaatttatatatgatgcacttttacaaaaaccggatcagaagataagaggaaaactggtgcgtacgattgaaaggaagttttataaggaagaattaatacgccttttagcaaagcaaattgagttaaatacaagtttgcaggataataacatgtatgaaaaatgtgtagaagagttatacccgcacaatttgcagcatcaggctaccctgcttggaaaaggattcttgcatctttttgttgacgatattttatactatcaacgtcctttacgcagccagaaaggcaccatcagtaattgccctttggaatctcgctcttttatggtaaacggcattaaaaaaactgagccattaaagtgcatttcaaaatcacatcccctttatcaagaatttaggttatggcaatggataagtaacctgcgtatcattaataaagagaaggatatcgacgaaacagtgaaaaaccttcagttaaccgaaggtgtagaagcgctgtttgattttttgagccagcgaaaggaaatcgaccagaaagctttacttaaacattttaagctaaaagaaagcacttatcgatggaactatgtggaagataaaagctatccatgcaatgaaacgcatgtacagattgcggggcgtttggcaaaagtaacagatatatcacagggatttttgacaaaagaaaaggaagaaaaactgtggcacatcatttactcggtaactgataaaatagagtatgaaaaagcactgcggtcttttgctgcaaaaaacaatctcaatatcgaaagtttttatgacgcgttcaagaaattcccgccgttcccggctaactatggttcatattcagaaaaagcaatcaaaaagttattgccgttaatgcgaataggaaaatattgggactgggatagcattgatgccaaaacaaaagataggatagggaaatttatcaacgctgaatttgacgaagaaataaaagaaaaagttcgcgagaaaatagggaagcaagcattcacgaacgaaaatgattaccagggcttgcctgaatggctggcaaagtatgtggtttacgatcgtcattcagagcgaagcgaaacaggcaaatggaatactgttgctgatcttgaaggatatctgcaatcttttaggcaacattctttaaaaaaccccatagtagagcaggtgatgaccgaaacgcttagaaccgttaaggatatatggcaatgctatggaaacggtgcggagaatttttttgacgagatacatatagaactggggcgggaaatgaaaaatccggcagataaaaggaaaagccttactgagcaaataacaaagaatgagaataccaatttgcgtataaaggccatgttgatggaattgctaaataatggtgtagaaaatgtacgtcctcactcgcccatgcaacaggatatattgaaaatatacgaagacgcggttttgaatggtagtattgaaataccggaagatattgaaaagataagcaaactcgccctgccgacaaattcccaattacaacgctataaaatgtggctggatcaaaagtacaggtcgccatataccggagctgtcattccgctgaataagctttttacgccggcttatgaaattgagcatatcattccgcaaagccgctattacgacgatagctttaataataaagttatttgcgaagcagcggtaaataaattaaaagacaatcagaccgggttagaatttatccgtaatcattatggccaaattgttgaattggggatgggtatgaccgcaagaatattcactgaagtagagtacacggattttgtaaaacaacactacgctaaaagctattcgaagagaaataatctaatggccttagatgtacctgaaaaaatgattgagcggcagttgaatgatacgaggtacatcagtaagtttatcatgcaagccttatcaaacattgttcgtgctgaaaaagatgacgatggtgctaattcaaaaaatgtattggcaagcaacggtaagatcacatctgatttaaagcaggattggggaatggatgccatttggaatgaattagtgttgccacgttttgaaaggttgaatcaaataactaacagtacaaacttcacagcttataacgagaggtatcagaagcatttgccggttgtaccattagaactgcaaaaagggtatcaaaagaaacgcatcgatcatcgccatcacgctatggacgcgttgataattgcttgtgctacgcgcagccatattaattacatgaacaacaggcatgcattggacaaaaacaagtcggcggatgaaaagaaaaaggagcgttttgatctgaaagcaaaattatgtgataaaaagtacaacgatggctcaagtgagcactatgagtggatatttaaacagccttgggcaacttttgtaccggatgccaaagagaaactacagcgagtggtagtgagttttaaacaaaacctgcgtgtaattaataaaacggtaaaccagcatagtattttccgagatgggaaaaaggtgctttttaaacaagaaaagggggaaagctgggcaattcgaaaatcactacatacgcctatgccttacggaaagaaagattacgaatttgaagttttgaaattatcagaaagtttagggaaggcccatttgatcattgatgataatattaaagaagtcgttaaaaaaatattaaaccagttcaataataaaatatcagatgcccaaaagtttataaaatctaatccaataaaagatcgacacggtaacgacgttcttgataccgcttttaaaattaacatagaaaaatttagaaggcgtcaaccgataacgaaattgtcaaaccgaggacagggcggcctaaaaacaattgatgatgtgactaaatttattaataaggttgctgattacaaacttcagcaggatttattcactcacttaaaggacaatcaaaacgacatagacaaagcatttagcgccgaagcaattgaaacctttaaccaaaaaagggaaatgcctgtgtataaattaccaattgccgaaagtggcacagggcggtttgtcgttgggcaaaaacatactacaaagcataaatgggttgaagccgatacaggcacaaatcttttttttgcagtttatgccgatcctaaaggcaagcgtagctatgaaacgattccgctaaatatcgttattgaacggcagaagcaaggggttgttccagtgccggaaattaatggggccgggcatgatttgttaatgtatttgtcgccaaatgatttggtgtttattcccgcttttgaggatgacggtaatattgagggtgctataagttttacaaacaggggtgaaaaaatatataaaatggttagctgtacaaccaacagatgcttttttataaggcaggatatcgccactccgattgtaaataaagtagagttttccgcattgaacaaaatggaaagatctatcgacgggaaaatgataaaagactgttgtattaagcttaaagtggatagattgggaaatgttagtttggcgaccttataagggaatagatgccaattcattaacggcttctttagcttgagcctgcggttggtattatcacaaaaccgcccgtaggcaaggtagcgttcatgcatgtctggttaacttcgcatttttcacccattcaaaagcatcacccggctacaagcggggacgcgatgcggcagcgattaaaaaaaaatcgcattccaccttcttcgcgttagcgattgcagcggaaaacccacagccgcgggcgaggatgtggggcggcaagggcgaggatttgtagcgtaaagcgcgggccgaaggcaacgcccataatattggctactttgcatgcgagccacaagtctgcggacgcttacggcagcgggcatgcatagtcgcgaactttgcatcaacaacaagatatctcctcgctatcgctcgttcgataggtcaagtttttattttttccctttgtcatcctgagcgatagcgaaggatcttgttagatgtgcaaagcggtcatgcaaggccggtatgcatagtcgcgaactttgcatcaacaacaaggtatctcctcgctatcgctcgttcgatatgacaatttttttagtatgtcattccgagggaagcgcagcgacgaggaatcttgttagttgtgcaaagcggtcatgcaaggccggcatgcatagtggtgagccttgcatcaataacaagatatctcctcgctatcgctcgttcgatatgacaatttttttagtatgtcattccgagggaagcgcagcgacgaggaatcttgttagatgtgcaaagcggtcatgcaaggccggtatgcatagtcgcgaactttgcatcaacaacaaggtatctcctcgctatcgctcgttcgataggtcaatttttttagtatgtcattccgagggaagcgcagcgacgaggaatcttgttagttgtgcaaagcggtcatgcatagtcgcgaactttgcatcaccaacaagatatctcctcgctatcgctcgttcgatatgacaagtttttagtgtagaccgttgcatcaacaacaagatatctcctcgctatcgcttgttcgatatgacaagtttttatttttgttaatcgtcgttgatttctttattcaggaatcgccactcggggtttgttgatgctatgagcgcatctttcttttctcttcgccacttttttatttgcttctcccgttctattgcatgttctatatgagtgtagtgttcataataaactaaataatagcaatggtattttccggtaaatgaagatttagcgtctgtattatggcgatgctcgtcaagccttcttgttaaatcattagtgaccccaacgtatagtacgcttttatcacgatttgtggttatgtacacgtaaaaattataattccacatgttgcgtttttggtttagattcctttctgcaaaatagcatacttttagaacataagcaatccagaatatagtcagaaagaagcattaaccactttgtcattccgagggaagcgaagcgacgaggaaccttgttagatgtgcaaagcagtcatgcaaagcagtcatgcaaagcagatgtgcatagtggcgagcattacatcaataacaagatatctcctcgctatcgctcgttcgataggtcaagttttttagtatgtcattccgagggaagcgcagcgacgaggaatcttgttagatgtgcaaagcggtcatgcaaggccggcatgcatagtcgcgaactttgcatcaacaacaagatatctcctcgctatcgctcgttcgataggtcaaattttttatttgaattacctggaacgtttgaataaatacgctaacgccccggtactccagagggcccataggatgagtacgggttggaaaaacagccgggttaacctggctttatcggtatcgagcccgaatgccgaggtatgattgaggtattgcgctatgttgccggggaagatcaatacataaaatatggccagcaccaggccaacccgtatgcgttgttgtttccaaaaaatcatgctcaggcccagtgccagttctacaatgccggataggatcaccaccaggtccttattcatgggtagccagttaggtacctgcgcctggaaagcctcccgctggaaggtaacatgcccaatagcagccagtaccataaacgtacctaaaagtattctcaggattttttggagcagatttgtttggttgtgtggtgtcatggtaataaaatttactggcagcttaaatccaaaccgtatggataatttgggcttcgggtggtaaggtacgtcttctttttgattgcgagcggcttgcagggtgttctccgtcggtgagattagcccgcaggtcgattagttattgatgcccgtctatcggttttttttctgtgtttaaatttgcttttaatttgtattgtcggcttctgcataacaaacgtatttgaaagcagtttgccgtacaaacaataattaaccaaaagcaaacgtctttactttaacttcgctacatattatatgaaattcctgaaaatacttccttccgcattgttattactgctggtattaagcaccgcggccaatacgccacccaaagccaataaggtatatgttggcaattatgaaaatgtactgggtacatccttagaaattaaaattgcagctaccaataacaccaatgccggtaaagcagaagatgctgcactggcagagatagaccggctgaacaaaatattgagcggttatgatgccggcagcgagtttagccaatggatgaaagcgggcaataaagccaccgtagtatcgccccaactttttgaagtgctatcgctttttgagcaatggcgcagtaaaagtaatggcgcgctggatgcttcggcagaaacgatcaataaagtatggcgcagtgctgcggggcaaaacaggctgccctcaacaaccgaaattgcagctgcgctcaatctggtacaccagcaacattatattttgaacgcgcaaaaccacaccgcgcagcgcattagcaatgcacctttaatactcaactcattcgctaaaagctatattatggataaggctgccacggctgcgctaaaagcgccgggagtaagcggtgtattggtaaacattggcggcgatatattggcccgcggccaacataccgagcaaatactggtgagtaaccccaaagccgacgccgaaaatgatgcgccgatagcccgcgtgcagatcactaacaaaaccattgccaccagcggcaattaccgccggggcgaattgatagccggtaaatggtactcgcatattgttgacccgcgcaccgggcagcccgcaggcggcgtaataagcgccacagttgttgcggataatgctacagatgcaggtgccttggccactgcgttgaatgtactgagtcccgaagaagggaggcagttggttgcatcggtacccggtgccgaatttatgctggtaactgccgatggcaggcaattaaaaagcgatggctggaaggatatggaagttgccctgccaaaaacgcaggctgttataccagcggttaatgtaaaggataaattatgggatgtaaactacgagttggccatcaatatagaactggccactattgaaggtatgcgggtgcaccgcccttttgtggctgtttgggtagttgatgccaataaaaagcctgtgaggcaaatagccttgtggtacaataagccacgctatctgcacgatatgcgttcatggtatgatacctattacgatagtttcgctgccgctgagggtaatatcagctcaaccaccagcgcaacgcggtcgccgggcaagtacacgcttaaatgggatggtaaagatgataaaggcaatttggtaaagctaggcacttatacggtttatatagaggtggcgcgcgaacacggtacctaccagctcataaaccaggagcttaccttcaaatcagcacaacacatcgaacttccggccaataccgaagttgcttccgcatctttagactaccgtaaaaaaacgaatgacaattaatacagcgcctcagcaaaaaccggcaaaacagccaaagaaaccaaagccggcctgggaaaaacaaacggcttcggtatcgcgctggctgcacatttatctttcgatgctttgttttatcgtggtgttgttttttgcggtaactggtatcaccttaaaccatgcagaatggttcgacggtaaagaggtagaaaataagctaacaggcactgtgccccttgcatgggtaaatacgcccgatactacgctcatcaggaaaatggagattgtggagttgctgcgtaaaaagtacagtgtaaaaggctacgtaagcgatttcctgatagaggataaccgctgttcactttcgtttaaaggccccggctatagcgctgatgtttttattgatcgtaacgacggcaaatttaaactcaccgaactcaagcttgggctagtggccgtactaaacgatctgcacaaaggccgcgacaccggcaaaggctggagctggtttatagacgcatcggcggggtttttaaccctggtatccttaaccgggctggtgatgttgttttttcttaaaaaaaggcggttaagcggcctgctggtgcttattatcggcggtgttgctgcctatattatttactgcatttgggtgccttaatgcgttattgattttaaccggccctgtggcattgcgcttgcgcgtagcgctgcaagaaaagctttctttctgctgtctcaaatctcatatctcaaatctatgttctcctcagctgcatatctacacgcaatattatttcgcgggagtaatgttttgcgtcaaatgcaaatccaaatatctcaattctaattttatagctaacttagcgcacattacacataacaatgaaaagagataaattaatatttaaattactggacgaggaacagcaacgccaggaagaaggcatagagctgatcgcatcagaaaactttgtaagcaagcaggtaatggaagctgcaggctctgtggcaaccaataaatatgccgaaggcctgccgggcaaacgctactacggcggctgcgaggtggttgacgagattgagactatagccattgagcgtgccaagcaattgtttaatgccgagtgggcaaacgtgcagccgcatagcggcgcgcaggccaacgcagcggttatgctggctgttttaaatccgggcgataaaatattagggttcgatctttcacatggcggccacttaacacatggttcggctgtaaacttttcgggcaaattatacgagcctcatttttatggggtaaaaaaagataccggttatgtagattacgagcagctgaaagaagttgccctgcgcgaaaaaccgaaactgatcatctgcggtgcttcggcttattcgcgcgattgggactacgagtttatccgcgccgttgccgatgaggttggcgccttggtgctggccgatatttcgcacccggcaggcttaattgcccgcggtttacttaccgatccgctgccgcattgccatattgttactactactacgcacaaaacgctgcgtggtccgcgtggtggtctgatcctgttgggtaaagattttgagaacccatggggcttaaaaacaccaaagggcgaggtacggatgatgtcggccttgttggatatggctgtttttccgggtacgcagggtggtccgctggagcatatcatcgccgctaaggccattgcttttggcgaggctttaagcgatagctacatgaaatacattgtgcaggtgaaacagaacgctgcggctatggcaaaggcgtttgtagacagagggtatgatatcatttcgggcggtaccgataaccacctgatgctgattgatctgcgcaacaagaacatcagcggtaaagctgccgaaaaagcactggtaagtgccgatatcacggccaacaaaaacatggttccttatgatgataaatcgccatttgtaacctcgggcatccgtgtgggtactgcggctatcactacccgtggtttaaaagagaaacacatggataccattgttgaactaatagatatggtaattaacgaccccgaaaacgaaacaactttaaagaaagtgcgtaaaagggtgcacaagctaatggaagaccaccctctataccgggataaacacctggcgtaataaatgaataccgagcatcataccccttcggagctggaaagcaggcgtgtaagcgctttgctttcttatgatatcttagataccctgcccgagaaggagtatgatgctattacacgcctggcttcctatatttgccaggtacccatcgcctttatttcttttatcgacgattcgcggcagtggatgaaatcgtccatcgggctggatatttctgaaatggccattgaggataccttttgccagtacacccttagacagggcgaactggttgccattccggatgtttcaaaagaagaagtttttcgcgatcatgagatggttaccggcgagtttgggctacgtttttacgccagcgctccgctgatagaccccgacggataccgcataggtaccctctgcgtgctggataaaaacccccatgatataaccgacgagcagcaggatgcccttaaagtattggccagcgaggtaataagtcacctggtgctgcgcaagcaaaagaaagcgctggagcaaagcctgcaggtacacaaagatttttatacgctttttaataattcatcagagatacatatgattgccggggccgattctaatatcgagctcatcaacaactgtatcctggatattttgggctatacacaggaagaagcggttggccgcagtttatggagctttgtggccgggcaaaaccgcgagcagtatgtgcctgttattgaaaaagcaattgctacagaaaaacccttcgaaatagaaacccaaacggtaacccgtacgggcgaaattaaatggttaagctggacagccgtacacaaagccggcaaatggtattgcagcggtcgcgatatgaccctgcagaaacaactggtaacggaaacggagcagctatcgctggtggccagcaaaataaagaacggcgtagtgataagcgatgccaacgataatgttgtttggaccaacgccgctttcgaaaaaattaccggttacagccagcacgatgtggagggcaagtttttgggcgaagttttaaagggcaagcctaaggatgaggcggccgagttggaactgctggatgcggtaaacaaccggaggtcgtatgaggtggagttatcaatgttcactaaggaagggacacccatttggatatcggtaaccaacaccatcatcttcgccaacgatggctcgatagagaaatctatccgcattattattgatataaccttgcgcaaacgggccgagcaggatgtggagatactttcgttcgcggcacgtaaatcgccaagcggtatcatgatacgcgatgccaaagggaagatcatctggatgaacgaatcgcaggagcgcattattggctacacgctggacgaattgaaagggcaaaccgtaggcactaagctggtaggcgaagaaaccgaccaaacggtttttcaggaggcggtgcagaaagtaaaagaaaacaagccttacgagattgagataaaaatatacaagaaagatggcagtaccgcctgggtgttcatatccaacagtcccttatttaacgaggtgggcagcgtggagcggcagataggcgtaatggtggatatcagcagccgcaaaaaggccgaagaagaacttaccatgctatcgttggtggccagcaaaactaccagtggcgtagtcatcaacaacagcgaggggaaagtggagtgggtgaacgatgcctttgagtatattacgggctatacactggatgatgtaaaagataagcacctgggcgattcgttgaagggtgagcttaccgatgtagcgatcataaccaaggcgcgcgaattatcagaaaagaagcaatctttcgaggtggatctgcttatttaccgtaaggatggcaggccggtgtggatatcggtcatcaattcggttattactgatgatgcagggaaggttgataagtacattgaagtaattattgatatcaccgccaaaaagaaagccgagcaggaactgatagccgccaaagaagaggccctgcaattaagtcgcgctaaggacatgttcataggcgtaatgagccatgagatacgcacgccactgaatgccgtgataggcatgagccatttgctgctggatgataacccgctggattcacaaaaggagaacctgaacatcctcaaattctcggcagagaacctgatgaccctgataaacgacgtgcttgattttaccaagatagaaacaggcaacgtagtgctggaacttgcccgggtagacatacgcgacatgatacagggtgttaccgcctctatgcaatacaaagtgctggaaaaaggtatttacctgaagagcgaagtggaagaggctatacctgaactggtgcttggcgacagggcccgtttggtgcagattttactgaacctggtgagcaatgccgttaaatttacctccacaggcggcgtaactatcgatttaaaggttattgaggaaaataataaatctgtaaggctgcgttttgccgtatctgataccggaattggtattgcaaaaaacaaattaaataccatctttgaatcctttaagcaagctgaagataataccacccgagaatatggcggcacaggtctggggttggcaatcagcaaacgcctgatagagctgcacgactcgcggataaatgttgaaagcacgccggggcagggttctacattttggtttacaataactttcaaaaagatagaagaccatattaaaaacaacgataataaagtggaaacagggctaaatatcaatgtgctggtggttgatgataaccagataaacaggttgctgataaacaaagtactcaaaaaatggggcgcaactgccgattttgcagagaacggtcaggaagccatagacaagctggagcagcacaagaactttgatgtagtactgatggatattcacatgcctattatgggcggcctggaagcaaccggcgttatccgctcgaaaactgaaccatatttccagaacttgcccatcattgcacttactgcttctatgctgaacaatcagatgggtgagatagaaggcgcgggaatgaatgattatatcctgaaaccctttgacccgacaactctgcacatgaaactgagtaagtatcagaaacagtaggttggtgagcagtgaatagggcgtggtgagcggttggaatatcgaacactcgatgctgaagtttggctgcggttcaaaataacaccaggcgttccaaagggacgcttttttgtttatgcagattttgctatccttgagatgtgtcgatggcacctgggcgtttattcagaagcacactggcactaatagacatgcaaatcaatcggtgaaatcaatcttccaaatcggtgtaatcctataccgcataagcgatagtagcgatactcagcttcagccccggtactttaagcaattctatgccgcaggcttccagcgtagagccggtggtaacaatgtcatctaccaacaggatatgcttgtttgctaatctccccgggttggcgatagcgaaaacctcctgcatgttctcgaacctggcaaagcgcgatttgtgcgtttgcgttttggtggccaccgtacggataaggttatccaattctactttggcgttcagcttttcggccaatccctcggcaaagcaggcactttgattgtagccacgctcttttagccgttttttgtgcagcggtactgggataatataatctaccgttttgaatgtttcgttctctgccagctggctgcctgcaattttgcccattatattgcctattcgatgcatgccatcatacttaaaatggtgcatca

SEQ ID NO: 1157 - DNA, 24491 bp, synthetic construct
  misc_feature 1..24491: note = Synthetic
  source 1..24491: mol_type = other DNA
taagatacctaaccgccattaaaagcgaaaagagacctaagaagttctgtcgctttaaaaaatatggcatccgctacatcgattataaagatgtggagtttctaaaaagatttttaaacgaacaaggcaaattattacctcgccgactttctggtaattctttaaaataccaacgaaaagtaagcgaagctgtaaaaaaagcccgtcaagtggcattattgccttatgtaaccgatttattaaagtaatgctcctctaatctcgaaaattaatttcgggtgacagtcaaagccgactggggcagtaaaactaaaagttatggaaattatattaattaaagatgtagataatttaggtggtattaacgaggttgtaaaagtaaaaaatggttatgctcgcaactttctttttcctaaaaaacttgccgtagaagcaagtaaaagcaacttgaagcagttagaagaaagattgaaacagcttaagaaaaaagaagaaataatgttggccgaaatcagtagcgtaatagcgaagttgattgaatcccctctgaaaataaatgcaaaatctggtacgagtggtaaaatttttggaagtgtaacaactttacaaataagccgtgcaattagcgaacaaagaggatttcaaattgatcgtaaaaaaataaccatcacagacgaagtgaaagaaattggatcttataaagctcatatcgattttggtaataaccaaactacttctgttgattttgaagtaataagcgaataacttacgacaactttttaagctaaaaacctctcaagaatgagaggtttttttcattccaataactacaactattctgtaaactacataccaagtagaaatttttgactaaattcatcaaaatgcttagctttgcatcgtatttggtgctctttacagtctcacaagatctttggactttttatttttaagtaaatgttcatagcatactgtctactgtcgatcacttattttgttttattaaattctcaacaatgaacatttacgcaggaaatctaagctggaacctgaaagatcaggatttgcaaaatttatttgcacagcatggcgaagtaacttcagccaaaattgttaccgacaaattcacaggccgcagcaaagggtttggttttgttgaaatggcaaccgcagaacaagctaacgcagcaattgctgctttgaacggaactgagcttgacggtcgcaacatcgtagttaacgaaagtcgtcccaaagaagaaggtggtgatggctttaaaaaacgcagcttcggtggcaacagcggtggtggcggctttaaaaaaggcggctacaacaaaggcggcggtggcggctacggtggtggtcgtgatcgcggtggctacaacagcggcggatattaatttttattaatacaactgttttgaaggagtccgacaatgtcggacttttttttatgctttaatagcaaaacaaatatctcccttctaatatttctatttcaagtttatcggcttcataatattccccatccaaatgcgcttcgataattgtattactttgaatgttaatctttgaaatcttcctgctttcaacaatcgaaagctgcatatgttttcctttttctataacgggcaaccaacgtaatctttttagcgggtgcaattttttaatgattaccacttccaaaagaccgtcggttattgtagcatttggtgcaatataaaagccgccacctgctctttttccattcatcacactaattaaaaaataggtattttcgaattgttcattttcaattttaacctgataagtccgagatcgataaaaaaatattttctgtagaatggccaacatgaatgaagtttttcccggtaatttttttttacccgtaaggctttttgcaacagcaccttcgaagccaatgcctaccccattgataaaatacttatcgttgcatctaccgccatcaatagttcgtggagttgcctttaagactaattccaattgatcctcaaaactaatctttccataaagtagccaatggaaatcattacctgtgcctccgttaaaaacagccagtggtaattgaatattggaatattggtttacaaaataattcaaggtaccatcgccaccaacgataaatatattcgtaattccttcaaatgttttcggccaatctccgttgaataatgtatgaataatttttttttgattcagtacttcagaaattttattcgccaatgtaaccgccctaccggagccagccaatctattacaaacaatagcaatatgtttttctgaatgcattaatttctgatttcaaaaattagtatttacaatgcttttagtcttcctgcaatataacttaattacccaaatcgttttctttaacttcgcactttcatgaaagaaaaaatactcattcttgattttggttcgcagtatactcaactcattgctcgggttgttcgagaagccaatgtgtattgtgaaattgttccttataataaaaactttgaatacgattcttcgttgaaaggaattatactcagtggttctcctttttcagtaaacgatcaaaatgcacccgctgttaatatcgcatttatgatcagccgcttacctgtgctcggagtttgttttggagcacaattaactgcaaaacaatttggtggtcgagttgaaaaaagcagcaagcgagaatatggaagagcttttctcaaaaaaaataaagaagatatattatttaaaggagtatcaaataattctcaagtgtggatgagtcacgcagattctgtattagaattaccccccgattttgagctgcttgcaacaactgaaaatattcccattgctgcttttaaaaaatgcggtaaagaatcaaaccctctttatggtctacaatttcatcctgaagtgtatcatagtgttgatggtaaaaaaataatacaaaattttttagttgctatttgtggttgttcacaaagttggacaccggctcattttatttccgacaccttagagatgttaaaaaaacaaattggcaatagaaaagtaattatggctttgagtggaggtgttgattcaaccgtagcggccacattaattcatcgagccatcggagatcagttgttcggaatatttgtagataatggcttgcttaggaaaaatgagtttgaagaagtgttggctacttacgatcaactagcattgaatgtaaccggtatcaatgccaaagaaaaattttataccgctttagctggaaaatctgatcctgaagaaaaaagaaaaataatcggtcgactgtttattgaagtatttcaggaacaagctaaaaaatttgaaggaattgaattattgggacaaggaactatttatcccgatgtaattgaaagtatttcagttcatgggcccgctgctactataaaatctcaccacaatgtgggcggacttcctgaacaaatgcatcttgaattagtagagccattacgttatttattcaaagacgaagtaagaaaagtgggattagaattaggaattcctaccgaacttataaatcgccatccctttcccggccctggtttagccattcgtattttgggtgaaataaatgaagaaaaaataattttattgcaagaggctgatgccatttttattaatgctctaaagaaacataatctatacgaaaaaatttggcaggccggtgctattcttttaccagtaaaaagtgtgggtgttatgggcgatgaaagaacttatgaatttacgttagcacttagggccgtaaccagcgttgatggaatgacggcagattgggcacaagtgccttttgattttttagccaatgtttccaacgaaatcatcaatcaggtaaaaggaatcaatcgagttgtttacgatattagcagcaagcctcccgcaaccattgaatgggaataattaatttctgaaactgcactttaaataaattgcgtcatgcaaaagtgtttcattttatttttctttgtgttcattagttgtaatcaactagtacaagctcagaaaattgaaccgttttcaaaaacaaagattgccatttttgttccgctatatttagattccgcatttgacgcatctgatcattatcggtacgacagtatttttccaaagtttattaaccccggacttgaattttacgaaggaattcaactagccatcgattcgttaagcagagaaaatattccgtttgaagtatttgtgtttgatacaagatcgaaacaaaaaacaattgcacaacaattaaccaattcggttttaaaagatttacaattaataatcgcacatgcttcaatttcggaaagccaacaaattgcaacagttgctaaaagcaaacagattccatttataaatgtcaaccttccgaatgatgcaaatgttagtaataatccatggttcgtacttttaaacccttcacttaaaacacatgtggaaggaatttgtacttttataaagaaagagtttccaactaaaacaattcttgttttcagaaaaaaaggacaaaccgaagaattgatttcctcttatttagcaaactacaatcaactgaagacagatggtattttaaaatttaaatttgttgatttatctgaaaagtacaccattgaaaatatcacgaaacaacttgatagtaatggacaaaatatttgcttagttgctagtcttgacgatttttttagccaacatcttacttttcaattggcttcaataagtgatttgtatccattgacggtttttgggatgcccacttttcattcattcagcaaagaatttgtggcttccggtttcaaaacaatgacactttattatgggcaaccattttattttgataagtcaaatagtttgattcaaagtattaccaatcagtttcaactttctatgtatgctcgtccgagcgatatgattttccgtggttttgaggtaatgttaaagtatgcttacttgcttcgtcaatataaaacagacctttcttcgcacttaacaacaagcaattttaatgtatttacaaatttcgatattcatcctgtcgtaaatcgaaaaacattagtgttggactattttgaaaacaagaaaatatattttataaaatggcaggatggaaatattaatgccgtttattaattcattttctttttcatagtacttacttgctgatggaggttagttacaatattagccaactgattgatatcccatctttgttgggagccggctctactaataactactgctgcttgccaaagctccatcacttcttctgtgttaatagtgtacgtatgataagccggattatcgctaattaatgacaacttatttttaatgcgattgtttttttctattcgcttataaacaattccgtctgacttagaaacaacaatatacgtatggttcatttttgcatcctcaatgctttctaacttttcacaaacgatgatagagccactcgtagtgggtaacatagaatcgcccatgatttcaaaggctcgataatttccaccggtaagcattggaagtgtaaacgtatttaactcatcaatataatcaggatcggcaaaaccatttaaatatcctgccgctgcttttaccggaacaaaagggatgtcgggacgtccacccgctaatttcaaacttctgcgttttgccaaataatttcctttattgtcacttaaatctgtacgaagtatttcatccatggaaagtttgaaaatgtcgcagactgcttccaaaatatcaattcggggcttggctctttcttcttcgtacgctccaattagtgattgcttaatacgaagtttattggcaaattcttgttgagtccatccgcgcaacttgcgcaaatatttcatgttttgattggcaaatgacatataatactaattcgtttagctgcaaattactaattattttagattttaaaaatatttttttacttcctgttggaatgcccgaaaaaagaaatgatttttgttgtagcaaaaaatttatggcaaaaaggaaaaaagaaaaaccggttatacttattacaaatgatgatggcgttacagcaccaggaattttgaatttaattgatgctgtaaaagatttaggaaaaattattgtagtggctcccgataaacctcagtcgggaatggggcacgctattactattggatctccattacggcttcaaaaagtaaaaatacccggtattgaagatgcttattcttgtacaggtacgccggtagattgtgtaaaattggctgttgataaagtattacacagaaagcccgatttatgccttagtggaattaaccacggtgccaatcacagtattaatgtaatttattccggaaccatgtcagctgctgtagaagccgctatagaaagtattccgtctgtaggattttcacttttagattttagtttagatgctgattttagtggcgctaaaaaatatgctcgaatgattgttgaaaaattacttcaatcaaaactagacaagcacatggttttaaacgttaattttccggctattccgcaagaacttattaaaggaataaaaatttgccgacaagcgtatgcaaaatatgttgaagattttgtggagcgacaagatccgcacggcaaaaaatattattggttgaccggtgaatttgtaaattttgacaaaggaaaagataccgacgtgtgggctttggccaataattatgtaagtgttgtccctgtgcaatttgatttgacgaattatgaattaaaaaataaacttgaaaaaacttggtaatgtttttatttaaaaaagataatcttacgatgggtttgttattgggtttgtttggaccgattgtcgggttactcgtcatttatttttttaaattttctttcctaaattttagcactttcttagatgaattcattcacaccaacgcattgattacttcgattggttcactttgcctgttggccaatgcggtattatttactatttatatcaatactcatcgcgataataccgccaaaggaatttttgctactacacttatttacggaattggtattttgttactcaagattttttaaatgaaatactacatcatagcaggagaagccagtggcgatttgcacggaagcaatttaatcaaagaaataaaaaagctggatcccaaagcaactatccgttgttggggtggcgatgaaatgcaacaagccggtggcgaattggtgattcactatcgccatattgcttttatgggttttgtagaagtgttacataatttgtctaaaattataaacaatcttaaattttgcaaacaagatattgaactcgttcatcccgatgcgttgatattaattgattatcccggttttaatttacgcattgccaaatgggcaaaacaaaaaggcataaaggttatctattatatttctccgcaagtttgggcttggaaagaaaacagagtaaagatgatgaagaaatgtattgataaaatgctggtgattctaccttttgaaaaagaattctatgaaaaaaattggagttggaatgttgagtatgttgggcatccactgatagaagtaattgaaaattacaaagcacaaaacagcttagtatccttatcacaaaaaccaatcattgcattactacctggaagtagaaaacaagaaattttaaaaaaacttccggttatgctgaaagccagtacagcatttcccgattatcaatttattgtggcaaaagccccgggcattgaagacagtttttataatgtgttgctgaaggattattcgaatgtgagctttgtaactaatcaaacttataatttagtaatgcaagcaaaagcggcattggttacttcgggaacggcaacactagaaacagcattgtttggtattccgcaagtggtttgttacaaaggttcgacactctcttatttaattgcaaaacagattattaaaataaaatttatttctctcgttaatcttatgttggacaaacctgtagttaaagaacttattcaggatgaaatgaatccagaaaatttaaaattggaattaggtaaaattttgcaagatgaatctacaatcgcaactattaaaactgactatgccgatttacaaaaaattctttctatcggcggtaacgcttctgaaaatgcagctatttctattgtaaattttcttagatgaataaaacaacttaacgtttcatgtttttttcatagagggcaataaactcctttgtcgacacttttccggcaagttctccaattaatttgaatggaatttgatccatttttttaaatcgaatacagcttttccccatgtccaattttcccgaaacctgttttgcaaattcttttgtaaaccagtttagtaattctggcatcatataaacggcaatagaataaacagccacaaaatgtttttgtgatgcaaagcccataaatggaagcgggagttttggattgcaatgatacccttttggataaatggaatgcggtaccacatagcctatcatgccgtagctaatagattcttgaaaacctttgggaatattttttttgatttctttccgcaattgtatcaaagcagtttttctatctgcaggcaattcgtttaggtaatcttttatagtagtagcttttgattgcacaatttttaaattatgagtttatcaaatttttaatgctgccatttttattgcgtaaatcaattccgccttccaaaatacttttcaaattggtcatataaaataaccatcccgtcatacaaccaatatgaaagtgggtcattcctttttcatccgttgggatattttgttgaaacatttcacaaatagtttcgttttcttcgctataaatttttatggtgcaaatcattccctcggcgccttcttgtccaaatgaaaattttaaaaaatcttttccattggcctctaatacagttcctttttcctgtgtactgtcgggccatccatgccaacgccaacaaaattcatctccaacatcaatgagttcgtttgcagttcttttatttccgtcagaatttgaataggttgccattcttaaaaaccattgctccaatcctgcagtggtggcccacatggtataaattttttccaccgaagaatttattgtgattctttttgtaaacgatgtccaatcgtaattcataaaaaatagttattgcggaatagaatgaagcgccactctatttccttctgtgtctttaaaaaccgccatatgtccgtgctcgggcgaaatcattgtttttggaacaagaatttctcctccagcttcaagtattctgtccaatataatttgtacatccggattggcatttaaataaaccaaaggcccatctgttgttgatggtttataaaatccttctgctttacacaatgctccaccaattcccattttatcatccaagggaaataaagacatacttacattcggaaggttcaacggaattaactgaaattgaaagattgactcataaaatgttgttgctcgttccatgtctgttaccggaatttctacccaactaattgcatttttcatttttgtaaatttatttaccttccattcttaaagttagaaaaataaattgaaacgcctatttttgcggcccttgggggtttagctcagttggctagagcgtttgcatggcatgcaaaaggtcaccggttcgactccggtaacctccacccaaaagtctcactacaggtggggcttttttatgtgatgtagctaaatagaacccccgacttgtacaggtcattcattagctcgaattggattggaaaagaattggtttacccccccccgataagtagtacgtttttttatagataaactatttacctttcttgttgaagcaaaaaagaaagcgagagattgctctcccgctttaaatgttttcacaacggaataatccttattgtgatttgctttcgcaataaagatataaaaaaaaaattatgaacaaaaatattttaggactggatttgggaacaaactcaatcggttgggctttggttcagcaagattttgaaaataaaaaaggtgaaatacttggaatgggaagtcggattatcccgatgagccaagacgtcttaggcgaatttgacaaaggaatttccgtttctcaaacagctgaaagaacacgttacagaagcacacgccgcttgcgtgaacgccatttgctacgtcgtgaacgcttgcatagaatattaaatgttttagaatttttacccgagcattatgctaaagaaattgattttgaaaaaagattaggaaaattttttgcagaaaaagaaccaaaaatagcttatcacaacaccgattttattttcaaaaattcgtttgaaggaatgctaaatgatttcaaaaagcatcagcctgaattagtaaaccgaaaaaataaaaaaggtgcagatgccaaaataccttacgattggacaatttattatttgcgtaaaaaagcacttacggaaaaaatagaaaaaaaagaattagcatggctgttgcttaattttaatcaaaagcgaggttattatcagttacgtggtgaagaagatgaaaattcagccgacaaaatagaatatgtagtcttactgaaagtaatgcaaatagaaaaaggtgaacaagacaaaaagaacgacaagaaaaattggtacaatatcaccttagggaatggttgggtatattcagctacattttctacagaaccacaatggctaaatactgaaaaagaatttttggtaaccgaagaattagatgccgacggaaacataaaaattgtaaaggataagaaaacggacaaagaaggaaaagaaaaacggaaaataacacctttgccaacgtttgaagaaattgatttgatgagcaaaaaagaccaagataaaatttacagaaaaataaaagccaaaacagaaatcacaattagcaatagcggtaaaaccgtaggtacatatatttacgacactttattgcaaaaaccaaatcaaaaaataaggggaaaattggttcgtaccattgagcgcaaattttataaagacgaactaaaccaaattttagaaaagcaaaaagaatttcacgcagaactaaagaatgaaaatttgtttaacgattgtgtacgagagctgtatcgcagcaacaaagcacaccaaacagttttaagcaaaaaagattttgttcatctttttctaaacgatattattttttaccaacgttcgcttaaaagtaaaaaatcttcaattagcaattgcacttttgaatttcgtaaatacaaagacgaaaacggcaaggagcaaattaccccgttaaaagcagtttcaaaatcgcaccccctgtaccaagaatacagagtttggcaatggttgtacaatttaagtatttacaaaaaagaagatgaaacgaacgtaacgaaagattttttatattcaacagaagattacgaaaaactatttgcgtttttaatgcttcaaaaagaagttgaccataaagacattatcggatattttttgaaacagaaagacgataaattaaaaggtaaagcactaaacactgagattgctaaataccgatggaattacgtttacaacgcagaaaaagatgaatctaaaccttacccctgcaacgaaacaggttacgaaatacgcagacgtttagaaaaaattgaaaatgtatctactgattttttaacatctgaaatattgcaagcattatggcatattatttattctgttaaagacaaaatagaatttgaaaaagcgctaagttcatttgcaaaaaaacacaagatagatgagaatagttttgtagaatcctttaaaaaaattaaaccttttgataacgattacggcagctattcactaaaggcaataaaaaaattattgcctttagttcgattaggaaaatactggaaatgggaagcgattgatgacaaaaccaaaaacagaattagcaaaatcattacgggtgagtttgatgaaaatattaaaaatcatgtgcgagaaaaagcaatacagcttacatcagaaaacagttttcagggtttacaactttggttggcaagttatgttgtttacgaccgacattcagaggcagccctcgcaggaaaatgggacacggttgccgatttagaaaagtatttggaagaatttaaacaacactccttacgaaatccaatagtagagcaagttgtaactgaaaccttacgtgtggtaaaagacatttggaaaaaatacggaaactgtgcaaaagatttctttgatgaaattcatatcgaattaggcagagaaatgaaaaacacagcagaagaccgtgaacaaattaccaatcaaataaatgataatgaaaacaccaacatcagaataaagttactgttagtggaattgttaaacgatcaaaatgcagaaaatgttcgacctcattcgccttctcaacaagaaattttaaaaatatatgaagacggcgttttaaattctggtgttgaaataccaaatgaagtttctgatattttgaaaaaatttaaagaaactgatttaaaaaagcaaccaacatcttcagaagtaaatcgatacaaattgtggctagagcaaaaatatcgttcgccatatacaggtgaaataattccattaaacaaattgtttacttccaaatacgaaatagaacacattattccacaaagtcgcttttttgataacggtttaagcaacaaagtaatttgcgaagccgccgttaataaactaaaagataaccaacttggtttggaatttataaaaaatcatcatggcgaaaaagttcaagacggagcagttacatttgaaatattttcagtagaagcatttaagaaatttgtacaagacaattacgccaaaaaccgttcaaaacgtatcaaacttttactggaagatattcccgaaaaaatggtggaacgacaactaaacgatacacgctacatcagcaaatttatttcatctgttttatccagcatcgtacgcaaaggagaaaacgatgatggcataaattcaaaaaatataattcctggcaacggaaaaattaccactattttaaaacaaaattgggggctgaacgatgtttggaacgagttgattctaccccgttttgagcgtatgaaccaattaaccaaaactgaaagcttcacatcaaaaaacacaaacaataaaataatcccaacagttccgttggaattgtcaaaaggatttcagaagaaacgtatagaccaccgccatcacgctttagatgctttaattattgcctgtgctacacacgaccacgttaatttactaaacaaccaacacgcaaaatcagaaaccaaacgatacgatttacaacgtaagttgcgaaagtttgaaaaagttgaatataatgatagaaacggcaaccgagtaaaaagagaagtacccaaagatttcttaaaaccttgggacaattttacagtagatgcaaaaaataaattagaagcgattgtaatcagctttaaacaaaatttacgagtgataaataaagcaacgaataagtacgaaaaatttattgctggtaaaaaagaaaaagtagagcaaaaaggcatgaattgggcaattcgaaaatcaatgcacaaagaaaccgtttcgggtaaagtggaattaccacgaattaaagttccgaaagggaaaattttaactgctacgagaaaaaagattgatccatcttttgatttgaaaactatcgaatcaattactgatactggaatacagaaaattcttaaaaattattgggaaagcaaagataaaaattctgaattagcattttcacccgaaggcattgaagatatgaacaaaaatatcgcccaatataacaacggaaagccgcaccaacctatttataaagcaagaatatttgagcttggaagtaaatttaatttaggacaaacaggaaacaaaaaagcgaaatatgttgaagccgataaaggcacaaacttattttttgcagtttatgaagatgaaaaaggaaaacgcaattataaaaccatacctctaaacatagtaatagagcgacaaaagcaaggattaggttctgtacctgaaacaaacgaaaacggcaataaactttctttctacttatcaccaaacgatttagtttatgtgcccacaatagaggaaaaagaaaacttgaaaatgcctgactttggaaattttaataaagaacaaagagaaagaatttacaagtttaccgattgtagtggtgttatggcaaattttatacattcaaatattgctaacgctctgttcaatataaacaaagacaagcagaaaaaaagcggaatggattttcctattcaaaatgaaataggtgttggttcgcaaggctcaaaaaacgaaagagcttttaccggtgaaacaattaaaaatatttgcataaaactcaaaattgaccgattgggtaatatttctaaaacaatatgatcaaacgaaccctttacttcggtaatcctgcttacctcaaaacctcccaggaacaactactgattgaattaccagaaagcggtgaaaccaaaaacatacccatcgaggatattggattgctcatactcgacaaccggcaaatcaccattaccttgccggctttggcaaaatgtttggcgcacaataccgcccttattatctgcgatgaaacccaccatcccaccggcctgatgctgaacctggatggacatagtttgcaaagtcagaaattcaaagcccagataaatgccagcattccgttaaaaaaacaactttggcagcaaaccgtgctggctaaaatactcaatcaggcatccatgctgcgccggcaaggaaaagaaaataaacttctaatgcattatgcacaggatgtaaaaagcggcgatagtgaaaatcaagaagcgaaagccgcagtatattattggaaaaatatttttcccgattttttggctttcaagcgcgaccggtttggattaccacccaatcatttactcaattacggctatgctattttacgggccttagttgcccgaagcttggtgggcagtggattgcttcctacactgggtattcatcatcgcaatcagtacaatgcctattgcctggccgatgacattatggaaccgtaccgaccgtttgttgacaacgtgatttgtgcaattattcgaaataacggggctttgcttgaaatggggaccgaaatcaaaaaaaatttactatccatcccggctttggatgtaatcatcgacgggcaaaaacgcccattgatgaatgccgtacaacaaaccacggcttcgctggctaaatgttatgaaggggatgcccgtaaaattttatatcccgaaatataaagatccgatgtttttttatcgccgaatttataccgaatgtttgaacgattaaatgcataccgcattatgtgggttttagtattttttgatttaccaacggaaacaaaaaaagaccgaaaaatttatgcacggtttcgaaaacaaattctttccgacggattttccatgtttcagtttagcatctatctgcgccattgtgccagccgggaaaatgcggtcgttcatagtaaacgggttaaaactattttaccgccgcgaggccatattggtattctttgcattaccgataaacaattttctatgatggaaatattcagaggaaaagaaccgcttgcaggccccgaaaccgtacaacagcttgaactcttttaaggctggttagttagcagtcgtcgaaaaacgaattcgcagaaataaaaaaatgccctccaggagcatttttttatttgtaaaacttagcctaaaatcgttacaatcagcagcttactgcctttgagttgttaaagagctaagctacaaaaaagtttgaaagcaaatcacaacaaattttatacgacaccccatttacctcaagttgttaaagagctaagctacaaaaaagtttgaaagcaaatcacaacgtacttgaagaaggctttgctacgaaaaatgttgttaaagagctaagctacaaaaaagtttgaaagcaaatcacaacccgcatcctactggaattacaacagaactagttgttaaagagctaagctacaaaaaagtttgaaagcaaatcacaaccccatttctttggtctgccgttgcggttgcgttgttaaagagctaagctacaaaaaagtttgaaagcaaatcacaacttgtattactaaaggttgctgctcctgtacgttgttaaagagctaagctacaaaaaagtttgaaagcaaatcacaacaagacttgcaaaggtgcagctaactaactgttgttaaagagctaagctacaaaaaagtttgaaagcaaatcacaacgggctccgctgacgatgatacgctttatacgttagaaaaataatcaataacggatgtagcacacaaaaaaggagtacgttcacctccatataactcatccctgttgcattgctgataatatacaatacatctagacaagcattaaaaatagtaacagcaatatcttccgctacctcggctatcgttgaccataaactcatcgcctattatttttaagattcgcatacgcactcttcttgaaataagccagatatatcagcacgcctaaaaccaacggatggataatgaaaaatacaagaatattaaccatctcgtagcttagccccgtaacctcgctgatggcgtataaaatccccatataaaacataaataaggcttctacaatataggagtctaataaaaataaacttatcattttgttatgtttgtatctgcaagtacagtaaacaattccgaaaaaatgcttttaaaaactaagctaccaattagtttgaaagaaaatcacaatctttcttttacttttcgtattttaacaaaaatttttttatgaaaacgttacttcttttcctcagtttttgttttgtcgcaacaacgggtttttgccaaagcacaacttccaaaataaatacacccgatagcaccaaaaaaataatgaccctcgaagcatcctgcggtagttgccaattaggcctcaaaggagatgactgttcactggctgttcgcctcgatggaaaagcatattatgtaacgggtacagtcattgatgaccatggcgatgcgcatgccaaagatggtttttgcaacgcaattagaaaagcagaagtacagggtgaactggtgaacaatcgctttgtggctacttattttaaattgctgaagacagagaaaccgactttacctattaaaaattaacaccgcttacggctgttttactctccccaaatttcggctttaccttgcagccattgtttggcttgttcggtagtaatagatttggggcgttcaatgggaaatcccaaagctctcgaccaacataaacttgccagtactcccaatgctcggcttacagcaaaaagcactgtataatattcgtattcaaccataccgtaatgcaccaacagtgcaccactatgagcgtctacattgggccatggattttttacttttcctaatgattgaagaatgggtggaacggtttcgtaaatattccaaacagtttgcaccaaaggatcattgggcatgtgttttttaccaaactccatttgtgctaaaaatcgaggatcagtttttcgtaaaactgcatgaccgtaacccggaacaactttcccttcgctcaatgttttcttcacataatctgcaatctgttctttagtaggtatatcagttcccagatttttacgtaactcaaaaatccactttattacttcttgatttgctaatccatgcaaaggacctgccaatccattcataccagcagcataacttaaatagggatcgcttagagcagaacctaccaaatgcgtagtgtgtgccgatacattgcctccttcgtgatcggcgtggatggtcatatacaaacgcatcaattccataaatccctcatcggcatatcccaacatgtgggcaaaatttccggcccaatccagtaatccgttcggttgaatatgctcgttatttttatacttgcgacgataaacataagcagctattcgaggaagccgagcaattaaatccattgcatcgtcatatgttggactccaataatcttttttatttattcctctggcatattcttttacaaaatgtccttcagtttgtaaagccattactccagctacaaacattgtcattggatgtgcatttgaaggaaatgcgtcaatgacagaaaacacatgacttggtacatgactacgccgttgccaaacattggtaatatgttgcacttcttcatccgttggcaatgtacccagcaacattaaggagaaaagtccttcgggtaaaggttctgaaccaccatttgattttggtaatttttctctcaattcagaaattgaatatccccgaaaacgaattccttcgtgtgcatctagcaaggatgtttcagtaactagtcctgtaatgccgcgcatcccttgataaacttgagccagcgttacttctcccacaactttatttccatgctcctgaagcaaggattttatttctaccgccgctatatctgcggcttgtttaaatcgttctttaattacccccataaaatattttgaaacgtctgaatgagtttcaaaggtacttatttgttgcagtaaaaaattggtgttccccttatttaaaatattatttctgtgcttttttataaaaccataaagcaactacagaaaaaataagattaggtgtccaagcagctaagagtggtgggaaatttccttttatagaaaaagtcgatgaaaatctgtcggtcaaaataaacagtgatgcaataataaaacctgtggcaatgtgcaatccgccaccaccacgattttttcggcttgcaataacagctccaattaaggttaataatattacagaaaccggagtagcacttcttctaaagcgttctacttttaatgtgtttaatccctccgaacctcgcaattcttctaattgaataaaagatttcaattgagttgtcgtcagtttatcttttaaatatttgtctttttttaaatcgctcggttttatatttaaatttaaattaagcgtgctaagtcgtgtgataatttcaccctcgggtgttacttttctttcaacagcatttgttagttgccagtttttttgcgcggtatcccatttcataccttcggcgcgaaggttataaactactttattatcttttgttcgatgtaaaaaaaatccaccggcagatttttgaacagagtcataatatcggatacctaaataagaattagaatcggaacgccgataatatgtatcctgaaaactgcccccacccgatctgtcaataccatcaaggtatttcacttgaaaatttcctcgtatttcatttcctttcggaataaattctcgattggctaaaaataataaagcagccaaaataattccgcctaaaatgtaaggacgcaaaaacctgttatagctgcttcctccagcaaggatggctacaatttcggatcttgctgccattcgacttgtgaaataaatgacggcaataaaaacgaataaaggaaaaagtaaaccccagatatatggtacaaatccaatataataattggcaactatttgattaaaactttgtcccgattttacaaaatcctgcgtatgctcactggcatccacggctatggcaataaacgtaaacagcaccatgctgaaaaagaatgttaccaaaaacatctttaatatgtatacatcaacctttttcatttgttgcgaagtaaatacatattatacaaaatatttgtgaagaatttttacacccttttaaagtcgttgttgcaactgaaccaccatttcttttttccaactttcaaaatttccttctattattttttttcttgcttcattcatcaaccaaccataaaatgccaaattgtgaacactggcaattgttaatcccaaaatttcttttgccttcattaaatgtcgcaaataggccttgctataataattactgacttcacaagctatcccatcatctattggcgaacaatccatttcccattttttgttatcaatattgataactccttttgtggtaaacaacatagcgtttcttccattacgcgttggcatcacgcaatcaaacatatcgattcccattccgatacattccaaaatattccaaggagtgccaactcccatcaaataacgaggtttgttttcgggtaaatgatcacagcacaaactacaaatttcatacattttttcttggggctcgcctacacttaatccaccaatagcattgcctgtagcatttttagaactgataaattcgcaagaaacttttcttaaatcttgatgaactccgccttgtacaataggaaataaattttgagtgtacccgtatttattttcggtagcattaaattgattaatgcatctttccaaccagcgatgcgttaattccatgcttttttgtgcatacttatgatcgctgccaccaggaggacattcatcaaaagccataataatatcggctccaataattcgttgaatatccattactttttccggtgtaaaaacatgtttgcttccatcaatatggctctgaaaagtaacaccatcttcttttattttacgagtgcctgccaaagaaaaaacttgatagccgccgctatccgtcaatatgggcttcttccaatttataaactgatgcaagccgccgcatttttcaattacttcaattcccggacgtaaataaagatggtatgtattgccaagaattatttgtgcttttacttcgttcactaactgttgctgggtaactgctttcacagttcccaccgttccaacaggcataaaaataggtgtaagaattgtaccgtgatctgtagtaacctcaccggctcttgctctggaatttttatccttttgtaaaagctgaaattgtaaactggccatcagcaaaaataagatatgccttaaataaaatccccataagccgaatgattgactttttattttggataacaacatctgtcctattttcgcagtcctttttaattatggacctcagttttatcaaatcagttccttggagtttatttcttttctattcttttacgattgtcgtagccattcaaattatttattatggatggtttttcagtcgcgttgctttttatcggcaaaaaaagaaaaacaaatcgcagcaacatccggtatccgttattatttgcgcacgtgatgaagatgaaaatcttgctcgtcatttaccaggtttattagtgcaacaatatccttccacctatgaagtaattgccgttaatgataattcgttggacgattcaaaatatattttacaggaactaaaaaaaacatttaaagaccgacttgaagttgttgagttgactcaggaagccaaattaattagtggaaaaaaatatccattaagtattggaattaaagaagctcaccacgaagtattgctgcttaccgatgcggattgtgtgccggctagtgaacattgggtgcaaaaaatgcaagaagcgtatgctgaaaatattgaaatcgttttgggctatggtggctttcataaacttcccggattgctaaacaaactcattcgcttcgaaacttttcattcggctcttcaatatttttcctatgcactggcgggcattccgtatatgggtgttgggagaaatttatcttataaaaagaatgtattttttcgtaacaaaggatttactgcaatcaatcatattcccggtggcgacgatgatttatttattaataaagtagcgacaaaaaaaaatactgctgttgtaattgataaagaagcaatcacactttcaattccaaaaaaaacttggaaacagtggtatcgccaaaagaaacggcattattccacagcgcaatattacaaaccgaaacacaaatttttgttggccttgtatgcagcaacacaatttttattttacccactatttatattaaccattattttttatagttggcaatttgcattcctctttttggcattacgctacatgttgctttcaattgtatattatttttcaatgaaaaaattgaacgaaaaagatttatggccgtttttcattttgttcgatctttggttgttcttttattatctcatttttgcaccttcgttgtgggaaaaaccacgccctacttggaactaattgaattttttgatggaaattattgacaaatatttttctgattttaccccccaacaaaggaatcagtttgctttattgaaaaatttatatgcagattggaatagtaaaatcaatgttatttcccgaaaagacatggatggacttttcgaaaaacatattcttcattcactttccattgctacagtattttcattcgaagccggaactgaaattcttgatttaggcactggcggcggctttcccggaattcctttagcaattttttttccgaatgtaaaatttcatttagtagatagcattgcaaaaaaattaaatgtggtggaaaacattgcaagcagtattggagcaactaatattaccgtacaacatacaagagcagaagaaattaaaggaagaaaatttgaatacgtcgtatcaagagctgtagctccccttggcgatttatggaaatggagtaaacccctcataagaaagaaatcggtggcaagcgacaaaaaaaatggattgatctgtttaaagggtggtgatttggcgcaagaaatccaggacagtggcgtccgtcctcagttaattagaatttctggtatattttcagaacccttttttgagaataagcatattatttttgtaccccaatagaatataaaacttaccgataagtagtattgttttgttgtaatcgaaaactgatatttggctatggaaaaaataaaagtttgtatagttgaggataacgcggatttgagagagattatacaaactattgtaaatgcgtctgaaaattgcgaatgtattggtgtaatgagaaatgcaaaagaggcaatagaactattaccacaattacaacccgatattgtgatgatggatattaatctcggaagaggtgaaaatggaattgattgtgtaaaaaaactatcaccggatatggaaggtacaagctttatgatgtgtaccgtgtatgatgatgaagattcagtattcgaagcgcttactgcaggtgctaccagttatatgcttaagagaacaccgcctgccaaaatgattgaaagtatcactgaactttataatggtggtgcgccgatgagtagtactattgccaggaaagtgttacaatttttttctacaaaccctgtaaatgaacttaatgacttgacaaaaagacaatctattattttatcctatttggctaaaggacttcaatacaaagaaattggattacacctagatattgggatagaaactgtacgcaagcatgtacacaacatttatgataaactacatgttcattcaagagttgatgctgtaaataaatattttgggagaaacaatcaaccctagtatttcctatctccctttaccattttaattccaacttattattttttctttcaacatcagccatacgttgagatggatcaatttctgcaaattgaatatcagtcagcttcttttgggtttcaataatataaattggatgagtccatttccatgattcataaacaattcttggaatactgttgttctcagcaggtttttctccaaacatcaaatacatgggaatataatgaagctctttactgccgtctttaaatgaaagttgaaagtcaatgggcattggcatagcaccgtttcgttttattctaatttttgttttacccccttcctcccataaactatcaatactgtaatcaatcgtcttggtactattcacccaatactctttataccaatccaatttcatactgcttactttttctgccacacgaataaagtcattgacattgggatgtttgaatcgccattgacgataatattctaacaacagtttatcgcgtacagatgctcccaggatatatcctaattgttctaaaaacacagcacctttcgaatacgatgccaacccataagcataatttgaattgaaatgatcggcatgcgtagaaagtggttcttcttttccacttttagtaagattaaaataaccggaataattgccttcataagcaaattgaggattattttccaaccaagcagttactctatcttcagcgtagctggtaaagccctcatccatccatccatataatgattcattggttcccaaaattccttgataccaattatgcatccactcgtgaagccaagcgcctgggctcgccaataatgttgccattgggtattccataccgccatcgccaccatgaataaatgaatattgacggtacgtgtaagcgccaaa

SEQ ID NO: 1158 - DNA, 24488 bp, synthetic construct
  source 1..24488: mol_type = other DNA
  misc_feature 1..24488: note = Synthetic
agccacaaaagtagcgaattttatccaatatgaagccagtaagaccgaaaaaaaatctcggacagcactttttgacagatctcgccacagcgaagcgcatcgccgacaccgtcgatgtatgccccgacctgcccgttttggaggtaggtccaggcatgggggtgatgacgcagtacctcctccccaagccccgcgaagtcaaggtcgtcgagatagaccgcgagagcgtcggctacctccaggagcgctggcccgcattgcaggacagcatcatcagcgccgacttcctccgcatggaccttcgcgaagtctttggcggccgcgagttcgtgctcactggcaactacccctacgacatctcctcgcagatattcttcaagatgctcgacttccgcgacctcataccctgctgcacaggcatgatacaactcgagatggcgcagcgcatcgccgcgcgtccaggcacgaaagcctacggcatcctcagcgtcctgctccagatgtggtacgacgtcgaactactcttccaagtgcccccaggcgtcttcaacccaccgccaaaggtgcagagcgccgttgtctgcatgcggcgtggccagcgtcagcaggcaggctgcgacgagagcctcctccgccgcatcgtcaaaggcacattccagcagcgtcgcaagatgctgcgcgtcagcctgcgaccactgctcgcacagaccttccccgataccgacttctccgcactcctcgccgaccccgcactcacgcgccgccccgaacaactcagcgtcgaggacttcatcgccctgacgaacggaataacggagtttttagtgtagagttaagagccagaacaaaacttttctgttcatcattttaatagaattaaattgttttctgggactattcccatcctcaatataacgcttctcttgacaaaaagcacactttagtgtgggaatcgtgttaatatcctccccaaatgtggttttttgaattattttccgtacctttgcagccaaaggctgcgaaacgtcagacagacaattaaagactattcaaaagacaatatagattatggcaacaacatccatccccaagtcgccccagatgattatcacgctggaagacaatgcgcttgtggccgacatcaagcgggcactgaaaatgatacgcggcatagcctcagtgcgtaccgccaccatcagtgatgaccacacaatcacccccgccatgcgccgctccatcaacaaggctcgccgcgaatatgccaagggtgagaccatcaaatgcagcaccccggaggagatgcagcgatatttcgacagcctatgacctacacgattgagtactccaaggaggctgaccggacgttgcgcaagtggaagaagtccaaccctcagctcttcaagaaggcgacgaagattctgatggacatcatgcagcatccccgcacaggtctgggccaccccgaagcgcttgtcggaggaaacgacgtgacttattcacgccacatcacagcccacgaccgcatcatatacgacatctacgacgaccgcgtcacggtgcttgtagttcaagccgaggaacattacaacgacaagtaatttttaccgccccctctctttacctctcaaaacaaactaatgattttctgggactattcccatcctcaatataacgcttctcttgacaaaaagcacactttagtgtgggaatagtgttaatatcttccccaaatgcgggtttttgaattattttccgtacctttgccccgaatattcaacataattacgtatctatcatggcaagacctatcaaagaaacccccgtgctgaagggcgaggatgccttcaacttcgagatgcgaaggctggaggtggagaacagaactcctgaggagcgtgccgaggctcgcaggaagttccaggaacaagtggctgaggccagtaaacatattcaatggtgctggtaggctatgcaactcgttccccttacgcccgcttatccgctcgtcgcttttgactgtggcgacgatgaccttaacaggttcctgctcgacgatgcaaagcacgcacaggaacttcgcattgccaatacgttcattcttgaagacgaaggacgtattgctgcttatttctgcctgctgaacgaccgtatcagccgcagcgagattacgggcagtcgatggaagaagattcgggcaaagtttcctgtcagcaagcagtttcgcagttatccgtgcatcaaggtaggacgttttgcagtttccgtggactatcacgggcagagcgttggcacttggctgatgaacaagttgaaagagcggcttaatgtcggccaaaatcagtctgcttttcgttacattaccgttgatgcatacctgtcggccatagagttttaccgcaagaacggtttccaagaacttaccaagaaagaagaagatgaacatacgcggcttatgtttttcgatatgatggatgtagaataataatcactctctgatccactcatgccccgctacctccacataccccacactcccgacaccgcccggaccctgactctgagcggccgtaactgcttggcagtgagcagcatgactacccccccccctaaaatcggctacaggcgcggaaaagggcgccgaggcgaaatgtgtccacaaggcacgcagaagtcccacagcggggctgctgcgtgccttgtggcgtatctgtacgtccccaccgacgacgtggacgtggacaaggagtaccagctcatccccctcgacagtttataaacatcattttttatattaacaaattaaattttcaagttatgttcaaaaaaagatttatttcaatgctcgtgctgctcatgacagcagcgacgggcgcatgggctgacaccaccgtcacgtggactgcaagtgatatgtcaggcatatacatcgatttcttggatggcgaagcatataacaacaccatcaaaggcatcactgtcacctcaagcggcggaggcagggctggtgacggctgggaaagaaccgatatcaatttgtatggtggcagtaccacgattacattcacttcctcggtgggaaaaatcaagtcgatagcgataacggcagaagatattatgatgagtagtaccccctcaggatggacgactgattatagtaagctttcttggagcggcgaagaagcatcgactaccgtttctttgcctttatcaggcgggacggaaatctctgatatttcaggaatcgtgttcaccattgagtccaccgtcaacgtcaccggcatcaccctcgacaaaactgaggcttcgatgattgtgggtggtgagacgctgacgctgaccccgaccgtcgcccccggcaacgctacggacaagagcgtgacttggagcagcagcaacgaggccgtggccaccgtcagcaatgacggcgtagtgaccgccgtggccgcaggcaccgccaccatcaccgtgacaactaccgacggagcaaagaccgccacctgcgccgtgaccgtcgccgcccccgccgcctccacctacaccgtcaccctgaaggaaggcaccgaggatgccaccagttggactatcgcgcccgttgaagcaactaccacgggcgtggaagctggcacggaggtgaaagccacctacaacggcacgaagaaggtgaagagcgtcaaggccaagaagaaggcgccagctgcaaccgacctctcaacaatcaatgcaaactatatcgccagtgacggcgaaaccctaactggcacgctggcctctaacgtgaagatttccattgccgacggcgcaacggtgacacttaataatgtgaccatcaatggcacgaacgactcctactgggccggcatcacttgcgagggcgatgccaccattatcctcagcggtacgaatactgtgaagggattctatggggattatcctggcatccaggctgctgctggcaagacgctcaccatcaatggcacaggttctctcacggccagcagcaacggcgacggtgccggcatcggtggcggaagaggtgttgcttgcggcaatattgagatccagggcggcacaatcaccgcaactggtggagaatatgctgccggcatcggtggcgcatacaacgctaattggggcaatattaccatcagcggtggaaccgtcactgctacaggcggatatcgtggtgctggcatcggtggcggtaaaagaggtccagcgaatgtctcctgtggcaatattaccatcagcggtggaaccgtcactgctacaggcggtgaagaagcggccggtattggcggaggtagaggtaacaataacagccaaaaaagcagttgcggcaccatcactattactacaggcgtaaccaaagtgactgctacaaaaggaagtgatgctcccaacagcatcggcgcaggctattacggcacttgcggcacagtaaccatcggcggcaatgtgggtgctattaccactagcccatacacctatcagccgtaataatccctcgcgcatatataatataaaaggtatatagcgcaacgcgatctctgaggccacggcctcgaagaactcagcgctctggaaattgcaaactcgtttgcatttccactcgctcgcgcgatctttgacatactgagacaaacggatatttttaggttattcccttgtaatattcaaggaaagttcgtatctttgcagccatattgcgtataaacaacgagaattatggaagcaacgactgcaaaaaagccctcaagaaggaggaagaaactcacttccgaggagaggagaaccatcaatgccgcaaagccggcaggtaacaaatacatggaagctgccagaagacaccaaggcgaagtctgggtgaaagacccgatgttgttgctatgagatacttgcttgacaccaacgcctatatctactgggcaactgaccaagacctgctcgacgtggatgtgtacgacctgctcaacgcacccgatgccgtgctatgcatcagtgccgagagcgtgcgtgaactcatcgtggcctacaatgccaagggatggggcaacaagcggtggaaaacggctgcggacatggtaaatgctattgagcaggactactacatcgaaatcctgccaatacagaaagaggtgatgcagacctattcgcggctacgcatcaatacggcacagaaccacaaggatcccagcgaccatgtcatcatcgctcacgcaatgacgctccacgtgccgctcatctccagcgacacgcgcttcccctactatcgcagacaaggcctcaacctcatcttcaacgagaagtagttacctctcccttccgaaaaatatccgccgagacatccgctgggatgtttcggcgaatcgtttatatatccgtcactgtctcacgtatcgtcatcgcatcgccgagacgacaacaattaaaagtataacaaattaaagaacaattaaaacattaaagaacaatgaaacatagatttctatatatcatggcgctgctgctgttcatcactgttcaggcgagcgccatgcagattttcgtcaagacgctgacgggaaagactatcacgttagacgtggagcctgaggacttagtcagcgatgcaaagacgaaaatccttgacaaggaaggcattcctgttgcacagcagcgtcttatctttgcaggtgaagatctggaggacggcagaacactggcctcctacaacatccagaaggaatctacgctacacctcgtcctgaactggatcgacctgacgccgaatgccgacggtacggagtggaccctcgcctcgatgcccgaatacgatgttgagctggaagtgacatactacaccgatgccgaactcgaccagatggctgccgatgaagtcatcgccaagataacagccatcggcaccgtgacctacactcctgagagcaaggccctcatcgacgcagcacgcacggcctacgacgcgctgaccgccgcccagcaggcactcgtgacaaactactcgacgctgaccgatgccgagaccacctacgccaccgctgaggagaccgcctacaccgagggcgtagagctgaccaagaaccccgacggcacatggtcgctcgccgcaactcccgccttcgacgtggagctggaggtggagtatgagaccgccctggccctctccgagacaacggacaacagcgctgcactgacagagtgggacggctacgaggccgacgtcaccctgacgcgcacgcttgccaccggttcgtggaatacgtttgctgctccgttcagcaccgccatccccgagggctggaccgtgaaggaactcaccggcgcaacgttctccaatggtacgctgaccctcacctttgccgacgtatcaagcatcgtggctggcaagccctatttagtgaaggtcgctgccaacaccgacctctccgcagcacccttcacggaagccatcgtgagcaaggatgcacagcccttcacctcgaccgacgtcgatttcatccccacgctgggcgcaacgaccattcccgacggcgacacgaaggccgtgctcttcctgacagcaggcaacacgctgctgaacccctcggcactgcccgccaatatgaagggcttccgcgcctacttccagctgaagggcgaggctgccagtatggcccgcgccttcagcatagactttggcgacggcgagaccacgggcatcacctctattggacaattggacaatttacaatctgacgattggtatgacctcagcggacggaaattgtcaaatggtcaattgtcaaatcgtcaaatgaaaaagggtgtctatattcagaatggtaaaaaggtaatcatcagctcggcgacgcaaggagacgcttgccagagcaagaagtaaagcaaggagaactcagatatgacaaagaaagtaatcgattttaatcgcttgcctaagcaagaatatcagaagcccgtgatggaggtcatagagttgcagcacaagagccagattctggccgggtctgttacgagcttgacgacctctggccttgacgacgacctgattcttcccgacgacgaagagcctaaaagtggcagtgtttgggaagaggcttggtaactatttgtaccattagcaaccatcattcggggacggagcactttcgtatgcttcgtccccgaatttttacatcaaatccagtatatccctaaagaaagcctcgacagtccgttgcattaatggctcgtcatctttgttgttcatagaatctatggttccacttttctaccgtttaacacgtattttattgatataaaatgaaatacgatagttgaatagattaaagtaatcgccctcccatagttttcaaaaatactaccacaaccgccacactaccacatgtcttgattatcaagcggttatgtgtggtagttgtgtggtggttgtggtagtttatgctttgattgggcgcacgagatacatagagctgttgcgagtctttgtatgtctgatgcccccaatgtttgcgatgatgcggctgaacctcaggaggttagggcttttcagcccgcttcccgcatgcttgcggatatgctcaaagattgccgttgccgacatccattgtccatcgctttcgtccgtcacgatgtcgaagcactccgcaaagtacatctcctctggcgttcgcatctggaactgctggttcgatgccatcacctcccgcgtctgctcctcgtcgagccagtgcggaacattctgctccagcagtgccacggcctgggcatacagttggcgatagttgatgcggtgtttcacgttgatgggccccgtcagttcgacacctatgaagcggcggctgccagagggatccgtcagtatgtcagagacgtttgccgtggctatgaacgatgcgcgtcgcgggaagttctccacgtgcttgccgtatggcggctttacctttaccgacgccagctgcacgacgtttttgaggaaaccctcctgcaccttcgggcttatctggttgaactcgtcgaggttgatgagcaggaactggctcatagcctgtagcacgctcttcttctccgagagcacgaggctgtcgttgtatccccattgtaactcagaaggtatcagcgacttgcagaaagtcgatttgttgtacccctgcttcgagatgagcagcggcacgaggctgttgccgtagcgcatcgtatgcctctgccattggttcaccatagcgaggaaccatgtgcggaaccacataggccagcgcgcattgttcgtaggcaccgttgctgcgagctcgccgatgtggtcgcggccgtcccattttccgcgcagttcccacaagtagtcctccacggggtcgtggagtttcacgtggctggagacaagtaagcggtttatgtccctgtcccatgcgttgatgcccttcagacgcgcctccaccacaaggctgttgcgcgcacgctcatcgacggggcgccatccgtagaagctgccgttcttcgacgcatattccacatatcccatgatgctgttcatgcggaaggaatagcgactctcgagcaggtcaatgagcgcctgcgtctcctgtgccactgtcgagtcctcactgtcctgcgcttcgcgaatctcctcgggcatctcttcgctcaggtcgtcggcgatgagcaagggcgcagcctccgcattgtagaaaggttttgcgtcgtagctcatgcggaatcccatatgcagcatgtcagcctcgccgcccgacttcgcaggcgtcacattcaggcgccccgtcgtcaggtgcgagctgagggctacggcatacagccggcacgccagagggaacgcctggcggcagagcttcgccgcctgctcctcattctgcggcaacgcaccgtcagggcggcatgtgcgtacgagcaccttcaccgtccgcccgctgcttcccaccagtgccgccaccgtcatcggcagcatcgatgccacgcgcttcacctcctcggcatccctcttgcagctttgagcattcagcagtcctatgctcagcgtcagtatgccgctgaagcgcaccaactgcacgtttccctgcgcgtcgtccttaccctcgaaaaaggggaacaccacaggcaggcgactgaggctcgggcgcgatataaactccgggtattgcgcaaattcgcgcaatggctctacattctttgcgatgtagtcagaacccgccttctccagcaggtcctcaatcgtcagcaacttcatgtgctgaacgttcttcttgtcagttctgacaacggtaaatttaaacatagttttattggttttggggttaaacttgaaatttgtcagttcatggttcgtattcgttcctttctgcgcttgccctgaaaacttggagccttcacgttgcatcgagaagccttcaactcgaatcgcgaagccttcaactcgaatcgcgagtgcttaaagattcatcaagagcgcccaaaaatccaacgaaatgcctatatttttcttttttctgcggttacgattttatgttttttgatgttgttcatttctgttgcaaagatacaaaatccaccccaaattttcaagtttcggcatcgaatttttgtcggaaatagccactttttcgcaaaaaccaccacactaccacacaactaccacacgtaacgccctgaatatcatgagggtgtggtagtgtggtagttgtggtagtacttttttaaaatcctgacgcgcacgcgcgcgaaggaaagaacataacaaagcaagaataaatgtaaatattcctgcaatttaggttgactctcacgtcttaatcctgttttaggttgacctatgtgtggttattaaaaaaagcccccgaagaaggtcgagggcagcctaaatgttttcacaacggaataatccttattgtgaattgcttcaaattagcagtgcaaagatgcaaaaagtttcagtatagaccaactttttttgaagttttctttatttttgctcgcaaaatcatcaattataaccatgaaacagattcttggactcgatttaggcccgaatagtataggatgggctgttgttcaaacagaaagtggggaaacggcggaaacgctctttaataatgggcgcattctgatggcggggagtcgtatcatccctatgtctcaggatattctaaacaactatgagaagggtgtctctacttcccaaactcatgatcgcacgcaatatcgtcaggtgcgtcgccaatacgaccgctttcaccagcgtcgtgaacgtcttaaccgcgttttgaaagtactgggatacttgccagagcactatgcccagaagcttgatcgctatggcaagcttctaaaagggcaagaaccaaaactagcttggcgtcctgctgaggacgggaagttggatttcttgtttcaagatgcatttgatgagatggttgctgaaataaagcagcgtcatccagggctatgcaagattccatacgattggaccctctatttcctacgcaagaaagcactgacagagaagcttgctcctgaagagcttgcttgggtgcttcacagcttcaatcagaagcgaggattctttgccgtacgtggtcaagttgacgaggaaacggatagtcctgataaaaagcaagaatatcggaaggctgtcttgcaaaaagtagaagatacgggagaaaagactcgtggaaacatagtttatcgactcaaattcgaagatggggcatgtttcgaggttccgcttcgcagaatggccctgactattggtgatgaagtagaatacatcatcaccacgaagttggacgaggacggaatgccaaaacttaataagcagggaaagcccgatattacatataagattccaaatgctgatgacgcgtggacgctgaacaaactgcgtgcggaatataccatcgatcaaagtcatactacggtaggacaatatatatatgatgctattctcagcaatccgcaacaaaagattcgtggggagctcgttcgcacagttgatcgccgtttctatcgcgaagaattatcacgaatattggagaagcagataccgtttcatcacgctttgcaggacaagaacaaacttcaagagtgtatccagtctctctatcccagcaacgaggctcgtcgcaacgctttaagcgctggtaacttcaaaaaactattgatagacgacattattctatatcagcgtccactgaagagcaagaaatcgttaatagacgagtgtaagtatgaatatcacacatacactgacaagactggcgaatccaagaaggttgggctcaaatgtgcttcacgctcaaatcctttgttccaagaattccgcatttggcagttcatggagaacctgcgtatattgaagcgtaaagcgacaatagatggacatttccatgcagacgtagacgtgacaccacaatacttgtccgatgaagatgctcggcaagaactctttgactggttatacaaccgtgcaaaagtcgatcaaaaggcgttgctcaaatactttaagcttgacgaagaatacttccgctggaactatgttgaagaacgggactatcctatggctgatacgcgtgcagagattatgaaacgtctgaagaaggctgaggttcccaatgatttcttgacacctgatacggaaatggcattatgggagattctttattcagtcagtggacaactggatttggagaaagccctaaaaacatttgcccgtaagcacaaactcgacgaacagaagttctatcagagttttcgtacgataaaaccatacgtcgctgactattgtgcatattccacaaaagctttgcgtcgccttcttccattgatgcgctgcggtaagtactggagcgtagaagcgatagacgctcaaactcgccaacgaattcaaaagctcattgatggcgaatgggaagataatattgacgctcgtgtacgagaaaagacaatccaccttcgccgcgaagaggatttccgtggcttacctgcatggctggcaagctacgtggtttataatcgctatagcgaggcgggcgaagtggcaaagtgggaaaatcccgatgagatggatgccgacattcgtaagttccgccagcactcgttgcgtaatccgatagttgagcaggtgtgtcttgaggcgttacgtactgtgcgtgatatatggaaagaagtaggacagatagatgaaattcacgtagagatggggcgtgaaatgcgtgccacggctaaagaacgagaacgacgtcacaacgaacagttggaaaatgagcagacgaacctgcgcataaaggctctgctacaggaatttatgaacccagagtttaagattgaagatgtacgtccatattctccttaccaacaagacatcttgcgcatatatgagcgaactgttcttgaaaacgaggcaggtcatatcgatgagcctatacgggagattattcgcaagttctcgcagacagatgctgcaaagcgtccaacatcatcagaggttatgcggtataaactttggcttgagcaaaagtaccaatctccgtacacaggcgaaatcattccactcggaaagctctttacgacagcttaccaaattgaacacgtaataccaaaggctgtttattatgatgactccttcaacaataagataatatgcgaggcagaggtgaaccagctaaagggcgacatgctcggcatgcctttcatacaaaagtttggagggcaaaaagtgccgtgtgttggaggcaggacagtggaggtttacaaggcagaggcatatcgcaaatttgtggaagagcactacaaggggcgcaaaatggaaaacttgctcagcgaagaagttcctgcgcgctttactgcgcgacagatgaatgacacacgctacatttcacgtttcattatcggcgaattgtctaagcttgtccgcgaaaaatctgcagacggcacccttgaacaggaagcaacttcaaagaatgttgtggtactaaatggtaaggttacggataagttgaagagcgattgggggcttgtcgaaatctggaacgagatcattgctccccgcttccgccgccttaacaagatggaccagagtaatcgttttggccatgaagcagagaaagacgggaaacgctatttccaaatagaaatgccccttgagctgcagcgaggtttcaaacgtaaacgtatagaccatcgccaccatgcgatggacgccattaccatagcctgtgctacgcgtactgtcatcaactatctcaacaacgactattcccatgaaggccaagggcgcgaggatctaaagcgtgctgtatgtaggaagcgtaaggatgagtggctcgttatgaagccttggaacacgtttacacaggacgctcgtgagcaactacagaatattgtagtaagcttcaagcagaacttgcgcataatcaataatacgggcaaccgttaccaacgctacaatcacgaaactggtaagaaggaacttttccaccagcagaagggagatagatgggctattcgcaaaccactacataaggagagcgtgtatgcacgtgtcaacctgcgttcggtaaaacttgtgaatttcaagactgcatttatgagtgtaggacgcatagtggataaaaagcttaagcgcgctgttctggaggcaatggctaagtataacggtcgctgtacggacaagcaggtacttaagtatctgcaggggatgtccgaatggcgagactatgacttcaagaaagtgaagatttatgtgttctcaaatgaagatgaaaagaaccagataagtgctatcaggaaacggttggatgacagtttcgacaagaaaaggatagagaccattacggatactggcatacaacagatactgctacgtcatcttgaggcaaatggaggcaatccgaaagatgctttctcgccagagggcattgaacgtttgaatgacaacatcacagagctcaacaatggtaaaccacacttaccaatatactctgtacgagtgacggagcctttgggcaataagtttgcaattggcatcataggaaataagagccgaaagtttgtggaagcagcgaagggcacaaatctcttctttgcaatttaccagcaagaagatggaaagcgggtgttctgctcgcttcctcttaatgaggttgtcgagcgacagaagcaaggactcccctctgctccagaagaggatgaggctggcaacaaactcctgtttgtcctgtctcccggagatttggtttatatacctacgatagacgaacgtgccaataaagtagataatgctaccattgataaagagcgaatatacaagatggtgtcgtgtacaggcaatagagcgtcttttattccttattttgttgcatcgcccatcgttgacaaatacgagtttgataaactaaacaaaatagaaaacgttgatggtacatcaataaagaacgtatgtatccctatcgaagttgatagattagggcgatacaaaatcaaataaccaagtttaactgcgcagagaggttcatgcttctctgcgcttttaattttaatagtatcatgataaaacgaacgttgtatttcagcacgccatcctacctctcgctacgtaacaagcagctggtgtggaaactgccagaggtggagcattgtgaaaacctgtcggaggattttaaggcagaagcagtacgcaccattcccatagaggatatcggggtagttcttttggataacaaacagataaccattacacaaggacttcttgctgcgctattggacaataactgtgccgtcataacctgtgaccagcgtagtatgcctgtaggcatgttgcttcctttggaggggcacaatacacagcgcgaacgctttacccatcagatagaggcgtcgctccccctgcgaaagcaactttggcagcaaactatacgccagaaaatagccaatcaggaagttgtattacgcacccatacgaatacggaaactcgttgcatgaagaaatgggcggaggatgtacgaagcggcgatcctgacaatcttgaagcacgtgctgcaacctactattggaagaaccttttcgcaagagagatccccgatttcctgcgagggcgtgaaggcgaacctccgaacaatctccttaactacggctatgccatcctacgagctatcatagcacgtgcgttggtctccagcggcttgctgccaaccctgggcattcatcaccataaccgctacaatgcatactgtttggctgacgacataatggaaccatatcgcccttatgttgacgaacttgtgcttgaaattgttcggggagaggattatgttgaactgacgcgcgacctaaaggctcgtttactatctatacccgtgttggatgtagtgattaacggacagcgaagcccacttatggtagcagccactacaacaacggcatcacttgcaaagtgcttttctggcgaactccgtaaaattgcctatccagaaatgtcctaatggagcgttttagtgaataccgcgttatgtgggtacttgttttcttcgaccttccaaccacgacaaaaaaggaaaggaaagacgcagcccgttttcgcaaggatattatgggagatgggtttaccatgtttcaattctctatctatgtgagacattgtgccagtagtgagaatgcggcaatgcacgtgaaacgtgtaaaagcactgatgccagagtatggcaaaatcggcatattgacgattacggataagcagttcgaaaatatccaactgttttatggaaagaagatacaaccccctatagcatacgggcatcagttggaactattctaacaaagcaaggcgagcgaaaatgatgtttcactcgccttgcttgtaaaaggcaactttcatttttctgttctaattctttgtataactagttgcctttgtgggcacaaagatactaatttgagagcaattcacaacgggttccggggcggggagaggattgacgatgttgcctttgtgggcacaaagatactaatttgagagcaattcacaactggctacagggcaatcatcgcccagcggaagttgcctttgtgggcacaaagatactaatttgagagcaattcacaacctgcgctttttacgtttgctttaaatagcgttgcctttgtgggcacaaagatactaatttgagagcaattcacaacaggtcggcaatggactggcgaagttcggcggttgcctttgtgggcacaaagatactaatttgagagcaattcacaacatgttgttattatctttatttctatagtgcgttgcctttgtgggcacaaagatactaatttgagagcaattcacaactaccccaagaagcgcgaggtgttctgcgcgttgcctttgtgggcacaaagatactaatttgagagcaattcacaaccacatccagcaggccatctatgaatgctacgttgcctttgtgggcacaaagatactaatttgagagcaattcacaactcataacgggcgcggatttcgcggcaggatgttgcctttgtgggcacaaagatactaatttgagagcaattcacaacgcatcttcggctttatcgaaacgccgcagtgttgcctttgtgggcacaaagatactaatttgagagcaattcacaacgaaaaagtttgatataattggtagttgcccgttgcctttgtgggcacaaagatactaatttgagagcaattcacaacaaaaagttgtattatgaaagaaataagattgttgcctttgtgggcacaaagatactaatttgagagcaattcacaacgataaggtagtttcacattataagagaaagttgcctttgtgggcacaaagatactaatttgagagcaattcacaacattatcggtattatgtccgtcattcctcgtgttgcctttgtgggcacaaagatactaatttgagagcaattcacaacagattggtgaccctgagacgcaaggaaatgttgcctttgtgggcacaaagatactaatttgagagcaattcacaacaagtggcgtgcgtgagttcgaggaactcatgttgcctttgtgggcacaaagatactaatttgagagcaattcacaacaaggaattatctcgtcttgcttccatgcggttgcctttgtgggcacaaagatactaatttgagagcaattcacaacaaagtggttcgaacttcgtgcgagaactgggttgcctttgtgggcacaaagatactaatttgagagcaattcacaacacatgagttgcataggcataaagaccagaagttgcctttgtgggcacaaagatactaatttgagagcaattcacaaccaattttggtgttgctcctaaagacttgcggttgcctttgtgggcacaaagatactaatttgagagcaattcacaacgaacttaccaatacaatataatgcgatgaatgttgcctttgtgggcacaaagatactaatttgagagcaattcacaactattctcaagaaaagctatatggtactcagttgcctttgtgggcacaaagatactaatttgagagcaattcacaacttttgataagttcacgtatgagaataatatgttgcctttgtgggcacaaagatactaatttgagagcaattcacaacgggcttcctcgttggctttttgctgggctggttgcctttgtgggcacaaagatactaatttgagagcaattcacaactatatcgatactaatttttgctcgtctgctgttgcctttgtgggcacaaagatactaatttgagagcaattcacaacctggtgatgtggaacttgaccttcacgccggttgcctttgtgggcacaaagatactaatttgagagcaattcacaacgaaagccgagcttacatttcaggttgtcaagttgcctttgtgggcacaaagatactaatttgagagcaattcacaactaatactatatgatatgaatacacgaaaaggttgcctttgtgggcacaaagatactaatttgagagcaattcacaacagaagccttttcaatctctctcagtgtctggttgcctttgtgggcacaaagatactaatttgagagcaattcacaacagaatttgagcgcggccgatttgcgaatacgttgcctttgtgggcacaaagatactaatttgagagcaattcacaaccgaaatcatgtccgagctgggcttagagtgttgcctttgtgggcacaaagatactaatttgagagcaattcacaactcttcggcagcacgcttggcggcttcctctgttgcctttgtgggcacaaagatactaatttgagagcaattcacaactaaacaagcggttgaaaataaatctcttaagttgcctttgtgggcacaaagatactaatttgagagcaattcacaacaggtgtcgcggtgtggggtactcgtcggcagttgcctttgtgggcacaaagatactaatttgagagcaattcacaacccgagtcgtgacgaaagtcgaaataaatttgttgcctttgtgggcacaaagatactaatttgagagcaattcacaaccgggggtctcaaaatgttcttcttgctttggttgcctttgtgggcacaaagatactaatttgagagcaattcacaacaccggcttgctcgctacggctgaaaatcaggttgcctttgtgggcacaaagatactaatttgagagcaattcacaaccggtcttcgtggtatccacctcgtctccgtgttgcctttgtgggcacaaagatactaatttgagagcaattcacaacaaagtctgtgcttcgcctgccatgcccgcagttgcctttgtgggcacaaagatactaatttgagagcaattcacaaccttcatcaatgatgatgatatacggcagtggttgcctttgtgggcacaaagatactaatttgagagcaattcacaacgtaaattcccgtaatttagaaatgtaaatgttgcctttgtgggcacaaagatactaatttgagagcaattcacaactatagtaaactatttagttaaaccctttagttgcctttgtgggcacaaagatactaatttgagagcaattcacaacaggtgaacgtgatgttggtgacggggcgacgttgcctttgtgggcacaaagatactaatttgagagcaattcacctcgtgttggaggaaatagaaaatcggaaggggagcagacgaaagtcacagtatctcccacaaccgatatcggctgcaaagatgcaaagaatttctgataatttgtcagatgttgcaaaagaaacccgaaaaagggatgtatctcgcctttttcgggtgattcgtgaaatattatatcgccttgccttccgccttccagccttcgtgcaaactccgtctgcacgggctgacagtgtatttcatcagagcgaatttaaccaagcattcatgtcgtctttattcgtaaaggttgtgcctttaccttcggcaatttctttctctgctttatctacacgggcatagaattcctccatcgtcatgagtgtggggtcttccttttcagctaccaacttgcgcaagtattctgcagcacgttttagcaggttctcgtcttctacaatgatgctcatgtttcggagcatctctgcgttaagttgcattgtggtcataccttcaatctctttattcttactgcaaaattaagcataatttataaaacgacgaaattaaagctggaaaacagataataagcacttgtccatcgaagaaccttcagtgagccttgtagtgcacgtcagccctgagggacgaagttccgaagtggctggggcacgattggcaaggcgaactaatggtcaatcgtcaatggtcaatggtcaatggtcaatggtcaatggtcaaatcacttataccttatccacttcaccatttccttgatggtgggtttcttgccgtacatgaggatgccgacgcggtatatcttgccgccgagccatacgaaggagatggcggtgaggtataggagggcgatggagagggcttcttcccagagtggcacgccgaagggtatgcgcaccatcatgacgatgggggaggtgagggggaagaggcttgcccagaaggcgaggggaccgttggtgttctcgatgctgtacatggcggcgtagagtccgaagatcatgatgaatatcatgggtgtcatgaactgcgaggtgtcgtcgggggagtttacgctggcgcctacggcggcgaagaaactggcgtagaggaggtagccgcctacgaacatgagtacgaacatgactgccatctccatgtaggggaggttctgcatggcttggagcatttcgttctcgccgcctgtggcgagggcggcggggtcgatgggggtgttcatctgtgccattgctgcggcatcgggtactgctgcggcatcgggtacgatgaagggcaggacgacggcgaggagtacggcgagcatgatgccccagatgaagagttgtgtgaagcctacgagtgctacgccgactatcttgcccatcatgagttggaagggtttcacgctgcttaccatgagttccatgatgcggttggtcttttcctccgtgacgctctgcatgaccatggcgccgtagctcattacgaacatgtagatgaggaaggtgaagatgaagcctgcggcgatggcgatgcctgtgttggaactggtctcctcgccgtcgtcattccacttcacggtgctgacgctgaggcttgtctgcacgtcggcgatgattttgtcgaggttgctgatgccgctggcggcgagtttgtccttgcgcacttgctcgttgatgctgccttcgacgtaggagaggagctcctgcgatatctcctcgcggctgtacatggtgatggcctgcggattgtgtgcgaggtcgtcggtgatgctgatgacggcgagtacgcctgaggtgtcggagcggaactcggggagcacttcgggggctgtgaagaagtggtaggacttcgtgtcctcgagggcggagaagtatttctgcgtcttgtcgactacggcgacgttcttctgggcgtcgtccttgatggtgctgagccatagcggcagggctacgagtgccaccatgatgaagggcatcagtatggtgagcaggatgaagcttttcttcttcacgcggaagaggaactcgcgctgtatgatgatgagggtcttattcattgcttagttttattttggttgtttggttggagggagttaattcgccttttttttcgtgccccagccacctcagaactgcgtccttcggggctgacgtgcactacatggctcattggagttaattcgccttgttttcgtgccccagccacctcagaacttcgtccttcggggctgacgtgcactacatggctcattggagttaattcgctacgctcatggaagttaactcgccttgttttcgtgccccagccacttcggaacttcgtccctcagggctgacgtgcactacaaggctcatggaagttaattcgctacgctcgtggacgttagtcttgcggaaacagtggtatcgtccaagaccaaaggtctttaactcccagccgacaatgtcggcttcgctcccttttaataactccctgccgacttgtaggcttaactccccataagtggcgttcttacgctccccgcgagacgacggagaggaagatgtcgttcatggatgggagctgctctgcgaagtgttgtatctctgcctgctgggcgagcagggcgatgaggtcggagttggagagtgcgtcgtccttgcgtatgaggtagtgtgcgatgccgtcgcgctgcttggcgtccatgacctcgaacttccctgctgcggactgtagtgtgccgctggtggtggtgagttcgtagaggcctgtgcggaagcggcttttcacctcgcgcacgttgcctgtgagcacgacgtgggacttgttgatgagtgctatctcgtcgcatacgtcttctacggatgccatgttgtgggtggagtagatgacggtgtgccctttgtcgcggaggttgaggatttcgcgcttcagcagttctgcgttcacggggtcgaagcctgagaagggttcgtcgaagatgaggagttgtggctcgtggagcacggtgatgatgaactgcaccttttgctgcatgcctttggagagttcttcgagtttcttgtcccaccactccatgatgccgaacttgttgaaccactctgtgaggcggcgtcgcgcctctgctgctgtgagtcctttgagttgggcgaggtatatggcttgttcgcctaccttcatcttcttgtagagtccgcgctcttcggggaggtagcctatctggcttacgtcctcggggcggaactggtggccgtcgaagtacacttcgccttcatcgggggctgttatgcggttgatgatgcgtatgagcgtcgtcttgcctgcgccattggggccaagcagtccgaacaccctgccgcgcggcacgctgatactcacgtcgtcgagcgctgtgtgatgggcgaagcgcttcatgatgtgccttgtttcgaggaatgtttccataattataattaaaaagtaaaaagtaaaaagtaaaaattgaagatgttgagtaaaaagtaaaaattgaagatgatgaagtaaaaggtaaaaagtaaaaaattctgcactataaactgactttaaacattaaactatcaactttatctcgccatgcttttcgcctcccagccacttattacgttaaccaatatccaagaactgttctttgcaagcaaagcgtcagtcctaacggacatgccgagcgaaccgttatccgccgcgtttcagttattgtttaatgtttaacgtaaaggacgtacactgcatggctcgctgaacttaagttattgttttaacggttattgtttaacggttattgtttaatggttattgtttaatggttattgtttaatggttattgtttaatggttattgtttaacggttattgtttaacggttattgttttaacggttattgtttaatggttattgtttaatgtaaaaaggtcgctgcgagcctctcttctgccatgccacattcggagtagcgtagtacggcgcgtcgtgcggcgagtgccacgctgtgctctgtgccttcgatgtcggagcgtgcatggtcgaggaattccatggcgtcgcgtgtggtgaggcgcttcccttgtcgcagcagttggcagaggaggatgtatgcgccatagcggaacagggggcgttcgctcgccagccacggcatgatgagttcgctcgcccagggttcctcgcgcaggaggtggaacacggtgcagtcggcttcctcagtgaagcgtatgctctcgaaccacagttctgcgaggtcggcgctgaactcgttggggggcatcagcatgcctgccagcaggcgacattcgcgaatgtcctcctgccagagggcgagggcgaggcggcggtcgtgtggcagggtggcggcaaactcctgaaggcgaggcagttcgacgccgaagtttactttgtaggtgagtccgcgctggcgcatggcctggctgatggggccattcatcattgcgcgcagttcctgcttgatctcgcgtatcttgtcggggatggtctccgcagccagcggagtctccgtagtttgtgggatgttgctcatgatggtgcaaaggtaagcaaaatctgcaagaattgcatgggtttgtggattttttgagcgaagcaagccttttacaataaacgttaaccattaaccaataaccaatatgcggcgatgcagcttgtcgcttgtcacttgtcactgacgttaaccaataaccattaaccaataaccaatatgcggcgatgtagcttgtcacttgtcacttgtcactgacgttaaccattaaccaataaccaatatgcggcgatgcagcttgtcgcttgtcacttgtcactgacgttaaccaataaccattaaccgttaaccaatatgcggcgatgcagcttgtcacttgtcacttgtcactcgtcactgaccattgtcgcttgtcgcttgtcacttttttgtgtgtatggaattatttcggtaatatattttcatttttaatttatttttcatatttttgccgcgatatagaataatgtgcaacaaatacagtcacacctatgaaagataaatctgctaactctgcgagaaaaggatacatgcgcatcagcgatgctgcatccgaccaactctatgtacagattattcagaaagttggtgtagaaaagcgttatcaagaccccaactattcggcaaagaagcttgccgaggaattgcacgtaaacccgcgatatatctcggctgccttggctttgcacacaggcgacaactacaacgccttggtcaacggctatcgccttcgcgacgcatgccgtatgctgcgcagtccgcgctaccagcaatataccgtcgaggagattggcatcatgtgcggctt

SEQ ID NO: 1159 - DNA, 24488 bp, synthetic construct
  misc_feature 1..24488: note = Synthetic
  source 1..24488: mol_type = other DNA
acatggcgactatgaacaaagattggaactaaaggaagaagaacgcaaggaacaacagcaaaagcttgaattggaacgcgagctaaaacaacagcaggaaatggaactaagcaggaagaaagatcggagcttagggattggcagcggttggggaataagatagatagatgtgtctaattaagtgcccccatgcagctgcggcaggtgacttcattgcacctcgcacgctatcgcggcgggtttcattccgccaccagcctcgccgcttttgcaggaatgaaattcgctgtcgctcataacatacctgcttaaattcatgcttttaatgagatgtttgatgtttcctttagtgtaacgataagacccagtttttaggtcttgtaattacactggaagtaataacgatcattgtggagattatggtgaatgcgaccacaccatttcggcgcaagtataacctcgtattttcgttgtgatttgctttcattctttgaacaactgatatttgcaacaacccgcttttttaaattcagcacgcattttctgttgtgatttgctttcattctttgaacaactgatatttgcaacaacctacgttcaataaggtgtggatagcactgagttgtgatttgctttcattctttgaacaactgatatttgcaacaactaaaagacctaacaacatacatagacccaggttgtgatttgctttcattctttgaacaactgatatttgcaacaacctttaggttgtaactcctctgcaagatctagttgtgatttgctttcattctttgaacaactgatatttgcaacaacctggagtttccgctgggtttgagtgcagatgttgtgatttgctttcattctttgaacaactgatatttgcaacaacggtgcgcaagatccatattgaccttatactgttgtgatttgctttcattctttgaacaactgatatttgcaacaactttgcttgcggtggtggttctacaatgggctgttgtgatttgctttcattctttgaacaactgatatttgcaacaacataacgggttaacggtatcgtaggtaaagggttgtgatttgctttcattctttgaacaactgatatttgcaacaactaaaaacagtattgatatattgaagcgttagttgtgatttgctttcattctttgaacaactgatatttgcaacaacttactaaacgtattgatgcctgcatttatagttgtgatttgctttcattctttgaacaactgatatttgcaacaacactcatcaaatgctattttactaccgcttagttgtgatttgctttcattctttgaacaactgatatttgcaacaaccagtttttatgccggaagcagcgcctaccagttgtgatttgctttcattctttgaacaactgatatttgcaacaacaaatatgacggttaatacctttataaagtagttgtgatttgctttcattctttgaacaactgatatttgcaacaacaaggatacaatggccggcagctatgcgagtgttgtgatttgctttcattctttgaacaactgatatttgcaacaactggatactatgcgtgacctcgtggccagcggttgtgatttgctttcattctttgaacaactgatatttgcaacaacacgaggagctggtaaataaggaacagagccgttgtgatttgctttcattctttgaacaactgatatttgcaacaactcgatttgatccaccctgtgccccttacatgttgtgatttgctttcattctttgaacaactgatatttgcaacaacaattatatatcaccggcttgtcgtcgacgtgttgtgatttgctttcattctttgaacaactgatatttgcaacaaccgtcgatttgttgttgcgaatgccttgcatgttgtgatttgctttcattctttgaacaactgatatttgcaacaacccttatcacaaatgcagttgatttgtaccagttgtgatttgctttcattctttgaacaactgatatttgcaacaacattggaaataaaatccattatagtttcgagttgtgatttgctttcattctttgaacaactgatatttgcaacaacatttaaccttagttgttcatgccaacatctgttgtgatttgctttcattctttgaacaactgatatttgcaacaacaggttccgccgcgataaacgtcgatatggtgttgtgatttgctttcattctttgaacaactgatatttgcaacaaccttaaatcgcttgacaatgaataatcatatgttgtgatttgctttcattctttgaacaactgatatttgcaacaaccgcctatgcctgtatcatacgcctgaatctgttgtgatttgctttcattctttgaacaactgatatttgcaacaacatcacaaatgtagtaaacttttaataacatgttgtgatttgctttcattctttgaacaactgatatttgcaacaacgactatagctgactatatttattcaaacgagttgtgatttgctttcattctttgaacaactgatatttgcaacaacgaacgctattttgctgccaaacggtatcccgttgtgatttgctttcattctttgaacaactgatatttgcaacaacagttattacggcgcctgacttctcatttggttgtgatttgctttcattctttgaacaactgatatttgcaacaaccggtgtgaacatgggcattaaagagcgtcagttgtgatttgctttcattctttgaacaactgatatttgcaacaactttgttcgggtgttttcattatgggtttgtgttgtgatttgctttcattctttgaacaactgatatttgcaacaacccatgggtatcaaaccaaaagctcttacctgttgtgatttgctttcattctttgaacaactgatatttgcaacaacgaacgctattttgctgccaaacggtatcccgttgtgatttgctttcattctttgaacaactgatatttgcaacaacttgatgatccgccggtacttataccattaggttgtgatttgctttcattctttgaacaactgatatttgcaacaacgctgttcgcaagtcgccccgtcattccaggttgtgatttgctttcattctttgaacaactgatatttgcaacaacttgatggtgaatcaggtcttgtttgccttagttgtgatttgctttcattctttgaacaactgatatttgcaacaactatgttaagaatttatcatttagtaatactgttgtgatttgctttcattctttgaacaactgatatttgcaacaacgatatggtttttaacctcatcaagattggcgttgtgatttgctttcattctttgaacaactgatatttgcaacaacagaaattaaccagtgcatctgcgatacctgttgtgatttgctttcattctttgaacaactgatatttgcaacaacgtgcgtggtttaaaaagcaacaagggaatagttgtgatttgctttcattctttgaacaactgatatttgcaacaacttaatttagcagggacaaaggaacttagcggttgtgatttgctttcattctttgaacaactgatatttgcaacaacttgccaataatactccagctttcgacaggagttgtgatttgctttcattctttgaacaactgatatttgcaacaaccgcggtgtaccgcacgatacgcgcctttatgttgtgatttgctttcattctttgaacaactgatatttgcaacaacataccatagttcaaaatgctaaatatcagatgtttatgttcaaatttagaattaaaaaatccggttgctcaggcttccggatttaaaattctaaaacaattccaattgctgcggagtatttggaagctctttttcgtcctttccatagaacaattccatcattccgaactgcttatcggtaatggtcatgatgccgacgtgacctttaggtggaagtattttctttacacgtttaatgtgtacgtcagcattttcacgactgctgcaatgacgtaagtaaatggaaaactgaaacatgccgaagccatctttcataatatccttacgaaacctgctgtagatttgcctgtccttctttgtttctgtcggaaggtcaaaaaatactaatatccacaaaatccggtactcatttaagcgcattcatcaaaacggtagctattcttcatctcctatattgtattcaaacgtgttttctgtatcctgatctatgaagttttcgtcaaccttattgtttatgccttttttaggattaaaattcttcataattggatagtttattttcctgttttttccttcataacacctggctaaggaagcggtagtattttgtacgccgaccattaaaggacttctgcttttctcaaactgtacgtcaaccgttgcaattcctaataattgagatttaatggaattacccagctctaaaaaattctcgccattatcgatgatctttagaacgattaggtcaacatacgggcggtaaggctccataatgtcatcagccaggcaataagcattatatttattccggtgatgaatgcctaacgtcggtattaggccagaacataccagtccgcgcgctacaatagctcgtaatattgcataaccataattcaataaattgttaggaggatcgccctcgcgaccacgaaagaactccacttttttagggaacacatttttccagtaataagcggcagcccgtccttcataattatcagggtcgccagaacgcacggatttggcccaatgcagcatattatcatgcgcaataccacgatctgccaaaaccgctgcctgatttaaaattttggcttggatagtttgttgccaaagctgcttctttagcggttgtgaagcgtcaatttgatgccggaaacgctcgctttgtgtgtcatgcccgtcaatcggtaacatcatccccgttgggtggtgtgtatggttgcaagtaataatagcagagttgttatctaataatgcagcaatacagccgtgtgtaatggtaatctgctgatgatccagcacaacaattcctacgtcctcaataggtactgattttttagattcctgttcacctaaaatttttaagtctggaagatcaataattaattgaccttgctttaagcttaaataggccgggttactgaagtgaagcgtgcgttttatcatattgccccattttaattgtgataagaggttcgtttatatcatttataattgccggataagttctcgtgctttatcagcattgaaagcgccttctatagctttcttgtcaaacaccatgaaatagctgaattttgatccggaaagttcagcccacttattgcctaacctgcatttagcctggctatcggaattgtcccggtcatcgccttttgtttcgatcaggataactttaccggattttgtgccgacaataaaatcgggataatggttagacttatatccattaatactaaatcctttgcccctgcctaaattgcggtgccaaaaagcgatattgggtagggcagctatatcggtaattatagttgtttcaaagttgttcatcaagccttcacgctcatacagcgatttactaatggcggctcctaaaacacctggtacaattagttcggagaaattccatgaaggttcggcttgtatttttccaactttgatcagatcattaaagcgaccttcagcaaaattatcggcatggtgttttatcttggctttgatcttatccgcataacttagttttcgaatcaatatgttctgtagttgttcagcatttaatgaacttaaaatccgctcaatgtaaactcttatttcctggtcggcaataggatacatatcaccgatcatttgaatgagctgatgggctatgtctttaatttgactgtctttgggtttagaaagaatataggctacaaccggctcttttaccatcatgtcttcaattttggtaaaacgagcatcatattcgcttttacctatttcttctatatccactttatataggtcggaagatatttgttcaaagtcgatcttggtatcttcattacttaatttgaattgctgcaataaaggttcttgacttaaaaactccttaccagtaccgaatatgtcgctttgctgtacggttaaataaaattgtggtaatcgcaaatccgaaacaaaagatcggtttgcctctgatagtttatatcgcttaattttatcgcccatttcttcaaatatttgctcatcaacaggctgttttttctgttgctgaataatggcttctaattctgcattttgttcctctgccatcgtttcaatttcttgtaatacgatgtcgtcattttcgaggggtgttaaattttcaggctcaaatgatatgcgtgtactatccaattccggttcactttcgacgatagcttgctcagggaaaagaaaattttctaatgggtcagctactgcacgttgtctttcttcttctctcatagtatcaatttcacgatagtcccggtcactaaagcctgcggcctgtaacccttttacaatgctttggagcgtatcattgaacttagcagaagcagttaatacgtaagaaatatttaataatgacgcgctgtgcttcattacatatggttgcctcaatacacggcctaatatctgctccacatctacagcagaagatttatcagcaagagaggccaatacataggcaaacggacagtcccagccttcctttaaagcattgatcgtaatgatataacgcacttcgcattcgcgggaaagtaaatcttcaccctttaactcatcaatggttgctgtttttattttgatttggttttcaggtatgccaatacttagaagctgcctttttaatttttcataggtgatattttcttctccaattttgggttgtgcctgaaatagaactatcgggcggatgtatctaccgccgtttttttcctgttcgatagataataactccagtttacgctgtaaatgcagcgcgctgttaactacctcggttttatcatgatgattgtaaacaataaccggaagttttaccatgtgctccttttttaactcaatagctggcaccaggctgacgatattgctgttgtttttaggcgtagcggttaaatcgagtacaaaagaggggtttaacgcattaagcatatccacgcttaaattactttcggcgttatggctttcatcaactacaataactggctgcatactgcgcagcacattgatgagtgcagtttcatctacgtcttcgaggaggtcggcagtattacgatagtaagaagcgaaagaagcaagctgaccgttttcctggtacactttccggtcttctttgttttttgcccgtaagctgccaaagctcatcacaataatggaaagctgctctttaactacagaaggattaaaattggaaccttgtaacagatctttcttttcatagacctctacccggtgattaaacaagctgttcaatttttttctgtagggatggttgggatcacttaaagccaatacagtctgattgagcagattgctccacggaacaagccaaaccaccactttaggcattgcagatgaataagcattaaaaattgtatggagggcattacaggcaataaaggttttacccccggcggtgggtaccttgatacacacatgtgcggcattaggaatagtgtttttgtaatgctgcatcccttcaccagtcaaggggttataagggcctattcgttcttcccaatagtggttaaatgctttgtctgtctttttatattgctggacatacgctaaatatatttccaagtctttgattaccttgtattggtagctttttaattccatatttaaaaacggcttatatcccttggtatctttttaaaaacgatattattcttgaacaggaattcttttgacagcaggcaattgtctgcataaataatgtattgcccggcttttacattaacggttgccaatgtttcaaagtcaagtgaggtaagatgtgtgggatgataaataaaatagtaggcggtattgtgatagattcctaataaggtatcttcttttgaatgttgattagttggagctaaaaaattacgcgtttcactataccatatatagtttcttattttctcgatgccaaccgcctcatttagatattcactattctcgccaacaaataaggtttcgccaagctcataatactcaaaacttccacctgtaccttcttttttaccgtagccgtttattacccgttttaccctttcagcagtaatgttttcggcatagtcttgcatttcgattagaatgaatttacggtcaccaccatcttgtttattaagattgagtactgcatgtccagtggtcccacttccggcaaagctgtctaaaacaacggcgtcttggtctgttgaatgaagtattagaaattcaattaaagtgaatggtttaggggtgtcaaaaacatcttttttgccgaatatttcagtcaatgactttgatgcgtcagccgtatttgtaagattataaattatacttcgctctttaattgtggtttcgccatcggtggtatgatacgttttttcataaggtatgagtttgccatttctttgctcccaatgaattaaatcgctttcgattaaattattcatagtagttttaccgatgcgccaccgccccaaattaccatcgggtgctgtaggtaaataatcaataccatttggatcaacgattgggaaatgcatagttggcctgtcctcttttctggcggcgcttccccatttttccaacttggttaatttgaatcttccattcttgtcagccttattaaattcactttcttgtttctttacgatggtatcgatccaataaaatgaattagatttttgataggcgcagatatattcatgttctgtaacgaaatacttatcggtctgtccaccgccttctttttttctccaaatcagatttcccaaataattctcgttgccgaagagttcatcacagatcagctttaggttagtttgttcattatcatcaattgaaataaaaataacaccgtctttggctaatagcttgtgaagtaatttcagcctcggatagatcatacacaaccatttatcatgactggtaaggtcttcacttattttaccaacaactcttcccagccatttcctgatttttggatcgttaacattgtcattatatacccaattttcattgccggtattataagggggatcaatataaatacatttgattttaccctcatactcaggtaatagggcttttaaagcttcaagattatcaccgtgaatgattttattaggagatgtgccggtaacaggggggccgttaccgttaaaagtatattgatgatctaaaactttgaaaggaacatcgtgatggtgattgatgaccttatcttttcctatccagtgtagtgttggcatatatgtagttattgcatcgctgctaacaagtacatatcattgaggataaaaaaatagggtgtaatcctcactgactccaacctacagatggtaccgcgaagaaccagggagaattgaatacagcaaaggacacacccatgcggatgcatcgcttacactgtttccttctcccttcgaaattcgcggtttttccgtagaggaaactgttagcaacgctatgcgtttaatattttatgtttaattatttctttagttcattgtgctattttttatcaaatatatgtttttggttcacattgatgaaaagaacctttttagagtgttagtgctcatttgaaaatgttatggggaggtataaataaagaaggcgagttgccccgccttaaatgttttcacaacggaataatccttattgtgatttgctttcatttgaatatcaaagtaaaacctttaatattacatttccaaactttaaactaatcgcaatgaaaacaatccttggccttgatttaggaactaactcaattggttgggcacttattaaacaagattttgaaaacaaggaaggatcgattttaggcttgggaagccgaataatcccaatgtctcaagatattttaggcgatttcgacaaggggaactctatttctcaaacagcggaacgaacacggctgagaagcatgaggagattaagggaacgccatttgttgcgccgggaaaggttacatagagtattaaatgtacttggttttttacctcagcattatgcagctaaaattgattttgataaacgcttaggcaaatttttacctgaaacagaaaccaaatttgtatatgacagtaatggagaatttctttttaaaagatcttttgaggaaatgcttgccgagtttaaacagcatcaacctgaattattgaatcgtaagaacaagaaaggtgaaagtgccaaaatacaatatgattggaccgtttactatttacgcaaaaaagcgttgacaaaagaaatagaaaaggaagaactggcctggttgctattacactttaatcagaagcgcggatactatcagcttcgtggagaggaaactgaagaaaagccaaataaactggaagaattttattcattgagaatagcccaagttacggctgatgagccgcagcgtggcagtaataagatatggtataatattattttagaaaatggatgggtttatcgcagggaaagcaatcaggctttgtttgactggaaagataaagtacgcgattttattgtaaccactgatttgaacgaagatggcagtataaagaaagataaagaaggtaatgaaaaacgaagttttcgttcaccaaaagaagatgattggaaattacttaaaaaaaagacagaaagcgagatcgatagatcaaaaaaaactgttggtgaatttatatatgatacgcttttgcaaaaaccagatcaaaagataaaaggcaaacttataaggacaattgaaagaaagttttataaagaagagttgatccgaatcctgaaaaaacaaatagaactaaattcaaacttgaaagatacatatctgtataagcaatgtgtagaagaactgtacccgcacaacttacaacatcaatcaactttgcttagtaaggattttttgcacctttttattgaggatatattatattatcaacggcccttacgcagtcaaaagagcacaataagtaattgccctttagaacgaagaacttttatattggatggcattaaaaaaatagagcctttaaaatgtatttcaaaatcacacccgctttatcaggagtttagattgtggcagtggataagtaacctgcgtattattaacaaagacaatgattgggatgaaaccgctaaaaacctggaattaaccggtggcgtggaaaccttatttgattttttgacgcaaagaaaagagatagatcaaaaggccttgcttaaatattttaagctaaaagagacaacttaccgatggaattatgtggaagataaaagttatccatgcaatgaaacccatacaatgatcgcaggccgtttagcaaaagtaaaaggtataccgcaagagtttttaacaaaggaaaaggaagaggaattatggcatgtcatttattcggttaccgacaaattggaatatgaaaaagcactaaagtcttttgctgtaaaaaaaggccttgacatagaaagcttttttgatgcattccgaaaattcccaccattcccggctaattatggttcatattcagcaaaagctatcaaaaaactattgccattgatgcgtatgggggaatattgggattgggacaaaattgataagcaaacaaaagaacggataggaaaatttattgacggggaatttgatgaacaaataaaagaaaaagtacgcgaaaaaatagggaagcaggctttagtcagcgaaagcgattaccaggggttacctgagtggctggcaaaatatgtggtttatgaccgtcattcagagcatagcgaagcgggtaaatggaatacagttactaatcttgaagaatacttacgattatttaggcaacactctttaaaaaacccgatagtggagcaggtaatgatggaaacattaagaactgtaaaagatatatggaattactatgggaatggcgtagagaatttttttgacgagatacacatagaactgggaagggaaatgaaaaataccaaaagtgatagggaaaggatatcaaaacaaaacgtgattaatgaaaataccaatcttcgcgtaaaggctttgcttattgagcttttaaatgataatgacattgaaaacgtgcgcccatactcgccgatgcaacaagatattttgaaaatatatgaagatgctgttttgaatgacagcattgaaatacctgaagatattgaaaagataagcaaacttgcccagcccacaagttcacaactacaacgttataaactttggttggagcaaaaatatcgatcgccatataccggggcaattattccactgaataaactttttacgcctgcttacgaaattgagcacattataccacaaagccggtattatgatgatagttttaacaacaaggtaatctgtgaagccgcggtaaacaagctaaaagataaccagacaggattggagtttatccaaaatcatcacgggcaaattgtagagttgggtatgagagaaacaactaaaatttttacagaagatgagtataccgattttataaaacaacattatgctaaaagccgagcaaagaaaaacaatttaatggctttggatataccagagaaaatgattgagcgccaattgaacgatactcggtatatcagtaaatttattatgcagaccctatcaaacatagttcgtacggaaaaagatgatgacggcggtaattcaaaaaatgtattggcaagcaatggtaaaatcacatccgatttaaaacgggattggggcatggatgctatttggaacgacttaatattaccgcgatttgagaggttgaacaatatcagtaacagtacaaactttacaacttataatgacaggtatcagaagtatttgcctgtggttcctttcgaattacagaaaggatttcaaaagaaaaggatagatcatcgccatcacgcaatggatgcacttatcatagcttgcgccacacgcagtcatatcaatttcatgaataataaaaatgccttagacaaaaagaaatcttctgcgcaaaaacaaaatgaacgttttgatttgaagaaaatactatgcgataaaaaatataatagcagttcaagtgaaaactacgagtgggtatttaaacaaccctggggaacctttgtacccgacgcaaaggaaaagctggagcaagtgataataagctttaaacaaaacctgcgtgttattaataaaaccgttaatcaacacgatattttaaaagatgggaaaaaggagtcttttaaacaacacaaagggcaaaactgggcagtaaggaagcctttacataaagatactgtatcagggttgatttctttacgaaagaaaaaaatggcatctatttctatcgcacttgacacccctgaaaacattgttgataaattattgaagcatcgtatacaaaagttcatagctgagggtaatgataagaaaatgataattaagcattttaaagaaaatgaccaccaatttaatggacaagatattaataaaatagaagtttaccactgggaaaatgataatgttgcatcaagaacaagccttgatatatcatttaacaaagcaaagattgaaagtatcaccgacacaggtattcaaaagattttatttaagcaccttaaccactataatgatagtccagaaatagcatttacgcccgagggtattgaacaaatgaacaagaatatcgttgatttgaacaatggtaaattacatcaacctatactaaaagtgcgcacctacgaagcaagaggaaataagtttgctgtcggacaaacaggtaataagaaatcaaaatacgtagaagctgccaaaggcacgaatttattttttgcaatttatgttgacgtgaacgggaaacgcagttatgagacggtccctctaaatatcgttattgaacgtcagaaggaagggttgtcatcagttccagaaacgaacgaggccgggcaaaaattattgatgcacttgtgtcccaatgatttagtttatttaccgactgaagaagaaggtgagtttggaatacctctcaatttcgataaattagacaaagaggccgtaaatagagtatataaaacagtaagtttttcaacttatcaatgcttttttattaagcatgacgttgcaacctctatcgtaaataaaatagaattttcggcattgaacaaaatggaaaaatctgttgaaggaaaaatgattaaagattgttgcgttaagcttaagattgatcgattgggcaatatttcacccgcataaattaattctatattcaccacatccgcaaagatagcccaccgccgggataaaaagtaaaggccatgcagagcgggccattgtgtttttcttttcagcggtggcccggccttgactgtttacccggctcgcactgttggttgcttaagtggtaaatatgggatggtgtgtttcatctggcttcgcggcgaaaacgggtaattacattaaccttaaaatactccactttttaatcacaaatgagattagacattaaactgtgtattaatcggcattgatttaagcgcttttccaatcaatatttgcttcataaattgcatcataattattctgccgattgtttatgaaagataaccgattaaatctatacagggcgctatttaaaggtagagaagatgtatttgcgttaagatgggagaaaggtggcaaaagcagctatatgccagcttacagtttcgatccgcaccgataccgacagcatcaaatgaaaggcggtacattccaaacctttgctgaaaaaacataccaaccactaacagacgaccatttaataaaacatctcaaaggcgaacaggttgtaggcctttacccattacttcaagataatacatcatggctcatcgcggctgattttgacgaagcaaattggatcgaggaatgtagggcatttattaaaatttgtgataaatatgatatccctgcccacttggagcgctcccgttccggcaaaggcggccacgtgtggatattttttgaagaaccctatgaagcatttcgaagcaggaagataatgatggccctgctacagaaagcaggcttgatttctgttttcgataaaaattcaagtttcgatcggcttttccctaaccaagattaccattcaaaaaaaggcttagggaatcttattgcattaccgttaaacaaaacgagcctaagtaatggcaatagttgtttcattgatcctgaaaccttagagccctttggtgaccagtggatgtttttaaaaacgattaatagaatcactattaaccaactcaattacatctacaaagagcaaactgaccccgatgaactttcaacaggactatttcaaaaagagcagtacgtagctggtaaattggcaatagtattgaacaatgaaattcatattagccgcataggcttacctgcttcagttgttggctttttgaaagaggaactaaactttcccaacaatgaataccaggtaaaaaagaatatcaataaaaacacttttggcgtaaaacgctactttaaactattgaatgaaacaccggattctatttcaattccccgtggatttataggtaggttattacggttttgtaaagagcagcaaattgaatatgtgctcgaagatcaaagaaagaaaacagacttaataagttttaaaggcactatttcattaagggagtatcaattacccgcgcagcatgcagctactaaaaaagattttggaattattgtcgctccgcctggctctggtaaaacggtattgagtttggctattataaaagacaagcagcaaccggcactcattttagttcatcgcaagcaattggcagaccaatggatagaacgcatagaatccttcctggggattcccaaaaaggatattggacgtattggtcaaggaaagaacaagcccggtaaacatattactgttgccatgatccaaagtatggaaaaagccctggcaacatctgaaaatgcagcgttgatgaatgcgtttggcaccattatcattgatgagtgccaccatgttccggcggaaacttatcagcgtgttattgggaaactcaatagctactatatgtacggccttaccgctacaccatttagaaagtataacgatggcaagttaatatttattcatttgggagaaattatccatgaggttaaagcaccggaggtgcaaaatcaaaatggtacgcagattatcattagggataccgatctgttcgtaccctttaataccaaaacagacaagttcgaaacgctatttaagatcttgatccacgattcagcaaggaatcaactcattttaagtgatgtgatatcacaactaaatgccggtagaaaagctgttatcatcacagaacggaaagagcatatcacttctctgcaacaatatttaaaacaaaattacgataccatagcattaagtggcgaagattccgacttatctaaaaaatctaaatgggctgctataaataaaggtgacttccaggtgctgattacaacaggccagtattttggcgaaggaacggatattcaaaatatagaatgcttatttttagtttacccgttcgcctttgaaggcaagctcatccaatacattggcagggtacaacgatcagaagtatcgccaattatttacgattaccgtgaccataagatcagctacctggaaaggctgtttcaaaagagaaatctgtattataaaaagcttgatcaacataacctaacgagtccaatagatgaaagcgaaatagtaagcggtcaaatcaacgagaaaattgatgtgccaattgaacaattagaattcaggtttggcagcattgcgtttaaacatatcattgctgacttcaacggtaaggaagttgaatttgagatagagaatttaaatgtcaggccggagtttacggtacttaagccctactttatccggttccttaaaggtacaacggtattagtaaacatacgggctacattgcaacacaataggctggtatttaaatcagcattctccaacgaccttgataaaataaaccgtgaagtcatagaaagtgtaaagttccgcttcttaaataaagaaattattaaaggtatcccggcaggtgaagaaaatctattggatgccgggcaagtgcaaggcggtagtgaacaattgatttatacaaatgaggatgatctatttgacaacatactggctcttaagcagtataagcaccaccgccatcttcgttacctttcccaaaagcatgaacgaactatattgaaacttcgttttgtattggagcccttttctttcgtgtttctactttccggcaataaccagtaccatttgatttgggaaacattagatacagaagaggctacttatatatggcatattgataaatcaatttacgaactcgaacggagtataaaacagattgatggactgcttggacagataagaacgaaagggcggcaacaatatctcgaaaccaatcctgaacactttagtcgcatagtacacgattatacagatgatcaaaaagggcttataatttggaaagacctattggaagaaaaactgttctaaatcacaagcattattggctacctgcccaattgcccctataaagtttcttttgcccttatacaacgtgtaatatgtgccttttcctgccatcttaaccgtaattccttctcagtcagtatttgagatcattctacgcagcgcgcaaattggagcagctattgcggtaaatacccaattgattatactttatgggaataggtaataagatattatgactaaaaaaaacgtgtagtttctgtttttttagacagatggcgatgaagaaacccaataaaaatcaaggaaagtgttggactaccgtgggctaaaatgaatcaagctttcagatgcaactctaaaaacctgattatcaattgtaaaacacaggattagagccgctgacctctagcattccatgcttttggcaaggaaatgttcctaataatcaattggccaatttgagcttcaataattgcatatcctcacttactttagagtctaaaattttagcgtaatgttgcgttgttctcatgtttttatggccgagcattttacttacactttcaatagagacaccattggccaaagtcacagacgttgcaaatgtatgccgcgcaatatggaatgtcagttctttattaattccgcaaacgtccgctatctcttttaaataactattcatcttttggttagataatacaggtagtaccttatcctgatcggcacattcggggtgattttcgtatttctgaataatttgtaaggcttgcgttaaaagcggtatccgggatgctgtatcggttttttgccttgtggtgaagatccattgctgcccgtctatacccttaataatttccgagcgtttaagttgcttaacatctatataggccagcccggtataacaacaaaaaataaatatatctttcacctgctcaatccgcaaactggaataggttttaagagccattgtttctaattcctctttggtcaggtaatccctcgctaccacctttactctaggcttatacttgataaacgggtctttgtcgagccatccgttatcaatacacataaggatgatttttttaaaattcttcatatactttacggtagagttattggcacacttgcgttccgagcgtaaataaaaatcgtaggacataataaattcatggttaacgccttcaatatttatatcatctaccttgtatttccatttaagaaacgcctgggtatgctttaaactggtttcgtaacggtcggctgtacctttggcatattccgttccaatcagtgccgcaacctgcctgttatgctctttaaagatcggtatcagcattttacagctttctacatcatcttttttaagtaaaacatttttcaggttaactgcggttaagggcagtttcttttctatcaggtgccgatgaatttcataaacctcgtgttcgagggcttttaggtagttgttcaacgagcgtacttcctcactcgcgccgtttagtttctgtccgtttgcattccatttgtcgggattgacataacgtttagaggagatctcaatacgtttcccatcgactgtaacccgtaaataaacaggagcagtaccatttccagtcatttttgatcgcttcacgtagaagagtaatccaaaagttttgttcatcgcttaagcttttaaaagttataaaattagttccttttatgcctgctatcaagatgttcaatgtttgaacaagctcaataacagtaacttataagctttctggtgacctgttgggcctttaaccctcacaggtcaccaataggtcaccagaagaatgcgattatttggttttatttgaataggctataaacaaaaaacgccgtaaatgattcatttacagcgtttttgatgttctttaaaacatgcttagtggagccggagggattcgaaccctcgtccaaacatggtataaggtaagctttctacatgcttagcttctgtttaattgtagggaaagggaaggtcagtcgcttacctgtaccgttttccttaggtgctttatctcgcccgctatgcacaccttaagcaggccagtttcatctttcgatgccccggttgccgatccgatgaaacggaaaaccggcgggacaaaagctatttaattctaaattaagcagctaaggcgtagttattttcgccatttgtaagtttgagcgttctgattaaagcgctaattcacccaacgcgctgcatgcttacttacttatctccatcctgtcaattccggtcgaccccatttttttgagttcgtaattgccggtaggcattttgcagttaagggtacaaatatacgtattaattttgagtgacttattcataaccggcacatttattaaaaacatattggctaatggccagttaaactcgcctacccgataacgtttttaacgacgggtattttacttaacagatataccaaaagccaggataataagaaacaacataacgcaatggcagggatgctaaataatggtgtaaacagggtgtaattgatctccaatagatcaaaaatagacaggattaatgcatggctaaggtaaataccaagcgtgtattttccggcattatccattatacgttttattaccggggacagcgttacccgggtatgttttgctatcagcaaagcacttgccgaaaatatagctataaacggccccacaggttcataaaacagggtacttagttcgtgcttttccacctgcatatagtaagtaccgtaagcaatcaaaactacaaggctaataaataccaaaatggacacaatctgtatcttgctgaagttaaattgcttataagccaggtaatgccccagcactaaataacctatatagccggtaaaattatgcagatcgaccgctgtattaaacttactgaggtatggtacgcccaacagtagtgttaaaaaccatatcgccaaaaagaacaatatttcccgttctgtagcgtgttgaacaaacttgcttatgatcgggatcatgaggtataatcccatgagcaggtaaacataccacaaatgataataactgcccgtttgaagctgatgcagaacaaattttatgtttgtccatgtattatcaccaaaagcaaactcctggttatagtatttatagcttacataaaccaaactccaaaaaaagaatggaagaataagcctgccgatgcgttttttcaaaaaatcacctaactcatattctctgtgtagtagtaaagcgccggttatcatcacaaaaacaggtacagcaaacctaaccaatgcgttataagcatccccaacaatccaattgtttaagggcaccgttttatactgaaaaagtagtggagaagcagtgtgcaatacaacaacggcaagcatagatagcaaccgcaaattgtttatccaggtaatattttgctctttgtttcggataaccgtttcgctaaatttcatcgcctaaaaataagttattttgttttacagcaaataaatttgttaagtaccttctctgatctgtacaaccgaacaataataccggcatatctttcgtatatttagttatggatgaaagcgacgttgagcgacttattaagataagcaaggagcgacctttgttgcccgaaacctacgtcccctggaatattgatcccattgcatcggatatttttttaccagaagtacttaactcccttcagggacttgatatttacgataaccttaccgacagacaaaagcttgatttgggtcggcatgaagtagtgcaggttttgtattcttatggctggggcgaaggtttattttgcgtatttatgagcaggtacatgcttagcttgcagccaacagatgttacctatcgctttttactgcgcgaactgattgaagaataccgacaccaggaaatgtttgcccaaaccgtacagcacctgcatggtcaaccgttgaaacctactcctctgcacagctttattgggaagtttagcaccaaatatttaccgcacgattatcttttcatgggcagccttgccatagaacttgttacagatacttacggcaattattctcgccgggataataatgtgtatacggtattaagaaaagtattcgagttgcataatattgaggaaggccgccatattcattttaccaaaggactattgcagcaatacacgcaaaaggccggctatttaaaacggacggcctatagttttgtggtgctattcaacatttactttttgcgtaccatgtatgttaaaaaggaaatttttgaacgattagaactcacgaaccccgagatcatttataaagcggccttcaacaattataaacaaaaatttgcacaaaactgcctgcaaaacatcctggaatttgtagatagctggggcggcttaaacagggcaacccgctgggcctggcgcagattgcttgatgccaaaatataatacctgttaagtaacagggtttatctttttcacatacaactcatcaacaaggatcatcaatatagccagtaacggtacggccaatataactcccaaaacaccggacaatgtacccattaatacttgggcaagtatggtaagcgccggcggcaaatcaatcatctttttttgaataatgggcgtaaccacataactaacaacagtttgtgttactatatacatcagcgctactataatagctgtatttgtgctgatggtaagtccaagcaatacgccggggatcatggctacaagcgagccaaagttgggaatgagtttcaataagcctgcaagtagtgcgagtaccaaagcaaccgggatactcatgacacccaagccaagggtaagcagaataaataccaataccattgataacatcataccttttaaccagcctttgagcgacaggctaatacggttaattacatgtcgccccaagtctttcttatcttcgggaatcaagcttatgataccattcttatacagatcggggttggtggtaaagaatatcgccagaaatagaataatgtacagatcgcccattacgccaaaacttgtactaaaaaattgtttcgcggtggtaaacaactgatctgaattatcgtctgataaattggccagtatttgactgccaatatcagtttcggccatcttctctttggctgtatgtatggtatttggcagcgtatggcttaaaaccgatacctggttggctatttttgttcccataaaccaaaatagtattgccagaattataaacgaaccaaccaccgaaacggccatacttaggccgcgcttccatttggtttttcgctctatcatatctcccaacccatgaaaatatacggctattaaagtacctgcaagtaccatcaataatacattaaaagcaactcttgcaatcagaataacaaccacaagcaacgcaactatcgccaccgtgtgccatactttttgaatataggtaagttctttttgaattgatttattggttggttgcttgttttcagatgacatagatcagtttttaatggatttacctatgttgacaatatttacacttaaaagttttagcagcctcttaatattgttaaattaatattaagaatccgccctacaataccaaatttcaataggcggattaggttattttgtcatttaacgccctgaacatatcgaaaatccatagataggcttagggctattaaattttgtgttaaatttttagcagattatttcgggataaaataaagtttaaatgtaattggcaaccatttggcgccatgagcgggcgcggtgcgcttcttcgtcccagatgtgcagggaggcgcgaatgcctttttcggcaagtttatcgttcagggccaggttactgcccagcaacacatcctgttgccctactgccagcacaatggggatctgcttgatgctgttaagctgatcctcgtcggtaaggttggtgaggtattgcagcggcatattaaaatagatattctcgtcccaatagccatccagcaaatctccataatggcctattttgttggtaacatcgtagcggccgctcatggccacaaccttattaaaagtatgaggatggcgcaaggcaatattaaccgcatgaaaagcacccaaactacaacctgccactattttaaacgagccgggatttttttgttcgataaaaggcatcacctcattcaatatataattttcatattgaatatgccgttcaatccgctgcgcaggatggcttaggccattataaaaactttccctgtcaatactatcaacgcagtatacctgtataaaaccgttttcaattttagatcgcaacgattcaattaccttccactcctcatattcgtaaaagcggcccatacgcgccgggaaaaataaaacagacgcgcctgcatgcccaaataccagcatttccatatttttttgaagtgcggggctgtaccactgaacgtattccctattcatattagatgctgcaatatggtggtactgtatgatatttatattaactcagtatgaaaactttctgataatcgggcactgataatttgtttccaaagggcgtaacccttggggcttaaatgaagaccatctgcctgaaagtattccttttcgggataaccatccttattcagcatctggttataaatattaatgaacttccagttattatcatg

SEQ ID NO: 1160 - DNA, 24485 bp, synthetic construct
  source 1..24485: mol_type = other DNA
  misc_feature 1..24485: note = Synthetic
caagcgccacctctacaggaaagaggtcatcatcaacgaccctgactatgctgccgatgccgccatgcttgagcgcatcagccgcgaggtcgaagaatattcgcaggagcacaacctgctccatgccccgaacccgataaaggtgttcttccgcaacggcgacgaccgacggataagagaaatcaacgaggagctggaagccgtcatcgaagatttgtcaaacacgagggacaaggttgtgatgaacgagctgaacaactatcccgtccttgccacccacgctcacacccgtcccttccgccgccgggggctcaacatcatcaccggcatcatcctgcctgccggcctgttcttctatctgcggatgtgccggttccgccttcgcctcatgcgcgacctgaaggctatcataaagaccaacggagcgattgtggaaaggatacgggagctttcggggagtgaggagcgaggagtgaggagtgagaatagctttaaggcttcggagagcaaggaatgagaacaaaaggagtaatctcccttctccctacacactcctccctccacgaaaactccacgctccttcctccccgaaagaaacaataagaccaaaaccaatatataaatatgtcagagattagattaagcacaatagaagaggccattgccgactttaaggaaggtaagttcgtcatcgtcgttgatgacgaggaccgcgagaacgaaggcgatctgataatcgctgccgagaagattacacccgagaaggtcaacttcatgctcaagcatgcccgcggcgtcctttgcgctcccatcacgctgtcacgctgcgccgagctggacctgccgcgtcaggttgaggacaacacgtcagtgctcggcacaccgttcaccgtgaccgtagacaagctcgaaggctgcaccaccggcgtatcggccgccgaccgcgccgcaacaatacgcgcgctggccgaccccgcgtccacaccgcagaccttcggccgtccgggccacatcaatccactttacgcacaggacaacggcgttctgcgccgcagcggccacactgaggctggcgttgacctctgccgcatggccggactctatcccgccgcagcgctgatggaaatcatgaacgacgacggaacgatggcgcgtctgccggagctccacgtcatggcagaacagttcggactgaaaatcatctccatacgcgatatgattgcctatcgtctgaagcaggaatcgctcatcgaggtcggtgaccgcgtcaacatgcccacaaaatacggccatttccagctcatccccttccgtcagaagagcaacggactggagcacatggcgctcatcaagggcgagtggcgtgaagacgagcccgtgctcgtgcgcgtccactcgtcatgcgccacgggagacatcctcggaagcatgcgctgcgactgcggcgagcagctccacaaggccatggagatgatcgagaaggagggcaaaggcgtcataatctacatgcagcaggaaggtcgcggcatcggactgatgaacaagattgccgcctacaagcttcaggaagagggctacgacactgttgacgccaacgtccacctcggcttcaagcccgacgagcgcgactacggatgcggtgcccagatgctcatgcacctcggtgtccacaagatgcgtctcatgaccaacaaccccgtgaagcgcgtcggcctcgaagcctacggcattgaaatcgtcgagaacgtcccaatcgaagtccagcccaacgagttcgactaccgctatctccagacaaagaaagaccgtatggggcacaatctccatctctgacttttggacacagagacacggagacacagagaattcataaaaacgcaaaggccgcaaagttctttttatattcaaaaagaagaacccgttttatagataaaatctctgtgtctccgtgttccgaaaaatgtcctttgcgcctttgcggcctttacgtttaatgacaaagtcacacggggagacgcgccgtcattatacaatctttacaaaatcacctccgtccggatttccgttttttgcgatttcacacacccgtaaggccttccttggctccgcctctccccatttctccgacaaaggacgcgcattttttccgtccgagtccacccgtaaggccctcccggcttttccagagcaaagaatccactgcgtttatgaccgttgattttgtcctgaatagttcccgttcttctgccgtaaggccctccttggcttaccgcggggccgctatcgcagtacgacggcggccccgttgcgacctcgggagggtcttacggcaagaccacggccgccccttcagaaaacggaggaagccattatgttcataacgtactgtcaatcaaggtgctgcagtccatgtaaatgttcttctccgaaggcccctgatttttgatacgctcatgcttgcggtatttcggagcgaggaaaaagaaaaatgaaaagtgcccgttcttgcggctcttaaattcagaattttgagaacatgcacaactcttttcctctgctcaccgcaccactcaccaacacataaaatcccggccggccccttcttcccacttcccccagccctcaaccgacaacactcaactttcaacttaaaacttaaaaaaagcaagaattctgctcccgaacgaaataaaatacttaattttgcagttattataatacaattatataaatatggcacaactatcagaccgtttgcagaggcttgcaccttcagccacactggctatgtcacaaaagagttcggagatgaaagctcagggcattgacgtaatcaacatgagcgtcggtgagcccgacttcaacacccccgaccacataaaggcggccgcaaaaaaagccgtggacgacaattactcgcgctactcacccgtacctggatacgccgacttgcgcgaagccatcgtggccaagctcaagcgtgagaacagtcttgactacaccatggcagaggtccttgtctccaacggagccaagcagagcgtctgcaacacgttgatggcgctggtcaacgacggtgacgaagtcatcatccccgccccctattgggtttcctatccgcagatggtcaagctcgccgggggcgtgcccgtgattgtcgaggccgggtttgagcagaacttcaagatgacgcccgagcagctcgaagccgccatcacaccgaagacacgcatgctcatactctgctcgccgagcaatccgaccggaagcgtctattcaaaggatgagctggccgcgctggccgaagtcatcaagcgccacgacgacctcttcgttctggccgacgagatatacgagcatatcaattatgtgggccgccacgaaagcatagcccagttccccggcatgaaagaacgtgccatcatcgtcaacggcgtgtcaaaggcatacgctatgacaggctggcgcataggatatatagccgctccggagtggattgtcaagggatgcaacaagctgcagggacagtacaccagcggtccatgctccgtcagccagaaggccgccgagttcgcctacaccgcgagccaggactgtgttgaggagatgcgcaaggcgtttgagcgccgccgcgaccttatcgtcagcctcgccaaggatattcccggactggaggtcaacgtacccgaaggtgcgttctatctcttccccaaatgcagcagcttctacggcaagaccgacggcacggtgacaatctccaattccaccgacctcgccatgtatctgctggagcggggccacgtggcaacagtaggcggagacgccttcggagaccccgaatgcttccgcatgagctacgccacaagtgacgagaatatcatcgaggccatgaagcggattaaagacactctggcagagttgaagtaaatcctaaaccacaatattcatacagcaggacaataaagcaaacaaattttaataaatacatagttaaaagatgcaaatcaatcattccgtctgctttattttgttatctttgccgttagaatggagtggaaaaacatcaagatgtttggccattgcggcctaatctaatgataaagacaatacaacttaaatttataataactaaaaaattaaaaaacaaattatggcaacaacaacaaaggctgcagccccagccaagaaatcaacgggcacagtaggagttaagaacgctatctggattctcgtcgtatgctgtataatcgcatactgcatttacttcttcgtatttggagatcccagccacttcgttaacggcgatcccaagggacatcctattcctggcgacatgttaggtatcgtttacaaaggaggttatgtagtaggtcttatcatcacactgttgctttcagttatcgctcttacattcgagcgtctcctcgctcagagagtttctttcggaacaatgcccctcagcaagttcacagcagaggtaaaggttctcatcaaggccggcaagttcgacgaggctaatgctctctgcgacaagatgaaaggttctgtggcaaacgtggttaaggcttccatcaacgcttacaaggaagccgagagcaacaacactatgaagaaagctcagaagattgccaagattcagcaggctcacgaggaggcaactcagttggagatgcccactctgcagatgaacctcccgatcatcgctacaatcgtcactctgggtactcttaccgctctgttcggtactgtgttgggtatgatcagttcgttctccgctctgtcttcaagtggtggtgctgactcagccgccctgtctgccggtatttctgaggcccttgtgaacaccgcttccggtattttgacttcatgggttgccgttgtttcatacaacttcctcacaaaccgcattgacaagctcacatacgcactcgacgaggttggttatactatagctacgacatacgacgttaaccacacagaggaggcttaattgttttaccttttaattagtttataataatgggtaaaataaaaatagaaaagaaggacgtctggatagacatgacccctatgtctgacgtgatgacgctgcttctgtgcttctttatgttgacatcaacattcttgcagccggaaccagtccaggtcaacacgccaagctcggtgtcagaaaagaaggtgcctgagaaggatgtgctcaacatcctcatcgacccgtctggaaagatattccttggcacggacaacaagaacgatgccgtgaacatgcttcaggctatggcggacaagttcggtgtctcactgaacggagcacagatgaagaagttcaaggaaagcagtgccataggtatgtcaatcaccaagttcccggattatctgaatctggaatcacagcagatgacggagttcatccagacacagggcgttcctaccgacagtattgacggtgaaaaaagtcagttccaagagtgggttacagccgcaaaggacgtaaaccctgacatcaaactcgcaatcaagtgcgatgccaagacaccgtataaggtcgtgaagaccgtgatgtcagagttgcaggacatgaacgagaaccgctaccagctcatcactaaccttaaaaccggggaggaataagacatggcaaagaaaaaaggaagtaagcagaataaaaagcagacccgagtcgactttacgccgatggtggatatgatgatgcttcttatcacgttcttcatgctctgtaccaccctgagcaaaccgagtgcgatgcagctgacgatgccgagcaacgacaagaacctcgaaaaagaggacaaatccgtgaccaaggcgtctcacaccatcaccatctatctggccggtaacgacaagatttattatatcccgggactccccgaatatgataagcccgagtgcatcaaagagacgacatggggcaaggacggaatccgtaaggtgctcatgcagcacatgacagaggaaggtatcgctcctgttgccaaaatcatgctcgccaagcagaagctggatgagaagaaaggcgctatcggctcaacaatgtcagacgaggtctacaacaaggaactcgaagaactgaagaaaggtaatattaatggtgagaagattcctactctgaccatcattatcaagcctatggataccgctaactatagcaatatggttgaagctctggacgagatgcagatttgcagtattggtaaatatgtcattgacaagattaaccccgacgacgagaaacttctcggtctgaaaggtgtaaagtaatcagtggctaataacattaaaacagaagaactatgtcaaaaatagatctaatagacaataactgggtcgacctcgtctttgaagacaagaataaggaatatggtgcttacgtgctccgcaaggataccggtaagagaaatctacaggcgttagcaatcgtatttattatcctcgctcttattttcgcaggtgctctcacaatggatttcatcaagagcgttacagccaagaaggttgccatcaccactgacgttgagctttcacagctcgctcagaagaaggaagccaaggttgagcgcaaggagcctgtaaaggttgagatggaacagaaagtcgttgagaaggtcaagagttcggtgaagttcaccgcacccgagattaagaaagacgatgaggtgaagcctgaggacgagctgaagtcacaggacgaacttgcaaagtcaacgactgccatcggttcattcgacgttaagggtaacgacgaggctgaaggtgaagtgctgaaggctaaggaagtcatcgctgacgagaagccgaaagaggaagagaagccgttcgacatcgtcgagcagatgcctacattccccggtggtgacggcaagctgatggaatggctgagcaagaacatcaagtatcctgctgtcgcagaagaaaacggtgttcagggacgtgtcatcgtacgcttcgtcgtaggtaaggatggctctatcagcaacgcttcggttgtccgctcggttgacccgtcactcgacaaggaagccctgcgcgtggttaaggccatgccgcgatggattcccggtaagcagaacggtgcggcagtgcctgtatggtttacgttgcctgtgacattccagttgcagtaaacatattctgcacagccgctacggccacgtaaaactgtcatcaacctgtaacactataattacagcaaaatgaagaaatgcctattcaacataacagttggattatctctcgttctctgtctctcggttgcctgcaaccggaaaccgaagaacggcagaactgatacttactcatcagggacgattaaattcgtctctgatgagagtttcagtcctatcatcgaggaagaagttgaggtcttccaaagtatctatcccaacgcaaagctaattcctcagtacaccaacgagctggatgccgtcaacatgctgatgaaagagcagacgtatctggccatcaccacacgcagattcaccaaaagagaagagcagaacctgaaggaccgtcggttcttgcccgcagccataccgctggcttacgacggtctggcacttattgtcaacaaggaaaatcccgacaccataatatccctgcaggacctcaaactcatcctctccggcaaggtgtcaaaatggaacaagctgtatcccgaatcaaaactgggcgacatcgaggtcgcatttgacaacaaacagtcaagcaccgtccacttctgtgtggactccctcctcgacggcaaacccatcaacagccccaatatctacgccgtgaagaaatcggcagaagtaatagacttcgttgagaagcatccgaactccatcggaattatcggttcaaactggctcaacgacaaacgcgacacgacaaatgtcactttcaggaagaatataacggtaatggcggtaagcagaatccacccggccactgtggccagcagctggaaaccgtatcagttctatatatataacggcaactacccgctggtgcgcacaatctacgcgctgctgaacgaccccatcaacggactgccgtggggattcaccaacttcattgccgccgaccaccgcggtcagctcatcatccataaggccggtctgctgccatacagggccaacatggaagtccgcgaagtgaacgtcgtcacggaatgacaatatcataattacagaaaataataatcataataatagaggaataacgatgaagaaaacaaagcatttattgataggagcaatgctgattggtctcagcatgcccgtaacagctcaggacaacaaagcacagatagacgagattaccaacatcatcaagagcaatcccgctgatctggccaagcagatgaaggatatttacaagaagaacaagaagaatccggaagtcctctgcggtatcggacgcgcctactatgacctcaaggacacgctgaatgcaaagatatatgccgagtatgccctcaaggctaaggaatacagccccgcatacatcctgctcggcgatttggccgcacgcgccaacaacggcggtgaggctgccaaatattacgagatggccatctatactgacccgaagaatcccgatgcctactataaatatgccaacgtctaccgcaaagtaagcccgcagggagccgttgacaagctggaggaactgcgctcacagcgccccgacatagccgttgacgccctgaaaggccgcatctattactcttcgaatgagtttgaaaaagccatcgagagcttccgcaaggctgacatcaacgcaatggaagaagcagacctgacgagtttcgccatgtccctgtggttctcacagaaatatgacgagagcctcaaaatcgctcaggccggactcaagaaaaacccgcgcgacgccgcattcaaccgtctcgccatgttcagctgcaccgacctgaaggactatgacaacgcgctcatctatgcagacgccctcttcaacaagtccgacagcgccaagttctcctacttcgactacacctactatggcaacgcgctcagcggagccaagaagcacacggaggccatcgacatgtacaagaaggcacttgagcagaacttcgaggacaagaccaagcgcgccggcgtcatcaagcagctttccgagggctacaagcagaacgatgactatgagaacgctataaagacatatcaggagttcctcgcttcggtggacaatccgcaggctaacgacatcgtcgggctggcacagctcaacacccagtatgccaacactctggagggagatgcccgcaaggacatgttcaagaaagccgagagcacatacgccggactgaaagagaaattccccgacgcagaggaatactcaatcttctgggttgcgcgcatcaactcctacatggaccctgagacgactgaaggccttgccaagccctattacgagcagcttgcagccatcattgagccccgcgccgagaaaagttccagcgacaaggcacgcctcatcgagtgctacagataccttggctacttcaatcttgtgaaggatgaccgcgacgccgccgatgtctactggaacaagattctggaacttgaccccgagaacgagatagccaagcaggctctcagcatctcgaacaaaaagaaataacgatcatatcacggtctaaagcgccgtgcaacaatcagataaaagggtgtatcaaaagcaaagataactatctcctgcctttgatgcaccctttccctatttcatatacaccataaagcaatatccacaaaaaacggtttggatttctgccgacagaataattcacgtgcaataaaggtgaaacatgctataaaaaagaacggcatgaaagaaacaaaaaaggcgaagataaaatctccaccttgaataatcacaacggaataatccttattgtgaattgcttgaaagttcctgcaaagatacgaattaaattctaataaccgaaataataataaactattaacaaaatatgaaaaagattctcggcttcgacatcggcacaaatagtacaggatgggctatcgtctacggagatacaaacgaagatggcaaactccaattaaaagagattgcaaatgcaggcagcagaatcatacctatggatgcaagcatattaggcgattttgataagggaaattccgtttcacaaacaaaagcgcgaaccgaatatagaggaatgagacgtatgcgagaacgttatctattgcgtagagagcgcctatatcgcatattaaacatcatggggtttctgccagaacatttttcagaatgtctcacacgctacggtaaattcaccaacaattccgaaccgaaacttgcatggttgaaagacaacgaaggcaaaatgcaatttctgttcaaacagtctttcaacgagatgctaaatgaattctatgagcacaatccgcaactcacagaagaagccaagaagattccatacgactggacactatactatctgcgcaagaaagccctaaccgctccgatacaaaaagaagaactggcatggatactgctcaatttcaatcagaaacgaggatactatcaattacgcggggaagacgaagaagatacacaaaataaaattgaggaatatctgtcgctaaaaatcatcagggttgaagcaaccgacgaaaagaaaggcgatggcacatggcacaacgtctatcttgagaacggtatggtctaccggaggacgagcaagacattccttgattgggaaggtaagacaaaagatttcatcataacaacgttgctggataacaacgggcaaccaaaagttgacaaggacggacaaatacgccgttcactccggcaaccaaaagaagatgaatggggcttgctcaagaaaaagacagaagcgagtatcgacaaatcaggaaaaacggtaggctgctatatctacgacagtcttttgtccgacccgacacaaaaaatcaaaggccgtcttgttcgcacaattgagcgcaaatactacaagaacgagcttaaagccatattggaaaaacagaagcagttcattcccgagctcaacgataaggagttatacgacagatgcgttgaggaactttatccaagcaacgatgctcatcgaaacaacataactcaccgggatttcacttacctgcttgctgaagacatcttgttctaccaacgtccgttgaagagcaagaagtcgttgattgccgactgccaatacgagaccagagcctacaaaaatcccgagaccggagaaacaaagcacatcggcataaagtgtgtctcaaagtcacacccgagattccaagagttcaggctgtggcagtttatcagcaatcttcgcatctacgagcgcagcaagattgttgatggaaaaacgaaacttgatgtcgacgttaccgactctttcttgaaagatgagactgtctatgagcgtttgttcgagttcctcaacaacaagaaggctatcaagcaagacaccttgctctcttcgttcttcaaactcaaaaaacaaaacggcaaacatctgtacagatggaattacgtagaggacaaagaatacccatgcaacgaaacccgcgagttaatcctgtcgcgcctgaagaaagccggcatcagtgcttcatttttaacgacagagacagaggaagcgttgtggcacatactttattctgtctccgacaaacaggaactaagaacggctctcacgacatttgcacgtaagaacacgttggacgagaccactttcaccgaacatttcatcaagataccaccgttcaagaacgactacggagcctattcgctgaaagccctcaacaaactcctgccactcatacgcatgggcaaatactggagcgaagagtccatagatgcaaagacaagggaaagaattgatcgcatcatagacggagaggcagacgagaacatcaagaatactgtcagagagaaagccattaacctcaatgacatctcacacttcaaaggcttgccgttatggcttgcctgctatgtcgtgtacaaccgccacagtgaagcgtcggacaccgagcgatggaaacgacctgaagacattgacgagtatctgcgccacttccgccaacactcgctgaacaatcccatcgttgagcaggttgtcatggagacattgcgcactgtcagggatatatggaagaaagaaggacacattgacgaaatacatatcgaattgggccgtgagatgaagtcaccggctgccaaacgcgcacaaatggcccaaaacatgaccgaaaacgaaaacacgaatataagaatcaagtacttgcttcgggaattcgcaagtccggacatggatatcgaaggcgtccaccctcactctccgtcccaacaggaattgctccgcatctatgaggaaggagtgttggcatccgaaagagacattacacctgacatcaaggaacttatcggaagactgaacgagaaaagcaagcagccgtcccactccgacgtccagcgctataaactgtggctcgaccagaaataccgttctccatacacgggactggccatacctctctcccgtctgttcactccggattatgagatagagcacgtaatacctcaatcccgctatttcgacaattcgttcacaaacaaggtcatctgcgaatcggaagtaaacaaactgaaagacaatcagctcggatacgaattcatcatgcgccatcacggcgaaaaagttcctctttcgcgcggcataacagcgaccatactcgaacccaaagaatatgagcagctcgtgaaaaacacctactcggcaaatccgcaaaagctgaaaaaactgatgatggatgacatccccgacggattcatcgaccgccaactcaacgacagccgctacataagcaagctcgtaaaaagtctgatgtcaaagattgtccgggagaaaggagaagaagaggccacatccaaaaacgtcattgtctgtaccggtagtgttaccgaccgactcaaaaaggactggggtgtcaacgacgtgtggaacagaatcatattgccacgcttcgagagacttgacaagatgtgcggccaacaactgtacacgaccaagaacacctccggacatgtcatccccgacatgcccatcgaacaacaacgcggtttcaacaagaagcgcatcgaccaccgccaccacgctatggacgctatcgtcatcgcctgcgctacaagaagcattgtcaactacctgaacaacgaatccgccaaacatgacgctcagaccacccgtcatgacctgcagcacgccctgtgccataagcagcgcaccgacgccaacggcaactaccaatggactttgaacatgccttgggacacattccctgccgatgtaaacaatgctctcaatcggattatcgtcagcttcaaacagaatctgcgggtgataagcagaacaaaaaacaagatacagaaactcaagaacaacaagcgtgtgctcgaacagcaaacgaagggcgataactgggccatacgcaaaccgctgcacaaagaaaccgtctacggcgaagtcaacctgcggctgcaaaaagaagtaaaactgaaagaggccatcacacgccccgacgacatcatcgaccgtgacctgaagaaaaagatcaaggccatgctcgaattgggttacgacttgaagaaaataaaggcttactttgaggacaacgccgaaatttggtctgacatcaatctgaacaagattccaatctattatttcacggctgagacctcggacagatattttgcaacccgcaagcccattgaccaatccttcaaccgcaagaagattatcaatgagattaccgacaccggcatccaaaagataatgctgcgtcatcttgaaaacaaaagtgacaatcccgacatcgctttctctcccgaaggcatagaggagatgaacaggaacatccgcaccctcaacaacgggaagtggcatcagcccattctcaaagtgcgcgtatatgagaaagccaacaagtttgccatcggcaagagcggcaacaagtcgaagaagtttgttgaagcggccaagggcacgaacctgttctttgctgtctatgagggtgaagacggcaaacgccgctattcgtccataccgctcaacatcgtcatagaccgcatgaaggcaggacagcctgtagccggcgaggacggtataattccgacgttcgttctgtctcccggagatttggtctacctgccaaaagaaggagaaacgctctccgtcgagactattgacaagagcagaatatataaaatggtaagttgcaatggaaagcaatgcttttttataggaaataccatagcaaaagcgattatcaataacaatgatttgcatgaatttaatgtattgaataagattgaaatagcattgacgggtgaaaacatcaaggaaaagtgcatcccaatcaaagttgaccgtttgggacaaatcgttaaattaggatactgaaagatgaccggcttatgattaagaagacactctatttcggcaaccccgcctatctgtctctccacctcgggcagctcgtgataaaactgcccgaggtggagacctgtacggcagtggacaacgatttcaaaacgcgcgccaccgtcacaaaaccgatagaggacatagcatacgtcgtgctcgacaaccggcgtatcaccatcaccagcggtgtcatggaagcactgctcgaaaacaactgcgccatcatctcatgcgactcacgcggcatgcccgtcggactgatgttgccgctcacaggcaacactgttcagaacgagcggttccgtcatcagcttgactcctcactaccactgcgaaaacaactgtggcagcagaccatacaacagaaaattgccaatcaggccgctgcacttgagcgatgttgtccgacggccgccacaggatgtatgcgcaaatgggccactgacgtgaaaagcggagacacacacaatgtcgagggcaaagccgccgcctactattggaaaaatttcttcagcagccacgtcaacgacttcatcagagaccgcgaagggttgttcccgaacaatcttctgaactacggctatgccatccttcgggccgtaatggcgagggcccttgtgtcgagtggtctgctccctactctcggcatacatcatcacaaccgttacaatgcttactgcctcgcggatgacatcatggagccataccgtccatacgtagacaatcttgttcatgacatcatcactgataatggtgtagattttgaactgacgcgtgacataaaggccctgctactgaccattccaacgctcgatgtcacgataaacggccggcaaagcccgctgatggttgccgcaagtcagacaacagcttcactcgcacgatgtttcatgggtgagatacgacgcatctattatcctgtaatgtcgtaataacgccaatgctatcagaacgtttcagtgaatatcgcattatgtgggtcatggttttgttcgacttgccgacagaaacgaagaaagaccgtaaggcttccgcagagtttcgcaaacgcctcatgggagacggtttctccatgttccaattctctatctatataagacactgcacaagcgtcgaaaacgcagaggttcacatacgccgagtgaaagccatactaccggaatacggcaacgtctgcattatgtgcatcacagacaaacaatttggaaacatacaagtctttcacggtcgaaaatctactgtcccaaattcccccggccatcaattagaacttttctgaagataccaataaagcaatctttcaggcaagaagtttatatgatagaaacatataaaaacaaaaaaatcccgccactaaaggacgggattctgccattatcgcagttctttttcttttctgattttctttgcaagtatttaataaccagtcactttctaaaagtatactgttgtttatactgcgaagcagaaacttttcaagcaattcacaaccacgtatggccatagctggcaatggcgtttaactgttgtttatactgcgaagcagaaacttttcaagcaattcacaacactctctttgttacgcttacttataacaaactgttgtttatactgcgaagcagaaacttttcaagcaattcacaacggtccccgagatcttcatattaaaactgatactgttgtttatactgcgaagcagaaacttttcaagcaattcacaactacttttgatagcactgtttatcttgccgactgttgtttatactgcgaagcagaaacttttcaagcaattcacaaccgtcgatgaagtctacgacggcgatctcgtactgttgtttatactgcgaagcagaaacttttcaagcaattcacaacagtaatgatagtacacctccgtacttagtactgttgtttatactgcgaagcagaaacttttcaagcaattcacaaccgagcagcagaatgactcttggatagacaaactgttgtttatactgcgaagcagaaacttttcaagcaattcacaaccatcccacgcaataacatcgttgccgaagaactgttgtttatactgcgaagcagaaacttttcaagcaattcacaacatggtacgcaaggaattttatttgcttcgtactgttgtttatactgcgaagcagaaacttttcaagcaattcacaactaccagttctgtcttttctgatattgaaaactgttgtttatactgcgaagcagaaacttttcaagcaattcacaactggctacattaatacagaaattataattatactgttgtttatactgcgaagcagaaacttttcaagcaattcacaacaatatcagggtacaacgtcattaaaaataactgttgtttatactgcgaagcagaaacttttcaagcaattcacaacatggcgcgtcttaattaaaacgtcagcttactgttgtttatactgcgaagcagaaacttttcaagcaattcacaacaatatatgagactttatgttaatactccggactgttgtttatactgcgaagcagaaacttttcaagcaattcacaacagaagaaactctccctcctttattctcgaaactgttgtttatactgcgaagcagaaacttttcaagcaattcacaacatatctgaaataaaactattatctttgtaactgttgtttatactgcgaagcagaaacttttcaagcaattcacaactcatgtggggaatatgtttttgcaagtgcactgttgtttatactgcgaagcagaaacttttcaagcaattcacaactactcgtatcttccgatattggagataccactgttgtttatactgcgaagcagaaacttttcaagcaattcacaaccttttgcttctttgtatccattgattttgcactgttgtttatactgcgaagcagaaacttttcaagcaattcacaacctgctctgagtgttctgagcggtatgtcgactgttgtttatactgcgaagcagaaacttttcaagcaattcacaacacacacttcccattggcaaagcgccggaatactgttgtttatactgcgaagcagaaacttttcaagcaattcacaacctagacgtaactggagctttatgccgtatcactgttgtttatactgcgaagcagaaacttttcaagcaattcacaacgtatcaacgttgcaaaaaaatataatctgaactgttgtttatactgcgaagcagaaacttttcaagcaattcacaactctatcggtgaggttgttaatactaatctactgttgtttatactgcgaagcagaaacttttcaagcaattcacaacaaactgagacaaatcaaggaattggtggacactgttgtttatactgcgaagcagaaacttttcaagcaattcataacaaacatgtcaaagagcaatttgattgtaaagatactatattaaatataaaccaaagcaccaattacattgtttaacatatttagaagcggctttatcctctcactataaaaatatcaaaacgcttcaagaaacggtattatattcagaaaaacattcagaagacattcctaattcaacactcgtaaataaaggcggcatttgcgtatgtcgcagaaatacattaactttgcagcagaaaattaacaggttttccagtttgacagacttatgaaagaattaacactgaagtacggatgcaatccgaaccagaagccttcacgcatattcatgaccgaaggcgaactacccatcgaagttatcaacggccgtccgggatacatcaatctcctcgacgcgctcaacagctggcagctcgtccgcgagctaaaggccgccacgggtcttgccgcagcagcctcgttcaagcacgtttcacccgccggtgcggccgtaggcctgcctctgagcgacacgctgaagaagatctatttcgtggacgacatcaagatggagctttcgccgatagcctgtgcctacgcccgtgcccgcggcgccgaccgcatgagctcctacggcgatttcgtcgctctgagcgacacgtgtgacgcagccacggccacactcatcaagcgtgaggtcagtgacggcgtgattgcccctgactatacgcccgaggccatcgaaatcctgaaagacaagcgcaagggaacatacaatgtcatcaaaatcgaccccgactacgttccggagcccgtcgagcgcaagcaggtgttcggcgtcactttcgagcagggtcgcaatgaaatcgacctgagcgacccctcactgttcgagaacatccccactcaggccaaggacttcactcccgaggcacgccgcgaccttctcatcgccctcatcaccctcaaatatactcagagcaactccgtctgctacgcaaaggacggtcaggccatcggcatcggcgccggccagcagagccgcatccactgcacccgtcttgccggttcaaaggctgacatctggtggttgcgccagcatccgaaggtgatgaacctgcccttcgttgacggcatccgccgcgccgaccgcgacaacacgattgacgtatatatcagcgaggagcacgacgacgtgctgcgcgacggcacatggcagcgtctgttcaaggagcgccccgaggttctgacgatggaggagaagcaggagtggattgccaagaacacggatgtggccctcggcagcgacgctttcttcccgttcggcgacaacatcgagcgcgcccacaagagcggcgtacgctacatcgcacaggccggaggctcggtgcgggacgacaatgtgattgagacgtgcgacaaatacggcatcgccatggcattcaccggcgtacgcctgtttcaccactgataacttgtaactttaaacttgtaactttaaactttatggctgcgcacagagtttggggcggagttgtcccctgaagcaagacataaggtctgaagttgcaagtttaatgtttagggcaaaccacaaagttagaagtaataagctctgcgcgcagcccaaagttacaagtttaaagcccaaagttacaagtaataagctcagcgcgcagcctaaagttacaagtttaaagttaaaagttaggaatggatatcgatgacatcatcgcaggaggcggcatcatgttccgcccggcacgaaaggaaaacggcgacagcggcaaggtcaagaccaaggccaagaagaagaagtatatcacgggggctcacggcagcggttcggcaaagcagaaggcaaaataccgcgagcaacgggccaacaggcacaaataatgccaagcgggaaagaaaacggaaacaccggatttacgtaagagtagcataaacttaacgtaagactaacgtaggagttgtatgagacgaacgtggaattaatatcatactgacaaagattaatgtaatttcacaatcgttatgctatttttgacttcctctaaaagtttagtggatttatttatataactttgcagaacaaaagaagttatatactactacacatactccatttacggcagatggacatacctaaaagaatcataaccctgcttgtcaccatcgtcatctcactgacatggacggcaggcaaaacaaacgctgccgaaacaaatgacgccaaggccgactccatcatgaatgagctgcggcgctatttcaacagcgacaagaaagacagcctataccgcgcggctgccaaatatcgcgcgtaccaactaaaccagggcgacatctacaagtattaccaaggctggcaatatgaaatcttctacgacatcaatttcaacaacttctaccacgccatgcgaaaggccatcagaatgtccgaagacatgaaggcgcgccatgcggaagaccagctgtacaacgccacctacctcttcggcgttatctactcgctgcagggaaacgtcgaacaggccaaggactgcttccacagggcgctcgacgaaggcaagcaccagcccccgacaaggctcgtccagatatacaaggaacttgccaacgtcgagatggacagcgatccggacaaggccatgaaggacatcaaccacgccatcagaataaccggacaagccaaacaaaaatacgcatacagcgacgccgtggccttcaagatcatcatcgctttcatcaagaaggactgggagctcgtcaaggctatctacaccgactatctgcaaatgcagaaagactacggcgacgagttctccatgacatactatcattatgccatgatgtgcggactcgccgccgagggcaactacgtcaaggccatcgaacacgccgaccagctgaccaacatcgaccgctacaggttcaagaccatcatctacgagctctccggagatatgggtaaggcgttcgagacacagaaaacatacatccatgtcaaggactccatcaacagctccatcatgctccaggagctgcacaacgccgccaccgacgttgaaatgaacgccatgcgccacaaggccaccgaagaccgggtcaagaagaaggtcatggcgatggtcatcttcggcgcggccgtcattatcgccatcctcatcttcgtcatcttcaactggcgcaacaacatgaagaaccttcggaaaaagaactccgagctcgaaattctccgcttcaagtcagaagaggcggaacggctgaagagcaacatactccagaacatgagccacgagatacgtactccgctaaacatcatatccggatttacgcaactcatctgccagccgggctacactccctctgacgaggaaaaaacagaaatcctcgaccgcatcacggccagctccgacaatcttgtcaagatcatcaacaacctgctctacgtagcgacgacggaaagtgagagctatgcctcacagcgggacgacatcgtctgcaacgacctgctgcgcaggctcaccgagacctaccggctgactctgccggagaccgtcagcttcaccctcgataccagcatacccgacgatttccacttcctcggcagcaccaagggcattgagaccatcatcgacaatctgctcaccaatgcccgaaagttcaccaccgagggcagtataaccctccagtcttcctttgacagaaagaaagaatatatcatcatcagcgtgaccgacacgggaacgggcataccggaggcatatcaggaacgcgttttcggcatgttctacaagattgacaattcaaaggagggcatcggtgccggactcccactgtcgcgccacatagcgagacaaatcggaggcaacctatcgctggacgcagactaccacggcggagcacgcttcatcctgaccataccggcaaggaggccgtgaagaattttggctttctgggcttttgagactttcggggagggaggagtgagaagactcttcttttcagtcttcaaaaacaattcccgctcctccctcctcgaaagcccagaaaaagccacatccccctgtattaattattacaaaaatgcatcctccaaaaccttcgtctcagctcatttccgcaacctttcggaggccgtaagggccttacggccatggttccccgtatgtcttcaaactgttttttgcccaccatgatgccgtaagggccttactactcttatggagcagagaaaatgcaggttttcgggttgttgattttgtcctgaaaagttaccgtttttctgccgtaagggcctcgcggcattgtagcaacggccttgttgcagtgcgacggcggcctcgttgcaatgccgcgagggccccgttgcaaccccgtaaggcccttatggcacaaccgcagcagccccgctgttgttcaacggaattgccgctgttcgtatcaggctatgaatgagtaacttacaaagtgtgtaaatatataatcacgacaacccctaatttttgatacgcgcatgcttgcgatattctgaggcaaggcggaaatttttcagaaagtccccattctcgtgggcttaaaaatggtattttaaattacaaatcgaccagaagcaaaatatgtcccgctcggtagggtgttcaaaattggattttaaagttcggccatttacaggtgtgcatttacaggtgcgcgtttttactctacccgcctggaacaagaaaaaccggcaggcgaatcctttcggacttgcctgccggtttatcttttccttcgataatctcagccttatgctttcggagcagcggttctcttctccttgatgcgagccttcttgccggtgagcttgcgcagatagtagagcttagcgcggcgcaccttaccgatcttgttgacctcgatgctgtcaatgttgggtgactcaagagggaaaatacgctcaacaccaatggtgccggacatcttacgtacggtgaaacgcttcttctcaccgtgaccggaaatcttgatgaccacaccacggtagagctggatgcgctccttggtaccctcgataattttgtaagcgacagtcacagtgtcaccggacttgaactccggaaactgcttgccggttgcaaatgcttcctcagcaactttaattaagttcattgttactttataattaaatttgttcttatcgttccaacgcaacataacgggcaacacgttacttcccgccagcgattacgccgaaaagcgggtgcaaagttacgactttttatcggtatcagctaattttggcggggctttttttgctgattatctgatttttagttacttttgcgtcaaaatatcacataagaatatgcacatcggatatatttcacgcgtcctgccgctcgtcgcagcggctgtggtcgccggatgctcgtcgcagaagactgccacggtggtgtcggtcgaacgtagccgcctgctggtggacagccgctatgacgctgcccccgacgaaaaggcggcgaagatgatcgaaccctaccgtcatgtcgttgacagcatcatgagcccggtggtcggacggtcggccggatatatgagcgcgcagcggccggaaagcgatctgtcaaacctcttggccgacattctcgtctgggccggacgcgactacggcgagaagcccgtcatgggggtctacaacatgggcggaatacgggccgcgctgcctgaaggcgatgtcacctacggcgacgtgctggaagtggcgccgtttgagaacaagatatgtttcctcaccctgaccggcagcgacctgatggaactgttcaggaacatggccagcgtgggcggcgagggtgtcagccacggcgtcgagctggtcatcagcggcgacggacggctcgtgagcgcacgcctcaacggccgcgagatagacccggaggcgtcctaccgcatcgccacgattgactatctggcgcagggcaacgacaagatggaggcgttcaagaagaagaccgcctacaacgcaccggcggctgaggagaacgacacgcgctatatcatctcggcatacttccgcgagatggcccgtcagggaaaagcggctgacagcaaggtggaaggacgcataacggtcagataaaagcacggaacagctaacggggcgcttcgacgcgtcccggctatagataagaagaaaacgatgaaaagcagaataatactgatagcggtgatgtgctgcatgacggcactgtccgcaacggcacaggagagccggcgccagctcgtcgtcctccacaccaacgacacccacagcacggtgatgccgctgagcgagaatctcaatgacacgatgaaggccgcccgcggcggattcctgcgccgtgtggcaatggtaaaggaagagcgtgccaaggaaccggacctgctgctcttcgacagcggcgacttctcacagggctcaccatactatacgctctataagggtgacgtggaggtccggctgatgaaccgcatgcgctacgacgcggcgacaataggcaatcatgagttcgatttcggtctggagaacatggcgaggattttccgcatggctgaatttcc

SEQ ID NO: 1161 - DNA, 24485 bp, synthetic construct
  variation 16693..17919: note = n is a, c, g, or t
  variation 14997..15006: note = n is a, c, g, or t
  variation 19353..20346: note = n is a, c, g, or t
  misc_feature 1..24485: note = Synthetic
  source 1..24485: mol_type = other DNA
tacggggaggttacagccggtgtcgggcaccgtgtatagagcagaacatgaatcggtgtatatggatcaggactatacattagccgatgaggaaataacggtttatgaacaggcacaattatataataccgatctgttggaagaacatgaagttaagaccaggcttcaccgttttttatttaccatagacgattgggaaaagccctgccgggcattaagtggtggagaaagaatgcgactgatattgtgttgtctgaccatgaaaaaccgttctcccgatatgattattctggatgagccgacaaacaatctggatatcagaaatacagatatcctcatatcagcggttaaagcgtaccagggtacactcctggttatttcgcatgacgaaagtttcctggcacaaacaggtattacacgaactatggaattatcctgttcccgaaaatacagggactgaagcccggctcccgggtatgctaaattttttaatccgggccggagcgtcggttaccagttttagaaagatcgctattttactcctgtgtatttcggagcattttgcttgaggtaaatagttttgaggtgttgccttaacagattgatctcctgattaaaagtagttgaacggtacgtaaagtaatggtttttttatacattacatacgccgataattatcggaacaggtaggttgaaaaaggataggacgatagtaaatatccgggaaatgatgtgtaagtttatgataagagctgcctggggaaaaggaaatgtcttgtgggtatagagagcacttcagccggggtattgtccgttccggatatgatagtgtatatagtataaccctaaaaaaaagaggaattattgtccccgtcggtgcatcccgatcgtcataataatgaacgttaaaagtatattgaaatgaaagaattcgcattaattttcaggttaaaagacatggccgatttcaaaccttccccggagcaaatgcaggaacggatgaactggttggcagggatagctgcacagaataaactggccgataagggcaatacactgcttcctgctccgggaagtgccaaaaccgtacagacggaccgcacggtaacggatggtccttttacggagatcaaggagtttatcagcgggtatatcgtcgttaaggcagaaagtattgacgaggccgtgcacatggccaaaggaaaccccattttcgaacaggtaggaggaactatcgaggtcagagaagttttaaaacgcgattagtattgggggctcaaacaccttataacgaactgttaccccatttattccggcaggaatatgcgaaaatgacggctgttttatgccgtcatttcggcttaaagcacctggagacagccgaagatatagccagtgatacgttcctgaaagcatcggagcattgggctgttcacggtattcccgaaaatccgcaggcgtggctttatacggtggcgaagaataaagcaagggattatttcaggcatcgtactgttttcgaaacacaggtcagggatcgtctgagccctggagaagcggagcaggtccccgttatcgtatttgaccggcacctgattgccgacagccaattggccatgatccttgccgtatgcaatcctgccaatgcgcgcgaaagccagatagcgttggcactacaggtactttgcggttttagcgtggcagaaattgcgaatgcttttctgaccaaaccggaaaccataaaaaagcgcctgcagcgggcaaggaagaatctgcgtgaggataatttccgtatcgaaccgttgagcgaaacagaagtggcgtcaagactggatactgtgctcaaaacactatacctgctttttaacgaagggtacttttcggggaccggcaaccggctggtccggaaagaactttgttccgaagcggtgaggctcgccctggtactcaccgaacatccgtgtaccgatacgccccaaaccaatgctttactggcattgatgtgctttcagagttcgcgattggaagcgaggacagatgataagggcgaaaccatcctttttgaggaacaggaccggtcattgtgggatgaagcacttatccggcggggaaattatttcctggtcaatgctaccaacggcggggaagtatcgcgctaccacctggaggcagctattgcctactggcataccacaccaaccgacggcgataagtggcgttacattcttacgctttacgatcagctggttctgctggatgcttcgcccctgaccgcatggaacaggatatttgccctggctatggtgcacggaaaggaaaaagcaattgcagaagcggaaaaaacaaaagctacggatagcagattttaccatgcattactgggatttctgtatgccggtaaagaccgtgacagggccatagcacattacaaacaggctatagccctgaccccgtccctgccagagcggatgacgctgacaaaggccataaagcgcctgaaaagaacgtagctgcaaacccggatgaatgtcctgacggtattgtaccatcagttaaaccccgcccggaattccagcgggctctgcctggttttggtcttgaacagtttgctgaagctttgcgggtgttcgaaacccaggctgtaggcaatttcggagacggacaaagcggtagtggacaattgttctttggctttttcgatgagtttttcgtgaatgtgctgctgggcattctgcccggtgagggtgcgtaacatatcgcccaggtaacccggggaaacagacaggctgtcggccaggtcgcgaactgtgggaatgccccggtgaaggggttcttcttcatcaaaatagctgttcagtctttcttcgaactgttgcagcaggttattattgatggttttacgggtaataaattgccgtttgtagaaccgctcggcataactgaggagcagttccagctgggcgataacgacatcctggctgtgttcgtcgatgcggttgccgagttcttctgcgatactccggaagaggtagaggacgatgtctttttctttttcggacaggtgcagcgcctcgttgacggcataggaaaagaaccggtatttcctgatcttagctgcgaggggatagtgcagtaaaaaatcggggtgcatcaggatcgcgatttcccggcgggtgcagggagcttctccgggttcgttttcgtccggggccacgatctggttgggtgcggcaaaaaacaagcccccttcgttataatcgaaatgggtctgtccgtaccgcagcagcccccctatattcggacggaaagcgatcttgtaaaacgtcagtacatgcccggccggacgggcatgatgttccggtggactgtctataccgttcatcacggtgatcaacggatgcaaaggcggcggaaaaccgaatgctttcaggccttctgcaagcgatgcgaattttatcggagctggattgttctttttcatcccggttgtcgtgtaatgatcgtacaaagtactgaaaaaatcagcaacagaaaagcaggaggctgactgtcgctgattttttggtggattatccctgagctgcgacagcaacgtcctgccaggcttcccagaccttgatgcggtctgcataggtctgtttgataccgtccaggttctgacttcccaaaaacaatcgcaacggtggtgtagccgtatctactacggttaaaattgcagatgcggtagcattgggatcacctttttcgtattgaccgatgttttcccagaccgaggccctgaggttatcgtactgcgattgattatcggaaaatttgagtgatgcctggcttccgaactcagtggcataggctcccggctcgatgatagtaacgtggataccgaaggcttttacctctgcggccagactttcgtgaatggcttcgaacgcccacttggaggagcagtaatagccgataagggggataacaaaatgtccgagattgctggaggttcccagaatatgtccgtaaccctgctttcgcatgatgggcaatacctcccggataaccgatacgggaccgaggacattggtttcgtaaagggcgcggatgtcttcgggccgggcttcttctatcgtccctacgagggaatacccggcattgttgataacgatatccagcttgccgaaatgttcgtgtgcagccttaacggcatgttgtacctggtccggttttgtaacatcgaggggaaggatgagggcgttatccccgtatttttctttaaagtcggcaatactgtccgtattcctggctgtggctgccactttatcgccccgttgcagtgcggcttcggtccatacccggccgaaacctctggatgagccggttataaaccatactttcggctcgtttgctttgtcgtgttccatcgtgaatgctgtttttaatttgatactacaaaattgagtaattgccagcccctggctgtagccgttttgcgggattttgtgtgcgaaatggggataggggataaaaaggagtgggagtatagtataaacagaatagcggcaaccgattttgcgatggacatttggcgttgccgaacagcagtttgttccgaaaaaggatgaagacagggtgaaaagtttactgctattgtaggctttaactttcgattcttaaaaaaattgaactttctttacagatatatggaaaaccgtaatggaaagtaatatatttccagaaaattagcgacccggaaaaagataaccctttttgaaacataccagtaccctgtaaaaacaaacaacctaatctatatattaaccaatttgtaattcatgaataagaattttacacgtattgcccttttgggaatgctgctcatcggtacaagctgtgcaagtattgtaagtaagagtagttatcctattatgattagcagcaccccaagtgaagctaaagtttcgattaccaacaaaaaaggaaaacaggtatttatcggaaagacacccactgtcgtaaaactcgaatccggaagtggttttttttcaaaagcacattatcaggtactcctggagaagccgggatatgaaccgaaaacagttcccgttacttttaaggtggacgggtggtatttcggtaatattttattcgggggacttattgggatgcttattgtagatccggcgacgggggccatgtataaattggataccgaatttatcaacgaaacgatgcaaactcaggaaaatattattgtcggtacggaaaaagaagagcgggcattaaaagtctatacgctaaatgatattccggagcaatggaaatctcacttaaccctggtacattaaaataccgggacaggcctcagacagtgttttaagaaatatcatcagaacctgttatgaaatcctatggataaaggtatcgaatcgaatacaacgttatcaaggtatggtaagggcctgcctgccgacaaaactgattattaaaaagtaaatataaaaagagatgaaaagactaaagatcgtagtagcgctgatggtatgtgcattggcaagttcttgtgcattgaagccgatatcatcggaatatgcctttataaaaacggacctgaaaaatgtagggccggagcagctgggcaacggaagtgtacttatctataacggcgccaatctgctgcatacggcagacaatacggcaagattaaatatctggctggatgaaaagcctatgggacagatcaggccgggtgaatatgttattatcaacatgaaaaacgggacacaccattttaagcttttgcatatcgacatggtaaacatgcgaagcgagcacgatgtggaggttaccgaagatacgcgtattattatggcaaaaccgacgataacatcaaacaagctggaagtgaccaatatactgccttcgaattttgataaatttgaatatgccgagaaacgataggaagatcatatacataaggagatacttatagagttactccgtagtgatcggtaacaacataaaaagagccacttcgcagctatggaagtggctctttttgttggtcataagaccggctttcattaaaacttataggcaatgctgagtctgaaatttcttccgggttcggactgccagtacatatacgaaccgtagttggcgccggagtagaggtatttgttcaggagattatttacattcagacgaatatcgatattggagtttctccagaagataccgccgtccatacggaaatagtcgggaaggtccgaagtgttgtcggctccccagttccacgaagagcggtttacctggtactggtaacccaaagaagctccgaaaccgtgtaaaaccgagtattcgttaaagctgtaattgagccatccgttggtaatgtgttcggagaaccctgctattttgttgccatctccgtcttctacgttagtgtaggcgtagttgagcaccaggttgagttcgggagtaagctgcccggaggcatcgaattctattcctttggaaacggcttctcctatttgtacggaatacggataggaaatgcctccgccatcggtcggaaccccgttttcataatcggtaacggcgaggttttttttcttcatccggtatgcggtcagggaagttttgagtcttccgtcgaaccacgattttttaagccctccttctatatcatgagaatcttccggatcgagcggtgccgcagtgtcttcgtctatatatctggcaccctgctgggggaagaacgactggtcgtacaatccgtaaaccgtcagggaaggggtaatgtcaaagctaaggccgaaacggggcgtaaatttactggcatcatagtagacaccataagcataaacatcggcctgtgtgtagcgtccggcgagggtcacgcgaaggcgttcgtccataaaattcagttcgtcctgtgcgtagtatgcgcgtatggtttgtccgagagcattgggtagccctcttgtttttatattgacagagcggtcgaataccggcatggttacatcgccgtagtgcggatcgaaaatattaaaggggttttcgggggtatcgatagccccgccctggttccagtcggcccagaattgtttctcattaaaatcaaatccggcaagaactttgtgtttcacggcaccggtattgaaatcgccgttaacaaaggcctggaagatgttataggtgccaagggcatcggcactggttacacttcggataaggtcgccgttatcagcaatactggccggccatagggtagcgccttcctgctcgtattgcatatacatatactgcgcctggaaggtccagcggtctccgagtttctgggtaaagttggtcgttgtgttgtattcttccacattcatggtcggatatgccggatctatggtcgcaaaatcgcggtcgagtccgccgaaaccaacatctaccggggcaaagacataggccgccccggctttcatcttggccttttggtaagtgaattcctgggtaaggatggagtttttggtgatttcataacgcagggaaggcactacggaaaacctggaagaaggttcgtaatcgcgatgcgagttggccgattgtgccatggcattaaccctgtactgtagttttccgtcgccggcatagctgccgacatcgacagttccgcgataggtgtcataactcccggtggtgaaagacacatgggcaaaagtctcttttttaggcttcttggtcactacgttataaaacccgccgggttgtcctgccgccatcataaagccggccggtcccttgacgaattctatctgttctaccatactcaggtcttcggagagcggcccccaggtcatttccacattcattccgttccggaaggccggaagccggaacccacgcatattcacccgggcaaaccatccccagtgttctaccatctgtgcaccactgacattcctggtaatggcgtccatcatggtaaacgactgctgatcggtaagaagctcttcgggaacgacctgtacgttttgcggcattttgctgatctgctgattcattcggagtgaaggcgatacggtttctctcgaataattatctttcttgctcccggagagtgtgatctcctgcaactggctaacgctttcccggagttctacatctaccggccccataccggaagtgaccgaaagggagatctcacgggtctgaaagccgatggtactgactacaaggatatgcgccccgtgtggcacattttttatattgaaatttccgttggtatcggtagacgatccgtaatgcgtgcctttaataagaacattggcccccatcacaggttgcccggaattatcggtaaccgtaccccgaaccgctgatcgctgggtttgtgcaaagagccctgcggacaggcagcaaacatatactatgaaaagtattcttttccccatttttatatttatttggatttgttttaaatagcacggcaaaactactaagttttttgcttttatcaagactgaatttaaataaaagttaaattttttacatcttgtttcttttccgggtggggtggaggctgttccggagttttgtttgggagaaatccggggtaccgccgcttagggatggttatggcaggaagaatatgttctactacccggggaatgcggtttacaggtgcaagaatattggacgcagtcgcgagaatgcccggcacaggcgcaagaatattaaatgtagtcgcgagaatacccggcacaggtgcaagaatattaaacgcaggcgcaagaatacccggcacagggataagaatattagatgcagtcgcaagaatattggacacagtagcaggaatattcgatacggttgtaagaataccgggtacggtcatacgtatattccggtcgaccgggagcatcagattccgggtttgcagaaccggtatcgttgttaattccggtcgggctgctttttgatttttcggttggtataagcggttttttggcgggtaatatggaataaaagtatattttcgcttttttattaaaaagcataacttctaaccatccgataatgtcattacatggccctgttgcccgtactgtaaaaaaatgtactcttacattatgcacgctattcctgagttacttcctgcacggacagaccgcacgcggggaatttattcaggcttctatagggtacggtatgtcggctccttatgacgatgtggatattttgggagacggtttctatgcgcagggagagtacgttctgaacctgaaaagctggttgagcctacgcccttatgccggggttatattggttaaaacaagcgataagaattccatgcagcgcgaagcaggttacgaaatttcggcaaatgcttttctccttggtggcaaagcacgggttatagctcctattccgtgggtagcgccttatgcagagggagggatagggacttcgttaggatcgtttgtgacgtataccggctacaccgatattaaaaagagcggaatgctttggcatatcccgttttcattcggactgctcgtcgggcgtcatcataacttcgatatcgggtttgtctattactttcatccttcggcagaacaatattccggagcttttgcggtggggatgtcgtttgcattggattaggttcttactgacaatcctatctatttccggtacttcggagttgtattattatcttctttgcccgattattacttctgcctcaggtatattcataaaacattcgggcataaaaaaacctcctgattatggacaagaggtaacccagatgttttcacaacggaataatccttattgtgaattgcttttcaaaaattgtacggtaaagatatgaaaactattttagtacagatgtggcttcccgtaaaagttatgatattttttatttatttttaaaaaatcaaatttcgccccattaccgaatacactaaaaatgcattacggattaaactaaccgcgtaaatctttaattgaaatgaaaacaatattaggactggatctgggtactaactctgttgggtgggcattggttgaacaggatttggaaaataagcaaggtaaaatactcggcatgggaagtcggattattccgatgagtcaggatgttttgggtgatttcgggaagggaaattcaatttcacaaactgccgaaaggacaaagtacagaagtacaagaagacttagagaaagacatcttctacgcagagagagactgcatcgaatacttaacgttcttggatttctcccggaacattatgcttcgcaaatagatttcgggaaacgtttaggaaagttctttgaagaaaccgaacccaaaatagcctggaagaaaaatgaaagagatcgatttgaatttctttttaaagattctttttccgaaatggtagctgattttaaggttaacggaaaagaagtaaaaattccttacgactggactctttattatttacgcaaaaaggctttgttctataaattagaaaaagaggaactggcctggatcattctcaattttaatcagaagcgggggtattatcaattgcggggagaagaagaagaagagaatcctaataaatcggttgaattctattctttaaaaattgtcgatgttacagccgatgaagaacccaataaaaaaggagaaacctggtattctttagtactggaaaatggatggatttacaggcgttccagtaaaactgatttgtccgattggaaaggtaaaagcagagattttattgtaacaacagatctgaatgatgatggttctgtaagaacgaataaagacggagaagaaaaaaggagttttcgtgcacctaaggaagatgactggaccttagtcaaaaagaaaacagaatctgatttggataaacatatcggtagacataaaataaataccggcataaaaggaactataggaacttatgtttatgataatctactccaaaatccggatcaaaaaattaaaggtaaattaatcaggactattgagcgtaagttttataaagatgaattaaaacagattctgcaaaagcagatagagctacagcctgaattattttctaaagatttgtataatgactgtgttcgtgaattatacagaagtaatgaagctcaccgattacaattgagtaatcgcgattttgttcatttgtttatagacgatattattttctaccaacgtccgttaaagagtcaaaaatcatctataggaaactgcgctttggaattcaggatctatagagacaaggatggaaatgaacaaactcgatatttaaaagctatacctaaatctaatcctttttatcaggagttcagagtatggcaatggctatataacctgaagatttatagcagggaagacgatgttgatgtaaccactcaatttatcaaaggaactaaagataaagaggaagtttttgagtttttgatgggccaaaaagaagtggatcatattgatgtcctgacttattttatcgagcccctgatcaaagaaaaatttccaaatgccaaaggaagatcgttaaagaatgaagtatcaaagaagatagagaaatatcgatggaattatgtttatgatccggataaaggggaatctaaaaaatatccgatgaatgaaacgggatatgagatcaggagacggttgaataaggttgaaaatatctccgaaaatttcttaaccaaagaaatcgaacagcacttgtggcacctgatttactcagttaccgacaaaattgagttcgaaaaagggttaaaatcttttgccggtaaatatggattgactgaggcctcatttgtagaaaactttaaaaaattcaaaccttttgacagtgattatggtagatattcggaaaaagcaataaaaaaactattgcctttactgcgaattggtaaatactggaattgggacgctattgataaggaaacaaaaaaacggatagacagaataattaccggagagtatgacgaagctattaaagacagtgtgcgtgagaaggccattgatctgacagaagaaattcattttcagggattacaattatggttggctcagtatattgtgtacgatcgtcattcggaagcagatattgcagggaagtggaattctgttgacgacctggaagattatctaaaagattttaaacagcatactttacgtaacccgatagtagaacaggttgttaccgaaactttacgagttgttaaggatatatggatacaattcggaaaaggcacgaaagattattttgatgaaattcatattgagctgggtagggatttgaaaaatccggcagataagcgtaaacgtctatcaggtatcgtttccgaaaatgaaaataccaatttgcgtataaaagcaatccttttggaattgataaatgatcattctgtggaaaatgtgcggccgtattctcctatgcaacacgaagcattaaaaatttatgaagatggagtacttaattccgggattgaaattcccgatgaaattgaaaaaataagtaagaaatccgagcctacaaaggctgaaattcaaagatataagctttggcttgaacaaaaatataaatcgccttataccggaaggcctattccgatgagtaaactatttacatctgcctatgaaatagaacatgtaattccacaaagtcggtattttgatgatagttttagtaataaggtgatttgtgaagctgaagtaaacagtatgaaagataagcagctcggattagaatttattaaaaatcatcacggacaaaggataatgaccagttcaggagaagttgaaattttatcagaagtggcctataagtcattcgtaaaagagcattacgataaaaatcacggaaagaagaacaaattgttgctggaggaaattccagaaaaaatgattgaacgccaattgaacgatacacgttacatcagcaaattcgtgtccgggctgttgtctaatattgttcgggcagaaaaaggtgatgaaggtgtaaattccaaaaacataattccgggcaatggaaagataacaggaagattgaaacaggattggggactgaacgatgtgtggaatgatttgattttgccacgttttgagcgaatgaatgaattgacaaaatcgggtgactttacttcctggaatggaaaacatcagaaatttttaccaaccgttcctatagaattgtcgaaagggtttcaaaaaaagcggatagatcacaggcatcatgctttagatgccttggttattgcttgtgccacccgtgaccatgttaatttattgaataataaacatgccagatcaaaagaacgatttgatttgcaacataagttacgtaacaccgaaaaatggaaggataacaacggaagagaaagagataagtttacggaatttaaaaaaccatggaaaagctttactatcgatgccaggaatgagttggaaaagatcgtggtaagtttcaagcagaatttacgcgttatcaataaggctaccaattattatgagaaaattgtagacggaaagaaaataaaagtagaacaaaaaggagtgaatcttgcaataagaaagcctattcataaggaaacagtatcaggacaggttcacttatccagaattaaagtacctaaaggaaaaatcctcaccgccacccgtaaaacccttgatacctcttttgattcaaaaagtattgacagcataactgataccggaattcaaaaaatattgattaatcacctacaaaaatatgatgaacctgcagcaggtattccactcaacaatctttcacaaaggatttcgaaaaggagggagctaatcaaaagtaaaaagttgatagagcacccggaattggcgttttcacctgaaggaattgaagatatgaacaaaaatattgtgcaatgtaatgagggaaaaccacatcatcctatattaaaagttagagtttttgaaacgggaagtaagttcccggttggttttaaaggaaacaaaaaggataagtatgttgaagccgctaaagggacaaacttgttttttgctgtttattgggatgaaaaaaagcagaaacgaagttatgaaaccattccgctgaatatcgttattgaaaggcaaaaacaaggccttaattcagttcctgaaatggatgagaaagggaataagttagtattccatctttctcctaatgatttggtatatgtaccattggaagtaagacctgatattgtgcatacaataaataccgatgatataagccaaatacaggtttcaagtatttataaaatggtgagttcgacaggaagcgaatgtcattttattcactcaaatatttccacgctaattaaatcttatgatgctaaaactaagattggtgaacttgggagtttaaataaattggaaataatgatgaacgattcggttcgtataaaagaaagatgtatcaaactcaaagtcgatcgtttaggcaatatatcaaaagcataaaataatttttatgagcccgtacaacccccatatccatcatcgcagaagcatccgcctaaaaggctatgattatgcccgggagggattgtattttataacgctttgtgtacaaaacagggagcatattttcggggatatcaaaaaggggaacatgattttaaacccttatggacaaatggcctgcgaggaatgggtgaatacaagcaacataagagatcaggtggctttacacgaatttatcgtgatgccaaatcattttcatgctattatagagattttattccataaaggaaaagaaggcgaaaccggaacattcagatccccttcccaaaccataggttctataatacgaggctataaaatagccacgataaagaaaatcaaagattttatccgggagggcgaagcggaaagatccggaaagataggatcggatatccatatcgatacgggcgaattgcaattcgccccaagcggatcggccccaagcggatcggccccaagcggatcgnnnnnnnnnngccccaagcggatcggccccaagcggatcggccccaagcggatcgcccccaggcggatcggcccgagacaaatcccacttatccttcgacccggcaggaatcatcacggatttagattttaaaatatggcaacgcaattattacgaaaagatcatccggaatgaacgggcatatcgcaatatttccgaatatattaggcataatccgaagaaatgggaggaagataaactttataaaaaggaaccgcgaaaagacaagagccataggccacaaaatcgttaacgatgataaagcgcactttgttttttggcaatcctgcttacctaagcaccaaaaacgagcaattggtagtgaatttccctgaggaagaccgcgcaccggcaaccgtgccgatagaagacctggggtatattgtgctggaagatccccagatcacggtgaccaacggactgttgatgaaactggtacaaaacaaaacggccgtgattacctgtgacaggcagcatttgccctgttcctttttacagccgctgaccggccatagcgagcagacggagcgtatgcggcaccagttgaatgccagtgtacccctgaagaaaaatctctggcagcaaaccgtagtggctaaaatacagaaccaggcagcgcatctggccgtacgtggccaatacgctaaaaaactgcagcgctgggcaggagaggtaaagagtggggacaccgaaaaccatgaggctattgcggcggcacattattttcagtcgctatttgccgatattacagctttcagccgtaaccagaaaggggtggcccccaacaacctgctcaattacgggtatgcgatattgagggcagtcaccgcccgtgccctggtgagtagcgggatgctcccttcggtagggatatttcatagtaataagtacaatgccttttgcctggccgatgatgttatggaaccttatcgcccttatgtggatattctggtgagggagttggtggatcagggagagtacatggaactgaataccgaaataaaatctgccctgttgggcataccggctatggatgtgaatatcgatggaaagaaaagtccgctgatggtggcgatgagccggacaacccatagtttatacgactgttttgcggggataagcagaaaaatactatacccggagctatgaaagacccgggagcgccctcttccgggataacgataggggacttatggaccaagacagattttcacgattaaaccaatacagatgtatgtgggtactggtactttttgatcttccgacggaaacccggaaagaccggcaggtggctacacgatttcgaaaaagcctgctggatgatggtttttccatgttccagttttccatttatatgcgattttgtgccagcagggagaatgcggacgtacacacccggcgggtaaaaaaatccctgcccaaacacggcaaagtatgtatcatgcagataacggacaaacagttcggtatgatcgaactctttcatggccaaaaggaaatagaaccggaaaagcccagtcaacagcttgagctcttctaaaaactgctgctattttttaatcctggtatggtccataaaaaacaggataccagatttttagagccggtatcctgtgaatcctaatacaagatacaattttgaaagcaattcacaacannnnnnnnnnnnnnnnnnnnnnnnnnnnnnnnnnnnnnnnnnnnnnnnnnnnnnnnnnnnnnnnnnnnnnnnnnnnnnnnnnnnnnnnnnnnnnnnnnnnnnnnnnnnnnnnnnnnnnnnnnnnnnnnnnnnnnnnnnnnnnnnnnnnnnnnnnnnnnnnnnnnnnnnnnnnnnnnnnnnnnnnnnnnnnnnnnnnnnnnnnnnnnnnnnnnnnnnnnnnnnnnnnnnnnnnnnnnnnnnnnnnnnnnnnnnnnnnnnnnnnnnnnnnnnnnnnnnnnnnnnnnnnnnnnnnnnnnnnnnnnnnnnnnnnnnnnnnnnnnnnnnnnnnnnnnnnnnnnnnnnnnnnnnnnnnnnnnnnnnnnnnnnnnnnnnnnnnnnnnnnnnnnnnnnnnnnnnnnnnnnnnnnnnnnnnnnnnnnnnnnnnnnnnnnnnnnnnnnnnnnnnnnnnnnnnnnnnnnnnnnnnnnnnnnnnnnnnnnnnnnnnnnnnnnnnnnnnnnnnnnnnnnnnnnnnnnnnnnnnnnnnnnnnnnnnnnnnnnnnnnnnnnnnnnnnnnnnnnnnnnnnnnnnnnnnnnnnnnnnnnnnnnnnnnnnnnnnnnnnnnnnnnnnnnnnnnnnnnnnnnnnnnnnnnnnnnnnnnnnnnnnnnnnnnnnnnnnnnnnnnnnnnnnnnnnnnnnnnnnnnnnnnnnnnnnnnnnnnnnnnnnnnnnnnnnnnnnnnnnnnnnnnnnnnnnnnnnnnnnnnnnnnnnnnnnnnnnnnnnnnnnnnnnnnnnnnnnnnnnnnnnnnnnnnnnnnnnnnnnnnnnnnnnnnnnnnnnnnnnnnnnnnnnnnnnnnnnnnnnnnnnnnnnnnnnnnnnnnnnnnnnnnnnnnnnnnnnnnnnnnnnnnnnnnnnnnnnnnnnnnnnnnnnnnnnnnnnnnnnnnnnnnnnnnnnnnnnnnnnnnnnnnnnnnnnnnnnnnnnnnnnnnnnnnnnnnnnnnnnnnnnnnnnnnnnnnnnnnnnnnnnnnnnnnnnnnnnnnnnnnnnnnnnnnnnnnnnnnnnnnnnnnnnnnnnnnnnnnnnnnnnnnnnnnnnnnnnnnnnnnnnnnnnnnnnnnnnnnnnnnnnnnnnnnnnnnnnnnnnnnnnnnnnnnnnnnnnnnnnnnnnnnnnnnnnnnnnnnnnnnnnnnnnnnnnnnnnnnnnnnnnnnnnnnnnnnnnnnnnnnnnnnnnnnnnnnnnnnnnnnnnnnnggtagcatctcataaactgtgtaaataggaaatatcgagggtcatgaccctcgatatttttttattaatcttgcctgtcggcagacaggttttaaattttacacagtaatgcaaaaagacgattttttatccgatgagtttttaaagcagttcaagactggcgaagaactcaacaattttttaaagcagattcagaagcggggtatcgaaaagatgcttgaaggagaacttgatggccatttaggctatgaaaaataccaaacatccgataatcctaacacccgtaatggctattccaacaagaaagtacggacttcctttggtgaatctgagatccaggttcccagagatcgggacggctcttttaacccgatgattgttcctaaacgggatagcatggtcgatggtatcgaaaatgtcattgtctctctctatgccaaagggatgagtaatagtgatattgaagagcagatcagggagtatataattttgaggtgtctacctctaccatatcccggattaccgaaaaggtatcggccgatattgtggcctggcagaaccgccctttagagcctgtttatctgatcgtatggatggacggtattgtctttaaggttcgggaaaactccaaggtgatcaataaaaccgtttatatcgctgtcggcttgcgcagggatggcaaaaaagaagtcttggggctctggttgggtaagaacgaatcggcggccttctggatgagtgtcctcacggatatcaaagccaggggaaccgaagacatccttattacagccaccgataacctcaatggttttaccgataccatcaaaaatgtattcccggagtctaagacccagatctgtgtggtccaccagatccgcaatgcttccaggtatgtggtgtggaaagacaaaaaagccttcacagcggatatgaagcatatttacaacgcccccaaccaagaggcagccaaagccgctttggaagactttgccaacaaatgggacagtaaatactcctatgctgtaaaaagctggagagataactgggaggatctcactgtgttttttgagtttcccctggagatcagaaaaatcatctataccaccaatcttattgaaaatctcaatgggaaaatcagaaagtataccaaaaacaaattatccttcccaacggatgaagctgtgatgaaatctgtatatttggccataagggaggccactaaaaaatggtccatgcccattaggcactggggcattgtcttaaatcagttcctgaccatctatgaaaaaagggtcagactttaagtaaaaatccaaccctcggtatttttagtttacacactttatgggatagtgtctaatattccttgatagtccatatggactgccctgtgaatcctaatacaagatacaattttgaaagcaattcacaacnnnnnnnnnnnnnnnnnnnnnnnnnnnnnnnnnnnnnnnnnnnnnnnnnnnnnnnnnnnnnnnnnnnnnnnnnnnnnnnnnnnnnnnnnnnnnnnnnnnnnnnnnnnnnnnnnnnnnnnnnnnnnnnnnnnnnnnnnnnnnnnnnnnnnnnnnnnnnnnnnnnnnnnnnnnnnnnnnnnnnnnnnnnnnnnnnnnnnnnnnnnnnnnnnnnnnnnnnnnnnnnnnnnnnnnnnnnnnnnnnnnnnnnnnnnnnnnnnnnnnnnnnnnnnnnnnnnnnnnnnnnnnnnnnnnnnnnnnnnnnnnnnnnnnnnnnnnnnnnnnnnnnnnnnnnnnnnnnnnnnnnnnnnnnnnnnnnnnnnnnnnnnnnnnnnnnnnnnnnnnnnnnnnnnnnnnnnnnnnnnnnnnnnnnnnnnnnnnnnnnnnnnnnnnnnnnnnnnnnnnnnnnnnnnnnnnnnnnnnnnnnnnnnnnnnnnnnnnnnnnnnnnnnnnnnnnnnnnnnnnnnnnnnnnnnnnnnnnnnnnnnnnnnnnnnnnnnnnnnnnnnnnnnnnnnnnnnnnnnnnnnnnnnnnnnnnnnnnnnnnnnnnnnnnnnnnnnnnnnnnnnnnnnnnnnnnnnnnnnnnnnnnnnnnnnnnnnnnnnnnnnnnnnnnnnnnnnnnnnnnnnnnnnnnnnnnnnnnnnnnnnnnnnnnnnnnnnnnnnnnnnnnnnnnnnnnnnnnnnnnnnnnnnnnnnnnnnnnnnnnnnnnnnnnnnnnnnnnnnnnnnnnnnnnnnnnnnnnnnnnnnnnnnnnnnnnnnnnnnnnnnnnnnnnnnnnnnnnnnnnnnnnnnnnnnnnnnnnnnnnnnnnnnnnnnnnnnnnnnnnnnnnnnnnnnnnnnnnnnnnnnnnnnnnnnnnnnnnnnnnnnnnnnnnnnnnnnnnnnnnnnnnnnnnnnnnnnnnnnnnnnnnnnnnnnnnnnnnnnnnnnnnnnnnnnnnnnnnnnnnnnnnnnnnnnnnncctgtgaatcctaatacaagatacaattttgaaaggatttcacaaaacccccatcatcctcgccatacggcaggcttccatggcgttgctgacgtgcagtttttccaggatattctgccggtgcctgtttaccgtatggatactaatagacagcaggtcggcgatctctttactcattttccctttatcgatccaggataatatttctttttccctgcgggaaaggatattgcggctccggttatggtcggcagggatcagggccccggttacggggtttactatacatccgttacggggcggaagggcctggtaagacgggaaggtatagaggcaaagcgcaaaccgaagttcttccggtgtggaagtacgcggataaaagatacggtgcagtatggtgacatattggttattgcggttgcgtattcgcaggggatgtatggcaaaaagtccgtggcgttgtgcctgggggagttgttttaccgtgttaaagaactgcagttcgagaaaatacttgttttgcaggtcgtccggatgcgtcccggagaagatctcctcttcccagatcgaatctatggttttgtgctgcaccgggcaggaaatccccagggtagccgctatgcccccgtagcagatataactccggttagcctgcatatcactgagtacggcaatggcctgttccgtttccgcatacagttctgcaagagctttgagctgttcctgtggccatgccgtatctgtcccggtaaagtcctgtccgagcagtttgtgatgcagctggtctgcgataggtgtagccatagtaaaaatggttattaatcattattgagccccgcgataaacaggactacttttgcaaaagtaaagctaaatatcatgatgagaacattaatcctttttgcactgctttttgcaggttcacagggtgtgtatacactgtatgcacaacggctggaaaaaatgaactggtttaacgaaccccgggactgggagatcaaagacgggacgctgtccgtatttgtaactccgcagaccgattactggcggatatcgcactacggatttaccgtagatgacgctcccttctactatgccgtttacgggggagaattcgaagccaaagttaaagtatccggggcgtataaggcacgttttgaccaggcgggactgatggtccgtatcgatgagaaacactacatcaaggcggggatagagtttgtagacggaacgtacaacctgagtacggttgtgacccacaatacgagcgactggagtgtaatctccctggaggaagcccctgcgtttgtctggattaaggcggtaagacgacgggatgccgtggagatcttttactcgtttgacgataaggaatacgtgatgatgcgcaatgcgtatttcccggataataccccggtaaaggtgggactgatgggcgcaagtccggacggggaagggttccgtgcgagttttgaaaacttccgggttacacatctcccggaccaacgcaggctggaatggctgaaaaagaatggcggagaatagatgattcgcacatatataaagaagaccgtctgcaaagttttaggcggtctttttgtatggaagtcttttagaaaaatgaccccttagttcaggggttagctcataggttatcaatttgatcatctgacagatttttgggatgatgtccttaatcctgcctttcaggatggtaagccatggctacaaggcctgtttcggtttctacgtgatcaggtcccctgggcataaagcgcctgaaccccatattttgcctgatattcccaaagacagcttctttttttataccaactcccggagtaactttctgtatgacatatatcctgatgcctccgttcggtaattgcgataacctgccggatgggcacatacttttatggtatcggtactgcgcccgtaaccaaaagaagagcaggcgcagtggaaaggcgtgttacccgtaccggcaagaggaaaaggtaagaagaatcctgctgtagaagcactactgtttgttaataataaacttttaaaaagcttagttaataaaaaaatatatttattgttcgctgtataattaaaaaaaatatatatttgtctggataacgtatccgggacattgcttttaccataacaaattccggaagttaggactcagatgcctctatcggaaccctcggttttccggtagcgggtgtcggagtaagggaaaaggttgtggcaggaaggggctcccggccggcagacctgatctcagaataaccgggaggagaagagcacagtcctttaaccgggaacatagagtacaaaacctaaccaaaactttacattatgaaacctgaaaagaccggggagaactccaggaggagttttctgaaaaatgcttctatggcaggagcttccgtactcaccctcagtgggctcgatcgtgccggggccatgccttcggagtatattatccccaaagccgatcctaagcggtatggtagtgcgggactccccataacggctacgtttctggatgagatctcacatgatattccgcatcagaactggggaaaagaagaatgggaaagagactttcagcacatgaggtccataggtatagatacggtaatcctcatacgatcggggtatcgtaagttcctcacgtatccttccgattacctggtgtccaggggatgttacaaacctcataccgatctgctggaactgtttctgagcctggcggagaaataccacatgaatttctatttcggcctgtacgattccggggcctactgggataccggcgatctgacgcatgaaatagaatctaaccgatacgttatcgatgaggtctggcgtaagtatggcgaacggttcagcagttttaagggatggtacctgagtggtgaaataagccgtaagaccaaaggagccataacgtctttttacgaactgggtaagcagtgtaaagcggtgtcgtccggactccccacatttatatcgccctggatagacggaaaaaaagctgtggctgccgcttcggggaatctttctaaaaaagagtccgtttcggtagaagagcacgaaagggaatgggatgagatcttcgatggtatccataaggttgtagatgccgtagccttccaggacgggcacatcgattacgatcagctcgacgatttttttaccgtcaataagaagcttgccgataagtacgggatgaaatgctggaccaatgccgaaacctttgacagggacatgcccataaaattcttacctataaagttcgagaaactgcggctgaaactggaagcggcgaaaagggccggatacgacaaggcgatcactttcgaattttctcattttatgagtccgcaatcggcctatctgcaggccggacatttgtataaccgctatcgcgaatacttcggaatttaaaaacaatggaaaaatccagaaacatttactatgtctgcttcctcgctatggtcgcagcgcttggcggttttttattcggttatgatacggccgtgatttcggggaccatttcccgggtgagtgcgcagttcggtctgggtactatggagcaggggtggtatgtaggttgtgccctggtggggtctattgccggggttcttgtagccggatggctgagcgaccgctacggaagaaaaaaaatgatgctgttgtcggccgtacttttctcactgtcggccattggctgtgccttgtcggggacttttacgaccctggtcatctaccggattatagggggggtagggataggtgtggtatctatcgtatcgcccatgtatatttcggaggtggccctgtcgcatatccgcggtagcctggtggccctttaccagctggctataacggtcggtttcctgggagcttatctggtaaattttaagatcctcgggatcgcacaggccggcaagtatggcggaagcgggtggacagaaaggctgtgggaagaagaatggcgtgccatgctgggcacagaggcttttccggccgtattgttcctggtgatcatcatttttatccccgagagcccgaggtggcttgtgatgcaggggatgacccttagggcacgacacattttttcgagaatagtacagtca

SEQ ID NO: 1162 - DNA, 24485 bp, synthetic construct
  source 1..24485: mol_type = other DNA
  misc_feature 1..24485: note = Synthetic
cattggctggaatggtatctttaacttcgtcaacaacatcgtattcaactggtcccatcgaaccacagacggaggggactacaaggccaaatacaatatcatcaacaactattataaaccaggacctgtaaccgatctcagcagatcggtaagctatagaatcctcaagccagaagctggcagaagtgacttagactctatggtttttggacgggctttcgtgaaaggcaacatagtagagggcaataatgaagtcaccgaagacaactggaacgggggtgtgcaaatggaaggaaaagacggtcagctaatgaccttttcggaagccaagcattattttccccgaatgaaatccgaaaagcctttccccatgccacacctgaccatcatgcctactgaggaagctgtcccatttgtgatggaaaatgtaggggccacatttcctaaaagagaccctgtggaccagcgaatcatcagaaccgtcaaaaccggaaagcccgaatacgtggaaggattggatccagcatccttttaccaattcgagcacagaaggcttccaagggactcttataaaaatggcattatcaccgatatcagccaagtgggcggatatccagcatacaaaggtactccgtaccaggataccgataaggatggaatgcctgatgaatgggaacttaaatacggcctcgatcctcaggacgctactgatgccaacggcgatatcaatggggatggctataccaatatcgaaaaatacatcaacggaattgaccctaaactaaacgttgattggaccaacctgtctaataatgaagacacgttggccaaaaatggactttcagtggataaataaaggttaatgatttcatcaagtccaaaggagcccggcaaaaccgggctcttcttatttccccccttaccttcaacccggattatgcgttaggaatcgtagtgagagctgaaattgcaagaaaatcagttagtttggaggcattagcgtagcaccgctacggttatgccgaaaactaaagtgaaacggcttattttgtccgccgcggcggatcaggtcgcaacagataggctaatgcatattccgggttcaaaatggtagaaacaaccatttataaatcctcgaccaccattcattgatctaaacatccccactacaaccatttatcaccgaataaaaacaattaccaaattatgttttattttcataagcgaattatctaatttgccttatgatcaaatatttttgctcgggaactacgacattgttttttctcctattttgcttttcgggccatgcacaaaatttggccagtggccatgcattgcttcttgaagcttataaagaaaaaatcccccatccgcaggaaactgccaccggtgggcaatatgaggtggggagtttgttttatgtggatgggacaccctttcttgaatcctccgaatttaccaaaggacaggttaccattaacggggaggaatttgaccaagtcctgctaaactttgatgtggtcagggatcagctgatcacctatcaccccagaaattaccaacaaatcattttggattatcgaaaggtgcaggcctttcagctccaaaatggaaggaaatttatccaagtcgaagaaaaccctggatactcatggcactttaacgggtattatgaagtcctctgggatgataaaatcaccattttatccaaacactataaggaagaagaaatcaaaaaagaccacggttcctcggacaaatccttcgaattcgaaatccatgaagatttcttcgtcatgacctcacagggatttcaccggatcaaccgtaagaaggatattgaaacgtacatgggcatacccaaaaaacaggtcaaacaactcttgaaaaaagaaggattaaggtttaaaaaacaactgagggaagtactggtggtccttggtgcattttattcctccgaaaaaaccaactactagcctatgaaaaaccatctactacggttacttttttgcggtgttcttgtcatcttggcacaacacaccttggctcaagaccaacaaaaagaaaccatttcgggattgtttcccggggttcgcttctcacagtttgtcaatgtggtagaaaacaagacaagttaccgcttcttttacagggatattgatgtggacaccctttcggtaaacatcagtgccaaggaaaacgagctggaagatgtcttggacctgatcttcgaaaagacagcactgcattactccattgatgcccagcaacgggttttcattcataaaacggagcatttccacactgcattatccaaaaacttcttcgacccggaggagtctcccgacagccttgtcaacacacaggacgaacgctacttggacagggcctacacgggcaataaactatggaccatcggagaggaagatgatcagggacatcgcgacttggccacactcacgggaaggatctttagcttaaagaacggtgaaccgatcatcggagccgtggtgtttgaaaaagaaaattacaccagggcggtaacggatgaaaatggtcgtttcagtatcaccttgcccaaaggaaggcataccctccatgtgcagcacttgggccagtatcaagaacagcgtcaagtggaactattgggcgatggaagcttgataatgcaaatcgacgaaagtatcgtttcgctggatgaagtcatcgttagctctgatcgattatccaatatcaaccgtacagaaatgggggtggaaacgatgtccattgcctccatgaagaggcttccttctgtcatgggtgaagtggatgtcatcaagagtatccttaccctaccgggtgtaaaaaccgtcggtgaatccagcgtaggcttcaatgtccgaggcggtgctgctgaccaaaacttgatcctcctgaacaactccacggtctataacccctcccacctgtttgggtttttctcctcttttaatggtgacatggtagaagaagtagagcttcataaagccggcatgcctgcccaatatggtggcaggttgtcttctgtgctggatgtaaaaggcaattacggtaaccgggaaaaattccacggaaaaggaggcatcggtttgcttaccagcaggctgacttttgatggccccataggtgagaaaaccaccttcttggtcagcggaagagctacctacagtgactggctactcaatctcgtcaatgaaaagtctgacctgaatgcagcaggagcatcgttttatgaccttaacctaaatctcaagcattattttaacgacaaaaacgaactgagcttctcttcctattggagccatgatgactttaacttcgtcgcggacactgtcttcaattacagcaatcgaaacgccaaccttaactggaagcattattataatgaccgtctcgaaagtgaaatcatcctcgggattgaccaataccaatttggcatcgaaggatttgaaaatcccttgaacgcctatgattttgattttgacattacccaatataatctcaaagcacatttcacgtacgagcatgatgaccgccacacctttcatttcggaatggacaatatctattacgacatgaaccctggcaatatggttccttcaaatgaagcgtctatcatcatcccagaaaccgtaaacagggaaaaagccttggaaactgctttttatcttggggatcgctatgagataaatgataagcttacggctgattatggtgttcggtatgtcatttacaatttcctgggacctaaccaactgtacacttatgccgatgggctgcccaaaagtgaagcgacggtcacaggagaagaattctatgcaaacaatgaagtgatcagcacctattcggctcccgaaattagggtgtccggacggtacatcattgacaatttcacttctatcaaagctgggttccatacgacccggcaatacatccacttgctttcaaacacctcatccgtaacgcctactgatacttggaagctaagcgatccctatatcagtccccaacagggcaatcaaatttccctaggcttctataaggaccttttactgaaagaagacaaactggaagcatccgtagaagtgtattatcgggggctcaaaaacctcattgattaccgaagtggtgcacaattgctcctgaataatgatatagaacaagacgtgctcaacactgacggacgagcctatgggctggagtttcaagtgaaaaaatccaccggcaagctaagcggatggctgagctatacctactccagatcagagctgcaaacttcagataaggagccggctgaaaaagtcaatggcggcagttggtatcctagcaattttgaccagccccattccgtgattttagcaatgaattatgaactctccaaacgtgccaatgtttcgctaaacaccaactacagcacaggccgcccgatcacgcttcctgtttcaaaattctattataatggggctgaacaagtttacttctccgacagaaatgcctacaggattcctgattatttcagaattgacctgtccatgaacttggaaggcaaccacaaagtggacaagccggcccatgcttcttggtcgctgggcgtgtataacctacttggaagaagtaacccctactcggtttattacacacctgtaaatggtaacctcagaggctatcagctgtcgatatatgcgcagcccattccctatattacctacaatttcaaattctaattggacatgaagataaaccaactcctatacccgttcatcatttccatgctgctactggtcagttgtcgggagccctatgacccagagatcaaccaagaagatttgggaattttggtagtggaaggccatatcgagacaggtggaaaggccaccatgatccaactcagcaccaccgggtcgctgaacgatcaacgctcgccattcatggccatatccaatgcggtggtaactatcgaaagccagtcgggagcgacgtacccccttccggctatagcagacggccagtattccgcaacatacactcttccgaacgacgatctatacaggctgaacatcgaaatttctgaccaaggactttaccaaagtgaatggctgacaccgctgatcacgccaaccatcgaagatatcggggtaaagcgtaaggacgagaacgaacgtgctgacgtggaattatatgtttccacccatggtgaggaggacactagattctttacttggcaatacgaagaaacgtggattttcaatcctgcgttgctgacttttttgaaattcgaccctgagctggattccgtggtatatcgggacctaaggaccgaacggattgacagatgctggcgaacagaggtttccaacaccatcaatatcgcttcatctgcccagtatcaggacgattacatttatgaaaaagtcatccaaacaatgcccttcggatcagagaaattcactcagcgatattctatcctcgttcaccaaacagccattcccaaagaggcattcaccttttatgagacccttgaaaaaaacaccaatgacatgggcgatatcttcagcccattaccttccaacctcaacaccaacatccactttcaaggcaatggtgactacaaggccattggtatggtcaccgctggtgcatccgcttccaaaagggtgttctttgaccgattggatataggacactggatcgtatccaatcctttctatgctggctgtgcattgaactacgataccgtaagcgtggcggaggcccctcaaattttctccagtggccgggaaatccctgtcgtaatcatcgaaggggcagtaggcggtgtggctggttaccgtggcggaagcagaagatgcaccgactgcacgctgagaggctccaatactcaacctgacttctgggaaaactaaatcgatgatgagattaactttactgcttttattcgcaatattaagcaccaatttatgggctcgacaaacccagcaaaatcacgtcccacgggaagttgtccatgtccatagtgcccaatccatcgccgtggctggcgaacggattcccttatccatcaggattaccatggatcaagcgccttcctcctctaattttgcgtatgcggacttgatcagtcgaaacggaaaacgctttggaggagcagtaatccccttggataaaggaaaagcaaatgcctaccttacgatcccggaaaacacaccttctgatcactatcttctgagggtttattcgcgctatgccgcttccataaatgatgcttcccagtatcatcaagaactgatctcggtcatcaatccagcaatccctcccgcacctaaaaatacagaaaaatcgtttggggggaaatgggacggtagtaccgcaaccaacagcattgccatccaacctgaaagtacacgacttacactgggcgaacggtcaagtctcaccgtatcagccagtccaaacagtcatgtttccatttccattagcagaaaaaacccttttctcgatgaccagcggtttgccccggcgttagctgggacggatacaggagccaataccgccgaccttttaccggaattgcgaggccatatcatcaaaggcactctgacagaaaaaaaagcagacaccacccagctgtatttcctttctgcccatggtgaccaatcggcactatacctgggcacggccaataagaaaggggaaatttactttgacctgggggcgctgaaacattacgaatttcttctcctccagtcggaccaggactcggttcctttcggcctgaacttgcaattaccttttgctgaagcaccttcttcagaaaccttgaatttcccccccttggagatcaatgagaaagacaaggcaattttggataatttagtattaagtgccagcacgaccacatacttcctcaaaccaactcaaaaaaaacaagtgccaatagtcactggatacgcccctgaccgcggctacaacctggacgattataaccgatttgaggatttggccaccactctcaaagaatatatccccacggtcttggttcgcaaaaacaaaaagaaattcttctttaaactgactaatatccccgagcggtccgtgtttgatggtaatccgctgatccttgtggacggcatgcccgtcttcaacagtcacaagcttgcacagtttagccctgaaaatatcaaaagggcagaaatcatcaatcgccagttctatattctcagctatggctttgatggtattctcagtttcacctcctacgaaaatgattttgggggctatcccattccagaacacgccctatacctggaatacccccagatccaacaacccgtggattggcagtttacacctgagaaaaaggacgaacattttcccgactttagatccatactgctctggaaagacaatgtccaactggacaaggaaggaaaaatcgccctcccattttcagcttcccaaattcccggaacctatgaaatcaaggtcagcctaatcactcccgatggacgacaggtatggacaacgagggagttggaagtggaagatggtatttagtatttggtatcaaattaaacgaatgaagtggggctttacgacgccctcagtgactgcttccagcgatctacatcttctaccttcaaaccttcaactcccccctttccctttccaacggtcaaaaacctgctgcccaatcatcaccacggggatctccggctccttccaattggccatctgccccgaccaaaatcgcatccacgcggcctatactgccccgatctttgatttggtgccccattttctcaagggctttcttggtcgtaggatccaaggcatctctttcagggaaaataaaattgggtttccactggtggtgtaccctaccggcagacaccgcatcggtcatgttcatctcatgatccagcacatttaagaccacttgatatacggaggtaatgatcgtgcttccaccgggagttcctacgaccattttgagttttccatctttttccactatggtgggggtcatggcgctaagcatgcgtttttcaggttggatagcattggctttgccaccgagaagcccatagacatttggcacacccggcttactgctgaaatcatccatttcgttattcattaaaaaaccggcaccggaaacgaagaccttcgagccataacccgaattgatggtggtcgtcacggaaacggcatggccattggcatccacaatcgaatagtgggtggtttcttcactttcttggtagtccagcttcatggcgagtacctcttcactatccgtggctttggtaggattgatctgctttacacgactggtaatatagcgatcatccagcagttcctcttttggcacatcccaaaaatcggcatctccaaggtgcttggcccgatcggcataaaccctccgctccatctctgtcatcaggtgaatggtctcagggctgtgaaagcccagatcgcccatggagaaatgctccgacattttcaacagctgcatcaacgctatccctccactgctgggaggtcccatgctgtaaatggtcgcgccgcgatacttaccggtgaccggttcgcgccatttcgcttggtatttggccatatcctccagttcgatgatgccatttccagccttcatctcagccaccaacaattcggccgtttttcccttataaaacccatcgcgtcctgacttctggatgcgtttgatggtggccgccaggtctttttggaccagcagctccccttcttcccattctccgtcaagctttaccaagggaatgactgtgctgtcacggttgtgctcaatgaaggtttttcggtagcgattatagttattggcttgcttggcggtgatggggaagccaccgcgcgccaacttgtaagcaggctgtagcaatgttttcagcggtaaagaaccgtattttgcatgggcagtgagcataccgtccactgatccgggcacacccgaggccatggggcctgccaagcttagcccgtcgatgatatcaccgttttcgtcttggtacatttcctcgtaagcggccatgggcgctttctcgcgaaaatcaagtgacacgacttccccgcttggctgacggtacatcataaatccgccacctccaaggttcccagcagcaggatagaccacggcaagggcaaaatgtaccgccaccatcgcgtcaacggcatttccgcctttctccaacacttctatgcccactctggtggcctccggatgggcagataccaccatggccttgttgccataaacggtcttgccttcttggtattcctttttgcctattctggcacaaccggaaatgtaggccatggccacaaatagggcgataaatcgaatgtatctaagctttccagatacggggtgtatcaatgtgaatttcataatgggatatgcaataatatttttaagtggatccaatttactaataaagtcaatcaacgactgtcctacctccgcaaaaagcacaagatatctgaatatttagatttatttatgaccactggtcaaagattcgctaaaaacagggctcaccaccaacttttggtcaaaaaatactccattttgggtattttttcggaaaatgaaaagctttaatttgagggtgaataaaaagaaaagaataatcaataaaaaaggcgagttgccccgccttaaatgttttcacaacggaataatccttattgtgaattgctttcagaacaagcaatttacgaattgaaccagaataaccaaactactccttatgaaaattaaaaaaaaagaatttttaaagatgattgggatcagcagctcccagctaatgcttccgccttttggccaaacaaggtccacacctctcccccgcccaccggcaccaccgataatcctaaaggacgactacattcgcggatgacatttagagagaaaaattaatttatattattaaagtaagatagaatgaaaagaatattaggactcgacttaggaacaaatagtattggatgggcgctgatccagcacgatttcgaaaataaagatggtgtcatccaagacataggcagtcggattatccccatgggacaggatcttcttgggaaatttgatgctggccagtctatttcacaaacagcagaaaggacaggttatagaggcatcagaagactgtatcagcgagatcatttacgtagagatcgactacaccgcgtgctgaatattttgggtttccttccacagcattacgcagatgccattgacttcgaaaggaaactaggacaattcaaaccggggaatgaagaaaaactaaactatagaaaaaacactaatggagtatatgaatttatttttaaagattcatttggggaaatgcttcaagagttcaaaaccaaacaacctcaactatttcagccaaacaaaaaagggaaatcaccccaaatcccttacgactggacaatttactatttaagacaaaaggcactcgcaaaggccatttcaaaagaggaactggcttgggttatcctaaactttaaccaaaaaagaggctactatcaattacgaggtgaggaattggatggaggcaaggacaaacaattcgtccaattaagggtaaaagaggtagttgactcaggagaaatggtgaagggcaagcccctctatgatgtttacttcgaaaatggctggaagtatgatcgccaaatcaccaaaaccgaagactggatagggagaaccaaagagttcatagtgaccatttcgactttgaatagtggtgaaaccaaatattcctataaggccgtggactccgagaaagattgggctgctataaaggcaaaaacggaaaaggacattgaaaattcacaaaaaacagtcggtgagttcatttatgaaaccttattggatcatcctagccaaaaaattagaggtgagctgataaagaccatcgaacgtaaattctacaaagaggagttcaagaaaatcatttcaacacaagtctccttacaacccgacttgttttctcctgaactttaccaagcctgcattgaggaactatatcccagaaacgaagcccatcaatcgcaattaaaaggtcagggctttgaacacttatttacagaagatattatcttctaccaacgaccgctaaaaagcaaaaaatcggatatctctgaatgtccttatgagttcagggtgtttaagagagtgaacagtgaaacagggaaaaccgaaatcacacgtcaagggatcaaagccatccccaaatctcatcccctattccaagagttcagactatggcaatggctccataacttacgagtctatcaaaaaaagagaacttctggagacaaaatcgaaatcgatgtggatatcacttccgaactcttaaagactgaggaagattggacagacctatttgattatatgaccaccaaaaaggaggtagaacaaaagcatattgttaaatattttattgacaaaggcttactagacagtaaatcaaaagataactatcgctggaattatgtagaagataaaaaatatccagcctgcgacacccaaacccaatttgtttcacgcttaaaaaaaataaagggccttgaaccatatagtttactcgcagaaaaaacgcatttaggaaaaagtgagagtggtcacaccctcagcagggaagtacaactctggcatattatctactcggtgacggacaaaaaggaatataaaagtgcgttggaaaaatttgctcaaaaacaccgtattgatgtagatgttttcgtagaatccttcattaagtttcctccttttgagagtgattacggtagttactccaaaaaagctataaaaaaactccttccacttatgcgacggggaaaatactgggatgagagcgccattcttgattctgcaaaagaacgtattgatgagatcatggaacgagtcaactcaatgaagctggcagatgggtactcaaaaaaggaactgacggaggaactggaaaaagtaagtgctgacgatatccccaaacaagtggtaaaaagcttcattccttacctcaacctgccttacactggcctaaacacctatcaagcatgttatgcagtgtatggccgacattccgaagtcggggacattcagcaatggaaaacgcccgaggacattgatcaataccttaaaagatttaagcaacattctttaaggaatcctgtagtagagcaggtagtctgtgaaaccctgagagtggtacgtgatatctggaaaaaatacaggataaatgatccgcattatcaatttgacgaaatccatgtggaattgggcagggaaatgaaaaattcagccgataagcgaaaacaactttcaagcacaatcaatgaaaatgagaacactaactttcggatcaaagaagtcttaaaggaactaatggaggacccattggtagaaggaaacgtgcggtcttactctccaggacagcaagaaatcctaaagctttatgaagaaggggtttataaaaaccctgacgcaagatatgatacagtcagcgaaaatgaaattcaaaaaatcagaagaaatagcaatccttctaaatcagacattctacgatataagttatggcttgaacaaggctatatttcaccttacaccggaaaaccaatccaactttccaaactctttacaacagcatatcaaatagagcatatcatcccccagtcccggtattttgacaattcattcggaaataaaatcatctgtgaaagtaccatcaacgaagacaaggacaataaaaccgcttacgaatatttgaaagccaaaggaggcagtattattaacggccatttattactgaaactggatgaatatgaagctcatgtaagccggtattttaaaaacaacaaaaccaaacttaaaaacctactgagtgaggacatccctgaagggtttatcaaccgacagctgaatgatagtcgatatatcagtaaattggttaaagggttgctgagcaatatcgtcagggaaaacaacgaaaaggaagctacatccaaaaacctcatccccgtaaatggtgcgatcacatccaaacttaaaaaagattggggattaaacgacaagtggaatgagctgatcgcgccacgatttcagcgcctgaatgaattgacaaaatctgaaaactatggattttgggacaataccatcaatgcttaccgaatacaagtcccagatgacatcagtaaaggattcgataaaaagcgaatagaccatagacatcacgccctggatgcactggtaacagcttgcacaactagaaatcacacacactatttaagtgcactaaatgcagaaaaagagaaccatagcctaagaagtaagctattgattaaaaacgaacatggccattacaccaaaacatttcaaatgccatggcaatcttttccgatagaggccaaaaataaactggaaacaatcatcattagtttcaagcaaaacttacgggtaatcaataaagccaacaataaattctggtcttataaagatgagatcggaaatcttaatattggcaaaaatggtaaaccgcagaaaaaactcagaaaacaaaccaaaggtgaccattgggcaataaggaaatcgctacataaagaaacagtatctggcgtcgtgaatggaatcgaaactcctaaagataaaatggcaacatctgtccgtacttccctaacagaaatcaaaacccaaaaacacattgataaaattgtcgatccacagataagaaatgtcattattccaaatcacttaaaaaactacaccgatgataaaggaaaaataaactttgctgatgcatttaatcatgaagggatagaggatttaaataaaaacatcaatacgctaaacggggggacatttcaccatcctattactaaagtgaagctttatgaaataggaagtaaattccaaataggagaaacaggtaacaattcaaaaaaatatgtggaagcagcaaaaggaactaacctcttttttgcgatatactgggatgagaagaaacaaaaaaggacgtttgaaacggttccgctaaatgaagtcatcgaacaccaaaaacaggtagctcatttaccaaaacctgaacgctcccccatacagccaaaccctaaaaaaggaaaactgctatttaccctgtccccaaatgatctggtctatgtgcctactgaagaagagattgaaaacccaagtttgattgatttttcgaatttaaataaagatcaagctaggagtatctataaaatggtaagtagttccggaaaccagtgctttttcatacaaggaacagtttctagcagcataaaaaacaaatttgaattttctgctttgaataaaatggaaagagatttaaatggagcaatgattaaggagaattgtatcaagttaaaagtggacaggttaggcaatattcagaaatctatcttatgatcaaacgtacgctattcttcggcaatcccgcctacctcagcaccaaaaatgaacagttggtcgtcagctttcccgatgaccagcctgagaaaacggtacctgtagaggacattggcatgatggtgctggaacatccccagctcaccctcaccaatggcctgatgggaaaattggtcaataataaagtggcgatcgtctcctgcaacggccagcaccttcccgatggtatccttctccccatgcacggacacactgagcaaaccgaacggatccgtcatcagctcaacgccagccagccgctcaaaaagaacctttggcagcagaccgtcacggccaagatcaaaaaccaagcagcactgctggccgatcgggagacaccagtccagcggttaaatcacctggccaagtctgtccagtccggtgatacaggaaacaatgaagcccaagcggctgcctattattggcagcacatctttgacctcccgggttttaaccgggagcaaaagggcatgccgccaaacaatctcctgaactatggctatgccatccttcgggcgatcattgcaagggccttggtcagcagtgggctgttgccccaagtgggcatctggcaccgcaacaaatataacgcctattgcttggccgatgatatcatggagccgtaccggccctttgtggacatggtagtgagacatattgtggaaacagaggatacgtatgaggaactgaacatccacttgaagaaggaattgctttccattcctgcactggacgttcggatagatgggcagaagagcccattaatggtagccgccagcaggacaaccaattcgctctttgagtgttttgccggcatcagtagaaagatcatttatcccgaatatggatgaacgcttttattccagacttaaccaataccggagtttgtgggtgctagtattctttgacctgccgaccgacaccaaaaaggatcggaaaatcgccagtggcttccgaaagaagctattggacgacggattctccatgttccagttttcgatctacatgcgcttctgtgccagtcgcgaaaatgcagacgtccatatcaaaagggtaaaggtaaaccttccacccaaagggaaggtgggcatcatgtgcattaccgacaagcaatttggcatgatggagcttttctatggcacaaagttggccgaaaaagaaacccctcatcagcaattggagcttttttaggcaaagcttgctccattagatttactattgacacataaaacaagaccaaggtagttacaataggactttttggagaaaccacaaaaaccgaagcaaaaaacaggctcatttttcaatcctaaaaatgaacataaacaacagcataccaaccacttgacgtggggtatgctgtgattaccattgcaaggtataattctgaaagcaattcacaacagctaaaagttaatccaaaactgtgttaaagctgtgattaccattgcaaggtataattctgaaagcaattcacaaccagtaacttttacatccacagcagcatgatgctgtgattaccattgcaaggtataattctgaaagcaattcacaactggttgtattggtgttgaggaatttactttgctgtgattaccattgcaaggtataattctgaaagcaattcacaacgaggtaaaagagcaacggtttacggtcacagctgtgattaccattgcaaggtataattctgaaagcaattcacaaccagtatattcctctatatcagtaaactcatgctgtgattaccattgcaaggtataattctgaaagcaattcacaacctatggaggagaaaaggttagtgaggtcggctgtgattaccattgcaaggtataattctgaaagcaattcacaacaacacagactataaaataaactttggtcatgctgtgattaccattgcaaggtataattctgaaagcaattcacaacgtgataacgccccatacaagcaatttaaatgctgtgattaccattgcaaggtataattctgaaagcaattcacaacaacctgctcaatgtgactaccccaataatcgctgtgattaccattgcaaggtataattctgaaagcaattcacaactaagcttagaagagctttctgatattgcaggctgtgattaccattgcaaggtataattctgaaagcaattcacaactattgtttaaacgatgaaacaaaagcactagctgtgattaccattgcaaggtataattctgaaagcaattcacaactaattagtgtttttactatcatcaatcactgctgtgattaccattgcaaggtataattctgaaagcaattcacaacctgtaatttgcttgaacccagctttcggtggctgtgattaccattgcaaggtataattctgaaagcaattcacaactctttaactctttgaatctctaaacttaaagctgtgattaccattgcaaggtataattctgaaagcaattcacaacagcaccgaaacagggtattccagttctaatgctgtgattaccattgcaaggtataattctgaaagcaattcacaactcaatccaatgaggtccaccccattcaaaagctgtgattaccattgcaaggtataattctgaaagcaattcacaacggaagatgtttggaaaaacaggacgtgaaagctgtgattaccattgcaaggtataattctgaaagcaattcacaacaggatgcaatacagatagtaaaagactactgctgtgattaccattgcaaggtataattctgaaagcaattcacaactaaaactaccatatggatgattagctatccgctgtgattaccattgcaaggtataattctgaaagcaattcacaacagtaaccgtttggtttttcacccacaatatgctgtgattaccattgcaaggtataattctgaaagcaattcacaaccgggtgatacgccagagcaaagggctgcaaagctgtgattaccattgcaaggtataattctgaaagcaattcacaactgacattgacatattgtaacttcctggtgcgctgtgattaccattgcaaggtataattctgaaagcaattcacaacctggatcgtatcttcttactggtaacgcttgctgtgattaccattgcaaggtataattctgaaagcaattcacaaccgctttcctggtctatgacctttaggttagctgtgattaccattgcaaggtataattctgaaagcaattcacaacatgatgctgatttattgctttaaaaaaagggctgtgattaccattgcaaggtataattctgaaagcaattcacaacaaagaaaaacacgaccgatgatagtacactgctgtgattaccattgcaaggtataattctgaaagcaattcacaactcatggaacttacctttccgttggatgatggctgtgattaccattgcaaggtataattctgaaagcaattcacaacgacctgaaagagcattcacaccttgtagatgctgtgattaccattgcaaggtataattctgaaagcaattcacaacacctataaggtcctgggctccatttatatgctgtgattaccattgcaaggtataattctgaaagcaattcacaacacgacccagcagggaaacaataaattatttgctgtgattaccattgcaaggtataattctgaaagcaattcacaacatacttgtgtaggtcgtgtcgttgtttgtgctgtgattaccattgcaaggtataattctgaaagcaattcacaacagtcgatgcaatgtctactggtaattatgagctgtgattaccattgcaaggtataattctgaaagcaattcacaacccaatgtttttttctgaatcataaaagccgctgtgattaccattgcaaggtataattctgaaagcaattcacaacaggtctgtcaaatggaaaagggttttatcagctgtgattaccattgcaaggtataattctgaaagcaattcacaaccgaaaaatggcttatacaaaagtatctatagctgtgattaccattgcaaggtataattctgaaagcaattcacaactgaccgttagcaaccaatattgagccatctgctgtgattaccattgcaaggtataattctgaaagcaattcacaacatcccaaataaataagtgtcgcaccgtttagctgtgattaccattgcaaggtataattctgaaagcaattcacaactgaagatggtataaaagttcctttgccacggctgtgattaccattgcaaggtataattctgaaagcaattcacaacaaggaaggtaaggtcgggatagaagacttggctgtgattaccattgcaaggtataattctgaaagcaattcacaacactaagattaacagcacaagaagaagaagaagagctgtgattaccattgcaaggtataattctgaaagcaattcacaacaacatggtgagtatattttttgaatacaaagctgtgattaccattgcaaggtataattattcgtgaactttggtttttaatggttctcatgaatgctaacgcatttatgaaagcaattcacaaaaaaccgtcccctgagcggagcctaagggaacggtagttagcagaataggctccatggcaggtgccatactttaaaaagcggtaggataagggaaagtgatgtacctacggcacataaggtaaggttttccttactttcaactactgttaccaagcttgcccacctatggagggcctcaggacaaacgcgtttagtgttttgaagggaaacagttttcgtgtaggacagctatcatccgtgccgctggcactccttctggcggtggtggaggccttaacatccagcggatgaatccgcaggttactaaacccatcgtgccgctggcactttctccaagtttgtacaatagaatagcagcagcctatcgcagaaaatactgaaagagcaaggacatcagttggtctaaagtactaataaagcatcgcacctgtctgcccaagtggggagaatgatttagatgagtttaacccgaaaaatcaatgtcgtttagttaagaagtttttccaatacggatcgtccattgagaggattatggttttaatccatggcttttttacacccgttttatcaatgtcgtttagttaaggccatttccctgttttcacctgctaggagtttcttttctatttgactttaactgtatggctttggccattttggtggattttatccttttccttttttccattgatgaaaaaagaaagaaaaaaatctaggccggtggtctgccctttaaaatggaacatggatttaccctgcgaccgagatccgtcacccattttaatttccagccgatggctacgacctaaaagcgagtgggtctcgctgttccacgacgcgagccaactcactttcttaacggcctccaccatcggctggaaaacaggcataccaagggccgtaagaaggaagcgatacctttacgggacttatcaactgaattcgccttgcaggtatttggcgttaagaaattaaaaagcgggcgggcaaaaaggcaggcttgtttgacgaaatgctgaccaaaaagaatgctggctgctagaaaaggaggagtttgcatgagggagggttttaattttagcccaatagatgcgcagcggcggggtttttgggttacttttttgacctgaagcaaaaaagtaacaaaggtaaagaggtaaagaccatcttggaatttagcatgaaaaataattaaacccatatttccagaatttgaatttactgatcagtgttgtatatttttaaactcggtttatatatttggttttgtcaacgcctgtcctggcagctattagttagtttggaggtgggaacgtccccagtggcctaaataggccaatgtaccgaattgaataatcgataaagtgttcctatttttaacgagatataacattcatttgaagccctctgatcaaatctttaattatgcatccttacttttctcatttgctccaggatattcaagatgcccataaggaggaatcttttcctaatcccatcgacaaatccgatatcgaggaacatttccaagaaatagatcagtggctttccggtgatgcggcacatacgcttggttattactgtggattaagccctgaggattttccgccttccaacgatttctctgacgaggaaatcaaacacatctgtgaagctttcgaaaaaatgcttgcatcctggggtggcatccatgatacccccaataacttcccaattagggagaaatacagccttatcataggattgcttgaagaagatttcactccgataaacggtggcgtctatgtctttgattggtgcacaggatatgctcctgattgccgactgggggtatattgtaggtgtttggagttttggaaagaagaccagtaactgtctggagttcacctatgataaaacgttaacctttataatttccccgcatacctccccaccgcaaaagcgtctgttttcagcgttccgatttttccggttttgagatcggcgaggagcttgccggtggcaggtgccaagctcacgcccatcatgctgtgccctgccccgaaggccacgttttcccagcccggtgccttgccgatatagggcaacccatctggtgagcaaggacgcatgcctttccatattttatcctgggaaggaaaatcagcctgaaattcaggataataagctttgatcgattcaaaaatcccctgtacacgcctcatatttatcatgtcaatacgattggagatttccatggtgccgccaaaacggaccttgtcgccgtagggactttgggaaaccctggcttctgtcagaatacttgcttgtttcagttccggcgtattggtcagttcaaagctgtatccttttccgcccatcatgggaagcctgaaccctagcatcttggcgatttctcctgaccatgaacctgcacagaccatcacatggctgcaatcaattttgccttgggaagtaatgaccgccgttattttgctccctgctttctcgactcccgtgatgcccacattgctctttaactgcaccccatgctccttcaagtgatttttaaggatgcgatagaggtcttttggagagagatgggcatcatccggaaaatacaccccgccacgcacgtccacctcttggtttggctccaattttcggatatcatctttgctgaggatctctgcattcagcccactttcccgcgccaaatgcgccagttctgcctcttctttttcgccttccctggtcttgtacagcatcaacagcccacggtcttgtaatttgatggcttcatttccatgggtggctacaaaatccatgtaaagctgcttgctgtacaggctgattccctttagataaggaatggattgcgccacatgcttggcattagaatgtcggtaaaactgaaggcaccaatcgatcaatcgcttatccagacggggctggatataaaaggggcttttggaagaaaacatccaggaaatccccttagcaatcatacctggtgatgccaagggcacgatgtggctgggcacgatcatccccgcattgcccgtggagcagttttccttcatgtctcctttgtccacgacaatcacctcttcaccctgttgctggagaaaataggctgtaaaaagcccaacaatcccccctcctattaccaccgttggtttcatattgttttgttgtagaattgttttagtgttgcgcttttatactgtggatagctataaggctattcctttgctttacacttggttctgaatcctagatacgttttacttgatattttgtatttgtcccaatccttggacagcctttttccattcgctatatcacctgaaatccatgcacatagggatcatcatcatctaaaaagattgtgttataaccggtgattttggcccagccttctatactaggtattatggcatcaaaatcccccactttggtttctccgataatttcaccggtaaacctcgaaccaatatagctttcattgacaaatggttcgttgacgtgcaatttcccttgcgaatagagctgtgccatcctggcggaagttccggtaccacatggagagcggtcgatggccttgtccccataaaacactgcattgcggccgtgggagctattgtccaaggtcctgccaatccactggatatggctcaggccattgatgcgtggattttcaggatggacaaattcataggcttcattaatggctttacgaagctttcggctcatcgtgatcaactgctctgcggtaaaatcctgtaagccaccgaaattttcctgcggctccacaatcgcatagaaattcccgccataagatacgtcaaacgtcagttctccgagcacatcacaatttactttcagccctttggaaatcacgaaactgggtacattggtcaattttaccgaagtcacctgttctccctcctgcgtataacttaccagcaccaatcctgccggggtttccaaccttaatttgccaggggttttaggtgtgatcaagccttcttcgatggctaccgtcaccgtgccgatcgtaccatgcccgcacatgggcaggcatccgctggtttctatgtacaggaccgctacatcattttgcggatcatggggcggatagagcatcgccccggacatcatatcatgtccacgaggttcaaacatcaagcctctcctgatccaatcgtaatgtttgacaaaaaactgccgtttctcaaacatgttttccccctccaaaaaaggaagaccgcccgtgaccaccctcacgggattgccacatgtatgggcatcaatacaactaaaggtttttttcatttattatttcaccactactatttagggtaatttatacgattgactaatttaaagctctaaggattttaaatcctgaccaacgtatgcgttccaatgctttgttttccaaattgaaaatctttcttcctgtattggagtccgagactcctcggctatcagtgcaggggcagagcccctgcactgatagccttcgtcaacgtattctaaaggactgatcagaaagtgtcctttaggggatttaggggcattttttttagcgaattcccttcaaaaccaacatttctgctcaaccgccaataatgctacccccacctacttcgtaccttaaactacccccctgtactcaacactccatcaacggtcctgattatccccaaagggttggcttctttcagcacctcaggcagcaagcgatccggacagttctggaaggcaaatggccgggcaaaacgtttgatcgcatatacccctacagaggtgcttcggctgtctgtggtggcgggaaacgggccaccgtgctgcatcgcgtaacctacttccacaccagtaggcacgcccccgaagagcaagcgtccacatttttcttggaggatactgatgagcgctgcttggtcggccacctcatcctcatgggcccatagcgtgatcgttagctggccttgcaaggagcttgctgcttggagcaatgcgtctttgctatcataggccaccacaatcccaaacggtccaaaaacctcttcttgcaacacttcctccttgatccaagtatccagatcagtaagggcaagggcgggatgacctgtttcttttcctgcggccttttggatccacttcagcccgccagcattcgccagcttatccagactttcattataggccgtttggatcccatcgtgcaacatggcttggccagctgtatctgccaaggctttgccgacttgctgggcaaaggcctccgcgacatctaccggtacaaaaatcactcccgggttggtacagaattgtcctgctcccagtgtcagagactgcgcatattgacccgctgcttgctggggatcggccaatgtcttttcaaag

SEQ ID NO: 1163 - DNA, 24485 bp, synthetic construct
  misc_feature 1..24485: note = Synthetic
  source 1..24485: mol_type = other DNA
tgcttaaatacttctctcgcacgatttcattggcagccaattcctcgggctcaccttgaaagaggatttttccttcaaacaacaaatatgctcggtcggtaattgtgagtgtttcttgcacattatggtcggttatcaggataccaatattacgatatttcaactgccaaacaatatgctgaatatcttcgacagctatcggatcgactccggcaaacggttcgtcgagcataataaacttcggatcgatggctaaacagcgcgcaatctcggtgcgtctacgttctcctcccgagagctgatcacctttgttcttgcgcactttggtcaacctgaactccttaatgagcgtttccaatttctccaattgatagctgcgaggttgccctgtcatctcaagaaccgagaggatgttatcttctaccgtcatctttcggaacacactggcctcttgtggcaggtatccgatgccggcacgagcacgcttatagacgggatatttcgttatatcgcagtcgttgagataaatatgtccatcgttgggaacaatcaatcccgtagtcatatagaacgatgtggtttttcctgcaccgttaggcccgagcaaaccgacaatctcaccctgcttcacatcaatcgacacgttgttcaccaccgttctttttccataacgtttcaccaatccttccgttcgcagaaccatcgtccgattctgcatttcaggatttgccgacacggcatcaaccgtgttgttccattcatccatatatcaatccatctgtcaaatgtgtcgcaaaattagtaaaattccatctaaataatacttagaaaatcaaaaaccatcacttttattgcagttttttaattgattttggttacttttgcagctaacaaaccacgataataaatggtattattgaagtttcttgtcactttcggaaggtatctaatattgatggggcgatcatttgcacgccccgaacggatgcgtatgtttatgaagagatacatcaaagagatgtcgcaattgggtatagattccattggaatcgtacttttaatctcgttctttatcggtgccgtaatctgtattcagatgaaactgaacatccaaagtccgtggatgccgcgttgggtttcaggctataccacccgcgaaataatgttgctcgaattttcatcgagcataatgtgtttgatattggccggcaaagtgggctccaatatcgcatcagaattagggacaatgcgggtaacccagcagattgatgcactcgacataatgggcgttaactctgcttcttacctcatattgcctaagattctgggactggtaacaataatgccgttcctcgttatattcagttcggcgatgggaatcatcggtgcttatgccacggcttacatcgggcacatcctcagtccggaagatttgacactgggaatacagcactctttcaactcgtggtttatgtggatgagcattgttaagagtctgttctttgcgttcatcattgccagcgtgtcgtcgtatttcggttacacggtcgacggcggatccgtagaagtaggcaaagccagcaccgatgccgtcgtaagcagctctgtcttgattctcttctcagatgtgttcctgacacaagtgcttagttagcgccctgatatgtatacgtaatggatttctattgtccgcaagcgagacgatgtgtagaagtagatgaagaggtgtacgacagtcctaaggtacagaaaaaaggtacagagagaacgacttttctcaatcagaacgatatcaaagttatcagatttaagaacgaagaagtagaaaacaatatagatgatgtggttaataaaatccgtttggcactactttcacgagtcgaatccggctttattgattagatcacgaccacaattcaattatagacaatcaattgggttgggatcgggcaactttgtttgttctgtcccctaaccccttaacttaggggactaaagtatgatagaagtaaagaatctcacaaaatcatttgaagacaagactgtgttgacggagatcagcaccacattcgagaccggcaaaacaaatttgataatcggtcagagcggctcaggaaaaactgtactgatgaagaatatcgtgggacttttagagcctacaagcggtgaaatactctacgacggacgtaatttcgtggcaatgagcaagaaagaaaaagtgcgaatgcgtcgcgaaatgggtatgatctttcagggagcagcgctcttcgactcactctccgtactcgaaaacgtgatgtttccgcttgatatgttctccttaatgacacttcgcgaccgtaccaaacgggcacaggagtgccttgcaagagtgaaactgatcgacgcacaagacaaatatccaggtgaaatctcaggcggaatgcagaagcgggtggccattgcgcgtgccatagtcctcaatcccaagtacttgttttgtgacgaacctaactccggtctcgacccaaaaacctccttggtcatcgacgaacttctctcaggaatcaccaaagagttcggtatgaccaccattatcaacacccacgatatgaattccgtgatgggcatcggcgaaaacattatcttcatttacaaaggaaagaaagaatggcaaggtaacaaagacgctgtgatcagctctaccaacgagcgtctcaacgccttagtcttcgcttccgatttgttccgcaaggtgaaagaagtggaaatggaggaagagaatgagaagaaatgaaaagacatttcacccgtagcaatgctgggattctgactgaatccgaacacacgaattcaccgtttatgaagtgattgtacatagaccggtcactgcttaaacgttaacatcattccgtttcacactttttacgcagtaaaataccgttttaactcagaataaccggattctaaactatcgattaccaattaccttatcgcatataccaaacatcctcttgctctaccatcgggacgacaatctgctcggtagtactatctccataggcgaagactaagaacacatcggccacgtggcgagccgtatcggctttagcattaacgatgcgtacctcacgaattccgcgatgttcatcttgctgctgaccgacaaacatcttggcattaacaatcagctgctcgcgataagaatccggaagcgagtcaggacagtagaaaccatcgacgtactgatcgtacttaccggccaaaagctggtcataataaaccttagcagcctgtgccgccacctcatccggcagaggtcctgacgcacacgaagctgcaacgaacagggctgcgacatataacagctttctcatttcgggttatttctgacgtatgaacacgttgatcggacagccgtgcatcgcccaattctcacggattttattctccaagaatcggcgataaggctctttgacgtactgcggaagattggcatagaacacaaacgacggtatctgtgtattcggaagctgtgtacaatacttgattttaatgtacttccccttaatcgatggcggtggataagcctctattaaaggcaacatcacctcattgagtttggctgtaccgacgtgcgctttacggtttaggtaaacctgtttagccgtttccaaaaccttaaaaatgcgctgtttggtaagtgccgaagcaaatataataggaaaatcgacgaatggtgccattctgtttcggatagcattctcgaacgtttcgattactttctgcgtcttatcttctaccaaatcccatttatttaccaccacaacgagactcttattattcttttgaatcagctgaaaaatattcatatcctgtgcttctacacctcgcgtggcatccaacatcaagatacagacatcactgttttcaatcgatcggatagagcgcatcacgctataaaactccaaatcctccgtaaccttgttcttgcgccgtattccggcggtatcgaccaagtagaaatcaaatccgaacttgtcgaatctcgtgtagatactgtcacgtgttgtgcctgcgatctcggtcacaatattgcggtcttcacccataaatgcgttgatgatgctactcttccccgaattaggtcgccccacaacagcaaagcgtggaatgccatcctcgatgagttcggtatcatctcccaccaacttagacgtcaccagatcgagcaaatcgcccgtaccgccccccgtggcagcactgatacactgcggatctccaagtccgagagaataaaattcagctgcttcgtaatactgcccgctattgtctgccttgttagcaaccagtataaccgggagtttcgaacggcgaagtatctgcgcaacatcttgatcccagtcggtgactccggtcataatatcgaccaaaaacagcacaaggtcagcctcttccgtggctaccagcacttgttttcgtattgcatcttcaaatatatcatctgagttgactacccaaccgccggtatctaccactgaaaattcgcgcccattccagtcgcacttaccgtattgccgatcgcgtgtagtgcccgccgtgtcgctcacgatcgcactccgcgtcttggttaatctgttgaataacgtggatttacccacattagggcgccccacaattgctactaagtttgccattttattctaaattatacccgaattgattgagttcccgctgcgacgaacgccaatctttatccactttcacgaatgtttcaaggtaaattcgcttgtcgaaaaatcgctccaaagccttgcgagcctccgaactcactttcttcaacgccacaccttgatgcccgatgatgattcctttttgactatcgcgctccacgaagatgatcacccggatatggatatgcgcgtcgtcttctttgaaactctccactttcacctccacagaataaggtatttccttgtcgtaatacagcaaaattttctcgcggacaatctcactgacaaagaatttagcaggtttatcagtcagctgatctttctcgaagtaaggcggcgaagcgggcaacagctccttgatgcgctttaaaaggatgtcgattccgaagttgttctgtgccgaaataggcaatatctcggcctcgggaagcagcgtatgccatcgctccaccatcgttccgagttgcttctggttgctctggtcaatcttgttgataagcaacagcaccggaatgatcatttttctcaccttatttaagaactcttcgttcttctccggattctcaaccacatccgtaacatacagcaacacatccgcatcagccaatgccgactcggaaaaagcaagcatcgactcctgtaatttgtagttgggtttcagtacaccgggcgtatccgaaaatacgatttgcatatcctcggtattcacaatacccataatacggtggcgagtggtctgtgctttaaacgttgcaatggatattcgctcgcccaccaaacggttcatcagcgtagatttacctacattcggattgccgacaatatttacaaaacctgctttatgcatctataaattgtttaaaggaccgttaatcgtacgatatttaaccgttagttatacgacatttaattgttaattgcacagcattcaaccgttagttgtgcagcatttaatggttaatcatttcgcaatgagaataaaaaaacgcattcttttcatacgaaggatgcgtttcttgatgtgttattgcgttctgaatcacttctttccggccgcctctgctccgtcatacgcccatcgataataggctgctccgttgacgaaaccggctccaaacgccgtaaagaagatgttatcgcctttcttcaactgcgactcgaagtcccacaaaacaagtggcatacaagctgcactggtgttaccgtaacgctgaatgttgaccaacactttgtccatcgatacaccgacacgcttggcaacggcctcgatgattcgcaaattggcttgatgactgatcacgtaattaacatcattctctgtcaaatggttgcgttccatcagtttgacacaatcatctcccattgccgttacggcataacggaacaccgtacgaccctcttgataggtgtaatgaaggcggtgatccaccgtaaaacgcgatgaggggcacaccgatccgcccgctttcacgtgcaggaaaggcagtcccttaccgtccgtgcgatgataagagtctatcaatccgatattttcttcggtagtgccttcaaccaaaacggctcccgctccgtcgccgaacagcggacaggtagcgcgatcctgatagtcggttatagccgacatcttgtctgcaccaatgacgatgatacgccgatgacgcccactttgaatcatattgcacgccacatcgaaggcgtacataaagccacagcacgccgcagagaaatcaaacgcgaacgcatttttcagtcccagcttacccaaaacgatggaagccgtagaaggatgaatataatccggcgttgtcgttgcaacgataagagcgtctatactatcgggatctgcacccgttttcttcaacagcagcttggccgctttacgcgccatataagacgttccgaggccttcttctgtgagaatacgccgctctttgatacccattcgcgtggtaatccactcgtcgttggtatcgaccatacgcgataattcctcgttattgaggacgtaatcgggtacatagccagcaacgccagtaataatcgcgttgatcgtagccattattcagcagcttccttaacgatagccaccttacctctgtactgtccgcaggtgggacaaacggtgtgatagatgtagtaagagccgcagttagggcataaagccaacgtgggcgcaacggctttgtcgtgcgttcttcttttcagtgtacgtgtcttcgactgtcttcttttaggatgtgccattttgttttattcttttaatattgtttttaattgttccaaaccgctccatcgcgggtctgtcgattcttcatcaagcccattgctacttcgggtagccgtatgctcagcgagcatttcaatcatagcaggattacatttgccaggtatatgcacgtgcttgatagggattgacaatgcaacaaactcgtaaatgatccacgaaaggtcgagtattcctttgtcctcgggcacaatcagaagatcattttcctctgaatgcgtctcacccaacttgacaacgagccggttatcagtattgatcggctgctccatatcatcaagacagcgatcgcaggggatgtgtatgctgcctactatgtgcgaatcgagttcgaaaagagcaccggtcttgcgtatagacagcactacacacaattcgcctcgccgcacttcgggcgcgtttatcacctcaaagtagttgtcgtcaagctgaaattcacagctattaagcccttctttcagctctttcaaatctatttttaaagcttctaaactacacatttgggttgcaaagttacgaatattttccgataaaaggtaataaatgaatgaaaaaatctaatttcttaattctattctgaacgtggttccgtgtcccggttcagattctttcactcgaatcttgccgtggtgatagtcttcgactatccgtttagccagcggcaatcccaatccccaaccgcgttgtttggtcgtgaatccgggacgaaaaacgtgccggacgtctttcttgcggattcccttacccgtatcggtaacatctatcaacactctgtttccgacctgtattatacctattataatagtacccgtaccatccaaagcatcgacggcattcttgcaaagattctcaatcacccattcaaacagttgcacattgaggttcacagtcacctcttcggacggcagatgcaactcaaaacacaccttgtcggacgtgcgacgcgacatataatcaaccacatgagctatcaattcattcagatttgcaggcacagactcgggcgttgatccgatcttcgagaaccgatcggcaatcagttgcagccgtttcacatcactgtctatctccggaatgagttcatcctgcggataacgctcacgcaagatctccgtccacgccatcagactgcttatcggtgtgcctaactgatgagccgtttctttggacaatccggcccaaactctgttttgttcggcccgtttcgacgtaagcaaagcaacgacagctgccacaatcagaatgataaccgcaccgagttgaacgaacggatagacagctgaaagcttcaacattcgcgagtcgtcataacaaacttcaatataatctttccctgccgtcccatcaatgtcgatacgtatgcagcgcccctctgcccgaagtcgcattccgatggccgcaacctgccgcagtctgtcggcagacgagtctgcgggtatatccaaattacgaaaagtttgcacgtttcccgcccgatccatcacaataaccggaatagtagtattaccgttaagcactttcaacaccaagtttagatcagtccattcatccgcattattcagcgtattcattgcttctgcccacacctccatcttcttacgctcctcttgttccaagtcactgatcaggaaatgcgccaccgctaatgaggctaccgctacgaaaacggtgcccagaacgagcagaatcttgatttgatgaatacggtctgtccattgcataacatcaaacaaacgtacagcccctgcatatattgtgttgcaaatcgacttcttataaaagtgagaaatcaacaaaaacatttgcaagtttcatttcttttaacgatatttgtagccgagaacaacaaaaaataacgacaaacaatcaacttaaaaatcatattattatgaacaaaaccaaaatgattgccattggatttgccggcgttgtaactgtcatcagcgcttggctgttggccaacggatttacgaactttaaaaaagatgccccgactatcaacgtaaccggtatggcagagaagcaaattacgagtgatttgatcgtgtggaacatcaccgtcaatgccgaagatgtttctcggagcgatgctttctctgcgtataagaaaacagcaaaactgctgaggcgctatctcaacgaccacgggattcccgacaaagaaatctcgaccaacagcgtggacatctctaaacagaccaaagaatattatgactcagacgagaagcgctatttcaccgtcgacaaaggctattctgcttcgcagactttcactgtcagttcacacgacgtgagcaatgtagaacgtgtttaccagaacatttccgagctgtacaatcagggtatttccttttcaagcagcacaccgtcgtattattataccaagctcaacgagctcaagatggagatgcttggcaaagcaagtgccaacgcttacgagcgcgcacaggtaatagccaaaggtagcgaagccactgtcggccctctcatttcgtcctcgatgggcgtcttccagattgtagggctcaacagcgatgaggaatacagctggggcggaacgttcaacacgacaagcaaagagaaagttgccagcatcacggtgcgtaccacttacaaggtaaaataatccactcagctcccccattcggcgcctcacacattgccttttgcaacgtgtgaggcgtctctttatcccatatctctcacaactaacggttaatcaccgtgtaagtaacagttaattgcacgataagtaaccgttaatcatcgtacgaataaccgttaatcgcgatacacttaacagggttccgtaagatattgataataagaaagataagcaaataaaaagggcgagtcaccccgcccgaatgttttcacaacggaataatccttattgtgattagctaaaaaacggtacaaagaaaacaaattattttgattcttgcaaatattttagataaaattttactatatttgcagcatcacatcgaaaaatcagacaattatgaaaaatatcttggggttagatctgggaaccaatagtatcggctgggcgctgatcgacaatgaatcgcatagaataatcaaatcaggcagtcgtatcataccgatggatgccgcgacaatgggcgactatgaaaaaggaaacttgaaatcggcagattggaaacgaacatctttccgaggaatgcgaagactctatgagcgggctaaactcaggcgggagcgattgctaagggtattgaatattctcggttttctgcccgaagagtttcgtcggcagattgatttcgagcatcatcccggccaattcatagacgggaaagaacccctaattgcctatcaccacgatgaaaacggacagagagtgttctcatatatgtctgctttcgaggaaatgttgacagacttccgggcaacccaatcggaacttgtcagagatgggcggcgcgtaccttatgactggacgatttactatctgcgccataaggcattgacgcaacctgttaccaaagaggaattagcgtggataatactgaacttcaataccaaacgtggttactatcaactgcgtagtgagagtgaagaagttaccaccaataagaacgaggaatatgcagaattgaaagtagtgagcgtagaaaagaccggtgaagataagaaacgagccggctactactggtatacaatcacttatgacaacgaagctgaacagaagataacaagcacaatacctccaagacagataggagataaggtggaactgattgtcaccacagcccgggataaggcaggagagattaagaaaagcgttcgttcaccgaaagaagatgactggacactgatgaaaaaacgtacagaacacaatattgaagaggaagaatgtacagttggttcatacatttatcagcatattttagctgatcccacggtgaaagtacgtggaaaattagtacatacaatcgaacgaaagttctataaaaaagaactgaaacagatattgaataaacagaaagagtttattcccgaattgcaggatgccagtttgtacgaggcgtgtatcaaggaattataccgtaataacgaggctcatattcagtctattgccaataaggattttacagatttgtttgtcaatgatatcattttctaccaacgtccgttgaaaagcaaaaagagtaccatcagtaattgcccgtatgaaagctattattataaaaacaaagagacaggcgagcttatccgtaaacccattaaatgtattgcaaaatctaatcctttatatcaggaattcaggttatggcagttcgtacataaccttcgtatctataagaagagtgaagaagtaagcggaagattacagacggacgtagacgtgacagatagatttctgaccactcccgatgattatgccaaactcttttcttggctgaatgaccgcaaggaaataaagcaaaaagaattattgagatatgaagccttcggactttccaagtcttatggcgattaccgatggaacttcgtagaagacaaaccatatccctgcaatgaaacattgcatgaaatcaaccggcgaatgaaaagtattctttcagacaaaaaactttcatcggaggcctatcagcagctgtggcacattctttattcaatagacgatcctattgaaatacgaaaagccctcacttcatttgcacaaaatcaggaaataaacagtgatgattttgtgaatgccttctatcaatatgtacccgaaaaaaccaagagttacggagcatattcagaaaaagcaattaagaaactgctgccgttgatgcgtagaggaagttattgggcaatcgggaatatcgatgaaaagactcatcgacgacttgataatattatcaatggagttgcagatgacagcatttccacttgtactcgcgaaaagctgaacaatctaacggatatcacgatgtgccaaggtatgccactttggcaagcctgttacgccgtctatgatcgccactcggaagctgcggacacaacaaaatgggaacaaccggatgacatcgatacttatcttagcacagaattgaaacagcattcgttgcgtaaccctatcgtagagactgtcatcagcgagacattacgtgtggtgagagatatttggaaggcctacggtagaccggaagagatacacgttgaattgggacgaaacttgaagcaagatgccaaaagtcgtaagcaagatgcaatacgtatggcagaaaacgagcagacgaacctcagaatacgcgctttgttacaagaactttccaatcccgaatgtggtgttgaaaacgtcagaccacattctccaagccagatggaactcttgaaaatttatgaaaatgaagttttacagagtaccgatgacattccggaagagatcagtaatatcatcaaggatttaggaaaaacggattccaagaaacgtccaagcttatcggatattactaaatatcgtttatggcttgaacagaaataccaatcaccctatacaggacatattattccactgtccaaactatttactcctgcttatcaaatcgagcacgtaataccgcaatcacgctatttcgacgactcaatcagcaacaaagtgatttgtgaagccgaagtaaataaggagaaagatcgtatgttgggatatgagttcattataaataagggcggcagtattgtcaaaggaagtttcgggcaacagttcaaaatctttgataaagtgcaatacgaagactttgtcaaacaacgttatgctcataataagactaaaatgaagaaactgttgatggacgatatccctgacggattcatccaaagacaattgaatgacagtcgatatatgagcaagaaaattatcagtatcttgtctaatatcgtaagggaagacggtgaaaaagaggcaacttcaaaacatatcatcgtgacgtcgggtgccatcaccgacaggctgaaaaaagaatggggcataaaagatgtatggaacgacatcattgcgccacgtttcaaacggctgaataaactcacggacagcaataattacggaatggaaacagagaaagaaggaaggcaatattttcaaatcaacgttccgacagaactttctacgggactcattaaaaagcgtatcgaccaccgtcatcacgcaatggatgccatcattattgcctgcactacgcgcaatcacgtgaactttctcaacaacagtaccgccgcgtctgatcagaaagacatcaggcgtgatcttcaacatactctatgcactaagaccaagactgacagcaacggcaattatgtatggagattcaataaaccttgggatacctttacgcaagacacacgccaagagctggagggaatcattgtcagtttcaaacaaaatctgcgtattattaataagatgtccaactattatcaacactatgtcgatggcagaaagacaatcagccgacaaaataaaggtgacggttgggctatacgtaagtcactgcataaggcaactgtatcgggaaaagttaatctgaaaagaagtaaaacggtcggttttaaagaagcactgaatgattggtcagccatcaaagacaaaacatcgaaagctattttgcagaagattattgctcaatataaaaactacgatcctaaaaccatatttaaatatttcaaggatcgcaactttaaagtagagggtaaagattttagtaagcttgaagtttactataatacatcagataaagaaccgatgtctgcacaccgtgtcaatatagataccacttttgatgagaaagaaatacgctctattacggatacgggaatacaaaaaataatgctgaaacacctccatacttacgatgatgcgcaagggaaaactcatccggaggcagctttttcacccgaagggattgagaagatgaatcaaaatatccgaatgctgaacggtggcaaggatcataaacccattttcaaagtaagaaaagcagagattttggggatgaagtttgctgtaggtgaacgtggacataaagataagaaatgggttgaagcggataaaggtacgaacctcttctttgctatttatgaaagtgaagaaaacaaacgatcttatagctccatccccttaaatgaggcaattgacagattgaagcgaggagaaaacatagctgatgaacgagatcagaatggaaataaattgctattcgttctctcacctatggatttagtatatgtaccggatcccgatgatgctcatattgatgaggtgaaaggaaataacaatatatttaaaatggtatcgtgcacaggaacagaatgctattttgttccagaaacttatgcgaatgtcatctgcaaaggaaaagagttagaatctaagaacaaagtagaatcttacgacggaattaacatcaaaaagagttgttacaaaataacagtggatagattggggaaagtgagaaagatatttaaaggttaggcatatgataaagaaaacattatactttggcaatcctgcctatctgtcgctcaaaaataaacaactcgttatcaagataccagaaattgaacggaataaagagttgcctgaaataatacgcaaagagtctgtcaggactattccgatagaggatatcggagtcgtcgtattggatcataaagagataacaattactcaatcggtaattgcagcattactcgataacacagtagcttttatcacttgcaatgataaacgtatgccgacaggaatgttcttaccattgcaagggaatacgatacaaaacgagcgattcagaaatcaactcaacgcctctttaccattgaaaaaacaactatggcaacaaacaataaaagcgaaaatcgaaaaccaagcatttgtgctccatcgcaatactgggcgctctatcgctaatatgatgaaaatggcaaaagacgtacgcagtggtgatcccgataattacgaagcaaaggcagctgcatattattggaaaaacatatttaagaatcaaccgaatttcgtgcgtgcccaggaaggagaagcaccaaacaacctcctgaattatggttatgcaattcttagagccatagtggccagagctttggtaataagcggtttactccctgtggcaggaatccatcaccacaaccgctacaacgactattgtcttgctgatgatataatggaaccatatcgccctttcgtagatcaattgatcattgaaataatgaaaaatcaggatattcccgagactttaaccattgacttgaaacaacaaatgttgtctatccctgtacttgatgtcaggatttcaggaagacgaagtcctttgatgattgctgtatctcaaacgacagcaggattggcaaaatgttttaatggagaatcaagaaagattgcttatcctgaaatagaatgatcgacagattcaatgaatacagagttatgtgggtgctcgtcttttatgatcttcctaccgaaacgaaaaaagagcgcaaaatggcagcaaaatttcgtaaagatataatgggggacggcttctcaatgtttcaattctccatctatgtacgccattgtgccagtatggataacgctcaagtacatatcaaacggatacaatcaatcctaccagaggcagggaatgtcggtattatgtgcatcactgacaagcaatttgcagatattaagatcttcttttgcaagaaagaaaaaagaccgaatgcacctggtcagcaacttgaattattctaaaaacagaatgtggaaattcaatttatcatagaatctccacattccaatacaacaattttttctttctgtaaaatcaacaataagtccttatcccacagtatattatacaaactatattgttgtttaccccacaaaggtactaattttttagctaatcacaaccgcctatattcaaaagtgcttcttgcgtgtattgttgtttaccccacaaaggtactaattttttagctaatcacaacccgttcatgttcgcttattagaacacaggaattgttgtttaccccacaaaggtactaattttttagctaatcacaacgtgtaaggtgttgctatgaatagtagtggattgttgtttaccccacaaaggtactaattttttagctaatcacaactggagtgtgtggataaataatgagttttccattgttgtttaccccacaaaggtactaattttttagctaatcacaacttgcttaaactgattgtccaaatcaagaccattgttgtttaccccacaaaggtactaattttttagctaatcacaaccggctgggaggctctttgaaattttgacgaattgttgtttaccccacaaaggtactaattttttagctaatcacaactaaaagccaaaaatacttctttttttcaaattgttgtttaccccacaaaggtactaattttttagctaatcacaacaggtggagaaaccacaagtaaccgacaatcaaagatgagatgtattgatgggagctttaaagaaagatttcgataatcacttcacgctgaacagctatctgttgatggctccgcagcgcggacaacggcccttgtggcggagcttggcaccacagtttccgcagagataataggctcggttgtgcgtgaaataacaacggagggcaaagacgaaataggcgatgagtatcagatagccgacataatataaagtggtgagactgaagacaatgtaggcaacagcacaaacggcggctaaaccgcagaggtacatcactgcgaagcgaaacggaagctgatggcgcacgtcgtcgactacggccagagctgtgatcagcatcgcccacactgaagccagaaagatagctaaaagcggcgggacagagaatggattgagggtgggatggtaatagaaatggcgccatacatcgggggcaaagagttgaatgctggcatagaatgtggcagacgatgccacaatgaggaccaagagagtgggataaaacgaatcgatgtcgcgaaaatggacgatgggcgcccgtcgactctgcaatttccgaaggagataaactatgccgatgagagtaatgatgaccaagaaaatgagcgtatggatgtctgaaaaggtcgagatgaactgcgaaatgggatcatcgggtaccaccttgggcagcagactcgactcgtgtatccaaccaaaagtggactgatcgcgggctacttgcacccaaaccgagtctacggggtcgtcagacaatattctgatgtcggccacaacgagatgttcgtgcttataaacggcaaacgaatcggcagacaaatgattgatgatttcttcgggttgctggcggaaaagcaccaaagaatcggctttgaccacgaagttgtaattgttagtgtaatggtgggtggaagagaatgacagcgagtcgagttgatattcgctgtaatgggtggttgcatcgtggctttggggacgttgatgatagcacgatgacaagctcgtcagcagcaagacgagcgtgaggagatgcagaaagtggggcttaagactcggcatagatgttcatttggcattctttacagttaaattctaaacggaatcgacggctgtctgtcagctgcaaatagagaggttcacgccaagccggatgcttcccgccgtgctttgtacaggcgcctaacgagtatttcaggcagtgacggcactgcattattaagggttctgtggaatttgaggcggctttaacggccggtatctcgaatgcctgatcgatagcggtaagaccgtggctttcataaaaggcgcgtgagacggtgttggcgctattgaacaagtaggaatgcgaacggtattcgggctgccaataacgtgccgttgtattcttgggggcagtcggcaggcatttcggggcagtacgggaactgatttcgatgccctcgatggctgtacgcctgagttcggccaacagactactcgggatgaaaaagcggtcggcttcattctcgatcgtcacctcggcgcattcgtaaggcgtgttgccaagtttggaaagctggcgaacgatattgtcgtattgcggtttctgtgccgcatctgccgcaaatggcagaacggattggccgattttgacatcgaatccttcgacttgtggaataatgcgcaacgagaatccgttggcagaatggccgagaatcatcttcacgggaatctttctgacagcggtttgatgagctaaaacggtttcaaaggcgtgatcattatttctgtaaagtgctgtcccggggtgcagatcagcaggcattttgagaggaaacaagcgatttccctcaacgcgattgacacggaatccttgtaattctcgctcgtgattaatgaagcaaaggccgtctccgttagcaaaagttgctgttcctgctacattgaatgaattgcttcttatctcctttaccttaccgacatactcgccgatggctttgggcgtgtcgaaagaggcaatagctgcgtgtcgaccattgataaaatagggagtgaaaccgcggttaaatgtcttgttcaagttgggtgtaaaagtataagaaacacggccaaccgaagcgcgacgatagcgagaaggatgcgcagcaacgagtcggtcgagtcgttggctatatgccgccaccacgtttttcatatagtttatgtctttcagtcggccctcgattttgaacgaagaggcaccggcagcggccaaagtttcgaggttattgatctggcacatatctttcaatgacagcaggtggcgctgatattcgatcgtttgaccggcgtcgtctttgagatcaaacttcattcgacaaaattgtgcacactcgccgcgattggcactgcgaccgaaacaatgctgagaggcataacatacgcccgagtaacacacgcagagagccccgtgaacaaagacttcaagctctatatcaggtacggcacgccggatatcggctatctcttcagccgacaattcacgcgctaagaccgcacgttcgactcctaacgactgcaaccacgctaccttttcaggcgttcggttatctgtttgtgtagaggcgtgtaaggccggaagttttatctcgggataattttcggttaattcgaaatacagttttacaatgcccatatcctgaacaagtacagcatctacatctatcgcagcaagatcaagaagtaatcgtttaatcttcggaagctcatcttcataaataatcgtattgatcgtgacatagactttggctgcaaatcgatgggcatacgtgcaaagctgacagatatcgtcgatgctattccctgccgaagctcttgctccgaagcgttgtgctccgatataaacggcatctgctccgtggtcgatggcagctaatccgcattctatattcttggcgggtgcgaggagttctaatgtcatcgttaacgaaattaagagattaaaaaattaaacatatagttacttctttgggaaacggcattctctatcctttttctctatacaaatctgtgcaaagatacgaaaaaacactcctatcgtcacattttctctttattttcttgtcgaaacaaaataatattcttacctttgctactatcttttactttcctaagttaggagagtaatatctgagcaagagagaatggtaacaacaaataacataagcaataacaatacaatgcaaagagactttgattcctctttactttttaacgctttatatttgtctatcccagatattttgctaacacacacacacacacacacatcgcacctggtgtagtaaatattttctaaatctttgcatacgcgcgcgaggacagccgcgtaaactccaataaacaaagggctcaacagagttccctttgttctgtttttatgccctttcgtgaagtttgtaagagataaaacaaacaagacaattctataatatttaaatcaaatacaatttaagaatgaaattaaaaaaaagaaaaaaacagtatgtaagaccgacagcgggaatcatacccatctgtgtagaatgtaaggcggcaccaccaatcaccatgtccggcaatcatatcccggcgtacgacgatggagaattgaacgccaaacagttcgatttcgatgatgaagaatgggatttcaatactgacaacccatagagtgaatataaaaggaaaacaaataagattttaaaagaaagaaaacaatgaagaaaaaatatctgatcaaggcggcatgtctgttctctgtagccatgttgatggggtgtgcacaagaagaagacaacagtaagaccgaaaagaaagggcgtgcatcgttcactacccaagaaagttcatcttcaactcgcaccacaggcatatacagcggttccggtatcaacttttactggacagagaaagactatgttatttggcttataaagtccaatggtgatcttatgaagtcatcaagtagtagtgtaagaaccagaactgccaaggcgactttttatttcgatgattataattacgaactcaatgaagatagttataaactgcgttatgtaggtaatggttatagtgactatataacatcttctaacaaagtaactataaaagacgtgcagatacaagacaaacctaatgatgccgaacatattggcaccgatggcgactgtggtaccgccactgcgacatatgtcggtgaaaacgaagatggtagacgtcattacagtttccgtcttcaacatcaagccacttatcttactttcatgccttatagtacctcttccagcaatatgaaacttacagaaatcatagttcaagcagaccaacccattgccggaacctataactttgatgataatggacttaaaaccgacaatcctacctctccatcgaatactattacactgaaattgcaagagtctcagttccctattcctgacaaaccttctcctgataaaaatgctgctattatggtgctggcaccgggttattactcttcgctcaaagtgacatataaactcaaaaatagcaatggaagcatcgaaacccagtatagaacctactctggcctaactctcaaagccggcaagaacaaaccagtgaaatacaatttagcctaattaccaaaaaaaacaaagcaaccgatccccattgggacaatcagctctgggctattacgccggcagcaagccggaactcattggcggcggcggttacttattggtcgtcttcaccgtgtccgtggcattatacagtcgttgcgtatggtttgggattctacgagttcgagagcaccgcgcttatagacagcttcacccgtcccaacggattccgtttatggcttgcccagtgaatctcaatcaattgcaacagattttaattcactatataacacttttattcaattaataaatatccataccctcgtctgcacaaggactgcaacaggagcaaacaacgactcgtacttccgtaatgcacagattatacttccgttgccgacgatttatactttcgtgaggcacgactcatacttccgtcattaacaactgtatatccgtcgcccgcaggtcgtatatttgatacaagcaactattatagttcttaacagacacaaaacaataaaaaactatggctttttggaaaagaatcaaaatgaaaatcaatggattgtggtatcctaagtcggtattggtaggtacacccgttaccaccaaacaagtggctgagcggctcgcacgtgaatctactgtgagtctggccgatgtctatgccgtactgttgtcattgggtagtgtactgggcgactatatgtcgcagggccgctcggtaaagcttgatggtataggttcattctacttcacagctacagccaataaaaacggcgttgccaaagaagaagacgtatctgccaaacagatcaatggcgtgcgcgtccggttcattcctgagacgagttacaaacaaaatggcagcacgccagccggccgccgtgccacccgcaatctcacggatgtgagtatcgagtgggaagagtggaaaggcgtgaagaagaaaccgaaaccataagaattacgaatagagggatattgaatgactgccctcaatacaatgtagaatgaatgatgacgaattgctcctatatcagaacaattcgtcatcttcttttttgtacgcatttgtctgcgaacaagatagggggttattttctatctgcttaccacaattgcaggcgctgttcttttggcaggaacatcttgttatcagctttcacgccgaaagcttggtaccaggcgtcgatgtgaggtagcgcaccgttgacgcgccagcgacccaatgcgtgcggatcgctcttggtacggttgcggatttcctgctcggtaatattctggccccatacgccggcgtaagccaggaagaagcgctgctcgggcgtgaaaccatcgattgtaggcagcggatgattcttcgttgcattcttaaaggctgtgtaagctacttgcaagcctccgtggtcggccagattctcgcccagagtgagctgaccattggcattgagatcgggcaagaccttgatggccgagaagaagtcggcgtactttccggttcggctattgaaattggcggcatcgctcttggtccaccagtcggtcatattgccgctcttgtcgtagtggcggccctgatcatcgaatccgtgtgtcatctcgtggccaatcactacaccgatagctccgtaattgaaagcatcatccgccgacatatcgaagaacggcacctgcaagattccggcggggaaacagatctcgttagttgtaggattgtagtaggcgttcaccgtctgcggcgtcatcagccattcgtcgcggtccacgggcttgccggcacggtggtcaatctcccatttcgtccagaactttcggcacgccattacattggtcagtaacgactgctctgcatctattgtgagacccgaaaggtctttccatttgtcgggatagcctattttgacgtagaatgtgcgaagcttgtcaagcgctgctgcctttgtcttcttgctcatccacgtctgcgcaccgattcgctcggccagtgccacttgcagattcttcaccaacgcctccattcgggccttggccgaaacggggaagtaacgctctacatacatcttaccaagcgcttcgcccatctgctgctctaccatattggtagcgcgcttccagcgaggatagttctccttgcgtccggaaagtacttttccgaagaagtcaaagttggccgctacgataggatcgctcagataaccggccgaactatctataaagttccactcgatataggcacgataatcatctgcattcatcgcggtgatgagtttatcaacaccagccacgaatgcgggctgccctacaaccattgtttgaatatacttgctgtctaccccctcagcattgagttcgcgggccaactgtacattcgggtagcgcttctcaaattctttcagcgtcatcttgtgatagttggcctctacatcgcgcagttcagtacgacttttgctgatacgtgccagcgcagtttcaatgttcatcacaccgcgcatcttggtctcggcctgtgctgctgtaaagccgaaaaaacgaaacatccgcacgagatgccgcttgtacgcttcgcgaatggccgtcgtagccgaatcggtgtcgaggtaatactccttttgccccagcgtgagtccgccctgatgcacaagcaagatattcatcttggcgttcttctcgtcggcatcaaaactggtattcataaagcccgagataccgtagggggcatatttcaatcgcaatgtttcaagatcggccacgcttttagcactctcaaacgaatgaatgaacggcattacaggcgacacgccctcgcgattgagtcggtcggaatccatcgccaatttatagaaatcgctcagcttccgctcgatcgtacccttggcgtacgagcctttcatcagctcagcaaggatagcattgatacgtttgttgttgtcctgtcccaaacgatcgaaactaccgaaacgtgaataagcggcgggtaggggattgttcttcatccagccaccacaggcaaactcgtaaaaatcgtcaccggctttcacacttgggttcaggttagccgggtcgacgcccgacttcagctgcttctgcgccattcccgcaatcggagtggttgccaacatcagcagcggaatcattcttttcattctcataattggtctatttaattggtaagtaagtttttaatttataagtagacaagtgaacgaggttacaaacaactcataaacccgttaactccatccgttctaattcttctgccagcatcatccagcgctcgttctctgcatccagcgtacgctgggtagatatatattctgtgacgagcgtcatatccgaagcattcgcaggatcggaaagcaagctgttgagttcggcgatccgt

SEQ ID NO: 1164 - DNA, 24482 bp, synthetic construct
  misc_feature 1..24482: note = Synthetic
  source 1..24482: mol_type = other DNA
gtttcgcctaaagctaactttactgtaggaataagaatatccttattactgttgttgtaaacttttaagttatacgtgctagaaccaatttttgtaaaaatagtatctaaataaaccgtgtcttttgagaaggtaagctctccagtgcttctagaaaattcaaaatcctttcggcaggagctacaaagtattaaaaatcctatggtaagtaaacagtaaaaggcgcgtttcattttagaggttttaatcgtattaaaaaaacagactatttatcttttttataaagtggaattcggtaagataatgaatatccaaaacctacaccaatattattactatcgtatgttttgttaaagccagggatgtaaacatttgtaaaattgtctggttcggtttccgatgctaataatttaagttgcacgtttacgccagcataaagattattgaatagctctaccttcatccctaaaataatttctgcccataccgcacttaagttgttaaattcttttaaatcgcttgaggaatattgtggtaaccaatattggttggtagtgtatattttaaaactattaagttcttgactaaaagaactaaagcctaaacgaaaccccatgtaaaccatattatccatggtaagccagttttcatacatatttacatcgatacctgcttttaaatagcttccttttgtggtgatatccaaataattggtaacggtatttttatcgtcaaatccaatttcggcagcgaggtataaatgtttttttaatcggaaatcggcttttaattcaaaaccactataatcatcttccgcaaaggagcgtgctaatttactaatatcgccacctatgcgaatgccgtatttttcttttattttaatagaatcgtttaccgtacttggaatactatcattttgcgcgtttaaagacacacaaaataataatagcacgacgctattaatgaaataagttaaagtgtgcttctgtttcatcttctacagattggtttgcgtttaggggtgaaatggattttatccaattatcttcatcactttcaagttgaattgtgacgtcttcgaaaatggttttataaccacaagctcgagaaacgaacacttcggtacgggtgtaatttatggtaataatatcttcgttaccttcataataatcatcggtagcatcatctggagtatcattatcatttacagttgcgccttcaagtaatctatactgcgtgctgttttctgttgtttttaaagggagtactaattcgttgctggttactagttcgtatccgggtaaaatggtctcgctaccaacgccagcaatgactaatttaaaaacatttttactactatcttcattagagtaatcgaaaagatcaataattaaatcgggggttgtcgaagtaatttccggacaaatatcatctcgttcacaacttatagttatccccacgattaataaaactatggggataaaaagaattttaaaatatttcatattccattaaaatgtattcctgttatcaagaaaaaggcgttgttaaaggtcttttttttgactaacgtttttctaaaagcacgacattttccacatgaaaagtttgtggaaacatatctaccgcttgtgtttttactactttatattgtgcatccataagcgctaaatctctagcttgtgttgcgctattacagcttacatacaccactcgcgacggcgcaatgtttagtatttgctgtaccacatctttatgcataccatcccttggcggatcggtaattataatatctggcgtaccgtgggcagcaataaaatctgcattaaacacatttttcatgtcgcctacaaagaactcaacgttgtttatgttattaaattgtgcattttcttttgcagcggtaatagcatcgggcacagcttctacgccaaccactttttttgcttgtttagcaacaaattgcgcaatagttccggtacctgtatataaatcgtaaaccagttcgtttccagttaatccagcaaaatctctagtaattttataaagttcgaaagcttgatcggaattggtttgatagaacgatttagcgttaattttaaattttaaaccttccatttcttcaaaaatatgatcggcacctttatagcaaatcacttcctgatcgtaaatggtatcattagcttttccgttaataacgtattgtagcgatgtgatttccggaaaggtttcagctaaataatctaaaattaattcacgtttttctttgttttctttaaagaattgaatcatcaccataatatcccccgtacttgatgttctaatcatcatggtacgtaaaaatccggtttgatttctagtattgaaaaattctaaatcgttttcaagagcgaatgctttaaccgcatttctaatcgcgttagacggatcggcttgtaagtggcatttttttacatctaaaattttgtcccacatacccggaatatgaaaacctaaagcatttctgtctcctaaatcttcgtctgattgtacttcttccaaggttaaccaacggctatcgctaaacgaaaactccatcttatttctatagaaatactggttttttgctccaaaaataggagtgacttctggtaattctatatgcccaatacgggttaaattattagtcacttctttttgtttgtaaaacagctgatgctcgtaagccatatcttgccatttacaaccaccacaggttccaaaatgctcgcaagcaggcgtggttcttttatccgatagtttatgaaacaccgtagctttaccttcataatacgctttacgctttttaaaggtttgtacatctaccacatcgccaggtacagcatttggtaaaaaaataacttttccgtcgggcgctttagctatggtttttcctttagctccagcatcgataacttcgacgttttcaaaaacttgttttcttgtttttcttcttgacatgctgcaaaaatactaatagccagaaataaatttcacattattttcaattagtttattgtaatttcaatttcaactgaaatataaagatgtttttaggttgaaaaggagtaagttgagtattcaatttcggtttaattggtataaaattttgcatgaattccataaaaaaagctgcttagtaaattaccaaacagcttttttatgcttatattaaatgggttattttttattgaatttgttaagtattttatccatttgttttcctgcggcttcacgaccaccaagtccgaaagataggataatggttagcgcaacggtacctaaagaaattccaaaggctaggtttataatttcatcggcaagccccatagttcttaaactgatggctaagaaaatagcgattattgcaattctaataatagaggcaacaaacgtattatcatcatttttagagaaattagtggctgcaacagaagcaatccagtttcctaaagctaaaattactagtccaaaaattatttttccagaatagttagtaatggtgtataaaatatctgttaaataaccaaattctagtttatcaacagcagttgtaagaccaaacaaaataataaaataatacactaagttacctataattttaaccaaattggtgcttccggtaacggctcctaaaccagctttattaaaaaagttgtttaggttcatactgtttagtaagtcttttataagttcgcttaaaaaacggcccccaactacaaaaattatgataataatagcggctagtattacttttggaatagcgctaaaaaagtcctttaacatagttgttgcaggttccgaaatggcatccatatttaagatattaaaagctgagataagtagcggaataaaaataaatatgaaaacaatttttttaataacattaacgatatcaatgttttcaggcagctttaatttaggtgttaatttttgaatagaatctcccgaaagttccaccagttctgatactatagtggctaacatatagccaatataacttaccaagcccgctccaataatattaggaataaaaccagtaaactcactaagcatattttttaaagggtccagtacgttactcataccaagtttctcaagggctaacaagaaaacgaaaatcattattaaaaagtaaattaacttgctaataaattttgaaagactaaggttggagttttttaatttattatcgattcctgttttttgtaataatttaaaaataagtcgttttagtaatccggcaacaaaccatccaataataagaatgattagtgcggctatggctccagataagtttgcaccaacagtttcggtaaaattgtccaatacatttgataaataattcataatttttgtgttgttgattaataaatagttactgtttagacacataaaggattaaaaagacactttttgaatgaatattttataaatttgaacttcttagggatgatttctctcccacgctgaattttcgaaaccacgaaaggataaaggtagagaaggaatggttattttataatatccattttttttggatatcaacatttaaatttttttaaaatggctgttttagagcaattaacttcgcaacaagcgatagatttagaaaacaagtatggtgcacataattaccatccgttaccggtagtattaagtaaaggagaaggggtgtacgtttgggatgtagatgggaaacgatattacgatttcttgtcggcatattcggcagtaaaccaaggacactgtcatccaaaaattgtcaatgcgatggtacaacaagcgcaaacattggcattaacttcgagagcattttataatgatatgcttgggaagtatgaaaagtttgcctgcgaattttttggattcgataagcttttgccaatgaataccggtgccgaagcggtagaaacagcattgaaactatgtagaaaatgggcttacgaagtaaagggtattgcagaaaatgaagctgaaattatagtatgcgaaaataattttcatggccggactactactataatttcgttttctaacgatcctgtggcgcgtaaaaattttggaccctataccaacggatttattaaaattgaatataataatttagacgctttagaatccgttttaaaaaacaacccaaatataagtggttttttagtagaaccgatacaaggcgaggccggggtttatgtgcccgatgaacattatttatcaggcgccaaagcattatgcgaaaagtaccatgtgctttttatagccgatgaagtgcaaacaggaattgctagaaccggaaaattactagccgtagatcatgaaaacgtaaaacctgatattttaattcttggaaaagccattagtggaggcgtttaccccgtatcggcagtgttagccaataatagtattatggatgtgataaaaccaggaaaccacggcagtacttttggtggaaatcctgttgcagcagctgtggcaacagcagcattagaggttattcgtgatgaaaaacttgcagaacgcgcatcggttttaggcgatttgtttagaaaagaacttaataaatatattgaaaccagtaaaattgtaaacttagttcgcggtaaaggtttactaaacgctattgtgattaatgatgatgaagaaagcgatacagcatggaatatttgtttggctttacgtgataatggattgctagcaaaaccaacacatggtaacattattcgttttgcaccacctttagtgatgaccgaagaacaattattagactgcgtttctattattacaaaaacattatctcaatttgaagagtaatagatttctaaaaaatagagcataaaaaacgcgacccaatggtcgcgttttttattatttaaacattgggttattgtcccatcatttcttgcattctttctctaagtaaatcttggtcttgcatagtctcccatccaaaagtagttactaaccacagtacaaaaagtaaatataaaacacttaatattactcctataatagcaagaatttttcctgtttttatattttgtattccagaatattcttcaggtgaggcattgtaaatagcgattgattttttcgctaaaacaatggcaactataccaagtattaaaccaataataccatagcaacaacaggtgactatagataaaattccgaatactaaaataagcgttgtgttaggtagtttttgtttttccatggtatatttttaagtgttaattataaaagttttttatgatgtagctcgttacaataatgactaaatttaaaatcccaagagcaacggttattttatgcgaaaaattaatttttttaaatagggttaaaactataaagccaaaaagtaatattaaagtataaatagcagggtacattttaaaagctgctacaaattctccttgaaaaagaagcgaaatagaacgctgcataccacaacccatacactctacaccaaagagctctttgtttaggcaaggcaacatgtatttttctagagattgcatataaaatatagttttgctacttgctaaaatactaaaagcccgcaaacaaaaaaatgctttatgcttttttgtttacaagctttttagtttaataggagaagcgagtagccaacaatatattttattaaaatttaagaacatgttagccaattttttttgggtagaatttacttaaatttgtggcatgaagtatttaaattatatcttaattgttgttggagcaataatagccatgtatgctaaggttaatgatgggcaaaaccaatatatattaatttctggaattgtgtttttaatgatgggtatttatagggtgtctagaacgataccgagtaagaaggaagaagattggaataacaatgaagacatttaaaattaattgatatgaaatttaaagtaaacgattttgttttagttttagatgaaaatttatctgggaaaataaaaaggatagaaggaaatacggtgtttattgaaacaacggacgggtttttacttgattttgaagaagatgaattggttaaagatacttctaaaaatgattttaaaaccggattattttctcataaaagtatcagtgctgttttggatgaaaaggaaaaaccaacgcgcagaaaatctataaaagtaaaaccaaaagataggtttgaacctactatggaggtcgatttacatattaatcaattggttaaatcggctagaggtatgagtaatcatgatatgttgacgattcaattagatacggcaaggcaaaaactagattgggccatagcaaaacgtatacaaaaaatagtatttatccatggtgtaggcgaaggcatactaaaaatggaattggaatacctttttggacgctataataatgtgaaatattacgacgcgaattaccaaaaatatggtttaggtgcaaccgaagtttatatttaccaaaacgtaagtcctaattaaaatttggtgtttcagttgttgaagtcgataggctactgtcgcttaaggttccaaaatcaaattcatcttgagataaaaagcttaaactaatatcagatagcgtaaccgttaccaaataagtttgataaatagtatgcgagcgatacgctgttgcaggtacagtattgtttacttcttcgtttagataatcgggaccaataagactatttgtcgtgtcgtttttcgggttttgatcttgcaagttgttttcttcatcacgtgttaaaacgccatcaccatcatcatcatcatccaaataatcaggagtgccgtcaccgtcggtgtcttgtgcatcatctaagtttccattaccatctggatcaggattttcatcagcggttaatacattatccccatcatcatccacatcaatataatttggtataccatcgccgtccgtatcatcatcagttaaatcgccatttccattaatatcttctaattcggcaggaacaccatcgttatcatctttggtaagtacagttaaaaatttcgcagtacaggcatcactttcgctagaagaaataataacatcttcaggaatatcgctacagaataagccagagggtaaactttcatcttgatacgttctataataaaatgtggcgcttttttctacctctaaggtgccattgttatcaatttttaaaagttcggctaaagtataattagaaattaaaacagaaatagattccgatggatcatttttcgttttaaacaggaccaaatcagttacgccttcgcaggcactaaaatcatcgtcaaattcaagatctacagtaattatatcaccgtcatcacaactttgagttgaaataaaaaaaacacctataaatatataaagtaacttgcgcattgcattccttgtttgccacaaaaatagtggaaatgttattgataacaaataaagtttaaaattaccgattaaaatcgtttttagcatctttttaataaactgaaatgtttcataaaaaagaatgaattaacttaatttcaaatcttataaaattcatttaatctaataacgaaccatattagaaataattttatttaaagtacttttgtggttcaaaactttgctatgaaaccagtttattttgataatgccgcaacaacagaattacgcgatgatgttgtaaatgtaatgacgaacgttttgaagtcgaactttggaaatgcttcatcctcacatggttttgggcgttcatcaaaaacgttaattgaaaaatctagaaaagcgatagcgcgtgcacttaacgtttctgcaagtgaaattatttttacatcgggagggaccgaagcggataatttaattttaaatagtgccgttagagatttagatgttaaacatattattacgagtagaattgaacatcacgccgttttacacacggttcaagctttgcaggacgcttataatattgcggtgagttatgtgaatttggatgcccatggtagtatagatttcgatcatttagaaaccttattacaaactgatcaaaaaacattggtgagcctgatgcatattaataatgaaattggaaatattaccgatattaaatatgttgccaatttgtgcaaagtgaatcatgcttattttcatagtgatacagtacaatctatcgggcattataatttagatttacaagatataaaagtggattttattacagctgcggcacataaatttcatggaccaaaaggtgtgggatttgcttttattagaaaaaactctggatttttaaaacctttaatctttggaggcgaacaggagcgtggtttgcgtgccggcaccgagagtgtgcataatattgtaggtttagagtgggctttaaatctctgcatagaaaatattgaaaaggaatatgactatataaaaggtttaaaacagtattttatagatgaaattcgctcggctattcctggagttacatttaatgggctgtctgcagattttgataaaagcacttatactatggttaatgtgcgtttaccaattaccacaagcggattggatatgttgctttttcagctagatttaaaaggcattgcctgttctaaagggagtgcttgccagagtggaagtaataaaaaatcgcatgtgttatccgaaattttatccggggacgcattagaaaaaccatctttacggttttcttttagcatttttaataccaaaaaggaagtggattatgtaatttctgtattgaaagattttacttgcatttaaaacttctttattaaaacatcctaatcatagtattcaatcgtttagattgttataaaatgaaagcgacaaccgaggttgccgctttaaatgttttcacaacggaataatccttattgtgaattgatttcaaattgtattgcgaatataataaaaatattgcaataatttcttacttttataattcaaacgcttttttttattaaaaatatattcagttgcctctttgcaattgaaatacacatgtagtatgagaaaaatattaggattagatttaggaaccaattcaattggttggtctgtaattttacaagatttagagaaacaaaaaggagaaattattggaattgggtctcggataataccgatgagtcaagatatattaggcaagtttgattctggagtatcaatatcgcaaacggccgaaagaacaagctatagaggcattagacgcctatatcaaagagataatttacgaagagagcgtttacacagagttttaaatattttgggttttcttcctcctcattatgcagacaatattgattttgaaaaacgattagggcaatttaaggaaggaacagaacctaaattggtgtaccgaaaagatgaaaccgggaaatatcattttatttttcaagattctttttacgaaatggtagacgagtttaagtcttatggaaaagatgtaaaaattccatacgattggactttgtattacttacggaaaaaaggtctatcaaaacctttaaccaaagaagaattagcttggataatactaaattttaatcaaaaaagaggatattatcaactacgaggagaagaaatagacgaagaaaaaaataagcaatttgttcagttgaaagttaaagacgttatcgactctggggaaaatgtaaaagggaaaacactctataatgtagtttttgaaaatggttgggaatattctaagcaaattgtaaaaaccgaagattggataggtagaacaaaagagtttatcgtaacaacgtcaaccttaaaaaatggcgacattaaaagaacgtttaaagccgtagattctgaaaaagattggcctgccataaaagcaaaaacagaacaagaaatagctaaatcgggcaaaacagttggcgagtacatttatgagtctttgttgaaagatcccacgcaaaaaattagagggaagctagtaaaaactattgaacgagagttttatagaaaagaattcgaaaaaatactttccaaacaaatagaattacaaccaatactatttactagtacattatataaatcttgtgttgaagagttgtactcaagaaacgaagctcatcaaaacagtataaaagataaaggttttcaatatttgtttacagaagatattatcttttatcaaagacctttaaaaagtcaaaaatctaatatatcggggtgtcaattagagtatagaagctataaaaaagaaaataaggaaacaggaaaaattgaagaaataaaagaggctgtaaaagcgatttctaaatcacaccctttgtttcaagagtttagaatttggcaatggttgcaaaacgttaaaatttacaataaagaaaagattgttaatgggaagttagaagatgttacttctacgcttttaaaaacagaagaagattgggtgaatttatttgattttctacacggtaaaaaagaattagagcaaaagcagtttgtagactattttgttaaaaagaaattaattgataaaaaagagaaagaccactatcgttggaactatgtagaggataaaaaatatccttttgcagaaactagagctcaatttataagtcgattaagtaaaataaaaggagtagcagatgtcgaaaactttctatctgaaaaaacacaggttggcactagaaaagatagtccatttatgcctagaatagagcaattatggcatattatttattcggtttctgatattaatgaatacaaatcggctatagaaaaatttgcagtaaaacacaacttagaccaagaatcttttgtaagcaattttgctaaattcccaccttttaaaagtgattatggaagctattctaaaaaggcgattactaaacttttgcctgtgatgcgaatgggtaaatattggaacgaatctgatgttttagatgaaataaaagaaagggcgaactccattatggagcgagtaaaagtcttaaggcttaaagggaattatacggatagagaattttctgaagtccttacgcaaataagtgatgatgatattcaaaaacaattgataaagagttttgtgtcttttaaagataaaaatccattaaaaggtttaaatacatatcaagctacctatttggtttatggaaggcattcggaagtaggagatattcagcattggaatagtccagatgatatagataattatttagaaaactttaaacagcattctttacgtaatcctattgttgagcaagttattaccgaaacgctgcgagtagttagagatatttggaaatattatgggaatagtgaaaaagatttttttaatgaaatccatgtagaacttggaagagaaatgaaaaaccctgcgggaaaaagagaggaaatatctaaaaggaacaccgaaaatgaaaacaccaatcaccgcataaaagaagttttaaaagagttaatgaacgatgcctctatagatggggatgtccgtgattattcgcctagtcaacaagatttattaaaaatttatgaggaaggagtctatcaaaacccaaaagctgatttttcaaaagtaagtgaagatgaaattcaaaaaataagaagaagtaacaaccctacttcaaaagaaattcaacgttatcgactttggttagagcaaggttatatttccccatatacaggaaatccaataaggttaagtgagttatttacgcataaatatcaaatagaacatataattccacaatctcgttatttcgataattctttgagtaacaaagtaatttgcgaaagtgaagtaaacgaagacaaaagcaataaaacggcatatgagtatttggcagagaaaaaaggtagtgttgttgatggacataaactattaagtatagaggaatatgaatcccacgtaaacaagtattttaaaagcaataaacaaaaactcaaaaacctactgagtgaagatattccagaaggttttatcaatagacaattaaacgatagccgatacattagtaaacttgtaaaaggtttattgagtaatattgtaagagaagataatgagcaagaagcgacttcaaaaaacttaattccggtaacaggggtggttacatcaaagctaaaacgagattggggcttaaacgataagtggaatgaaattataaagccacgctttgaacgtttaaataaactaaccaattctaataactttggtttttgggacaacaaaattaatgcctttagaattcaagtacccgatgaaattagcaaagggtttaataaaaaaagaatagaccaccgccatcatgctttagatgctttggttgtagcttgtacaactagagaacatacccattatttaaatgccttaaataatgaaaagaaaaactatggtttacgtgataaattattgattaaaaataaacaaggagattataccaaacattttttaatgccttgggataattttgctacagaaactaaaaaccaactagaaaaaatcgttattagtttcaagcagaatttacgtgttatcaataaagctaacaataaattctggtcttataaagatgaaaatggtaacctaaatctagataagagagggaaacctgttaaaaaacttcgtaaacaaaccaaaggcgataattgggcaatacgaaaggcaatgcacaaagaaactgtttcagggatttataacatagacacccctaaaggaaaaatagctactgctgttagagtagctttaacagaaattaaaaatgaaaaacatttggcaaaaattacagacgagcgaattagagaggtgattttaccgaatcatttaaaaaattatttagataaagatggaaaaccaaaatacgatgaagcctttaatcaggaagggatagaagatttaaataaaaatatagttgaactgaatctaggaaaaaatcatcaaccaatttataaaataaaaatatttgaagtagggagtaagttttcaatttctgaagactataattcggcaaaaaacaaaaaatatgtagaagcagctaaaggaaccaatcttttttttgccgtttattgggatgagaaaaaacaaaaacgcaattttgaaacagtgcctttaaatgaagtaattacccatcaaaagcaagtagcttatttaccgaaaacagaacgcctgcctattcagcctaattttaaaaaaggaacatttttatttacactttctccaaatgatttagtctatgttcctacaaatgaagagttggataataaagatgctattgattttaataatttgagtaaggaacaaattaatcgaatttataaaatggtaagttgcactggagtagagtgtcattttgttccaaacaaaacggcaaaagaaataaagaaaaatgaaaatggtacgaatagcaaaaatgaaaggatacaagacttttacaatggagagtgtatttatgatataaaagaaaagcccgttatgattaaagaaaggtgtatcaaactaaaaatagatcgcttaggcaatatttcaaaagtataaaagatgattaaaagaaccatttacataggcaatccaacccatcttaaactaaaacaccaacaaatggtggtgcaagaacccaaaggagaggtaaaaggtacggtgcctatagaagatgtggctttgttggtattagatcattatcaaataactattagcacacaactcatcaatcaattacaaggaaatggtgtgtgtattgttacttgcgatacacatcatttgccttttggaattactttgcctttgtatggacacaccgaacattctgagcgcgtgaagtaccaattagaagcaagcgaacccttaaaaaaacaattatggaaacaaaccattcaacaaaaaattaagaaccaagaagctttgctaaaactcaataaccgagtttatgaacctatggaggagtacagaaccgctaccaaaagtggcgacactaccaataccgaaggcaaagcagcacaacattattggaaacatttgtttccagaatttcagcgaaatcgttttggagaagctcccaatgccttgttaaattttggctatgccattttacgaagtattgtggccagagctttggtaagttctggattgttaccggtattaggtttatttcataaaaacaagtataatccgtattgtttagccgatgatattatggagccttatcgaccttttgtagataaaatggtggtaaatcatgtaaataattacggagatacagacgagttaaccaaagaagtaaaagcctatttattaggcattgctacccaagatgtttggatagatggacaacaaagacctttgctagtagcagttactactacaacagcctctttatacaaatgttatacaggagaattacgaaccattaaatatcctgaattagattaactatgtcacaagacagatttaacgcttatagaattatgtgggtattggtgttttttgatttaccaaccgaaaccaaagtagaacgaagatcggccagtgtgtttcgtaagaatttgattaaagatggattcgatatgtttcagttttctatctatttacggtgttgccccagtagagaaaatgctaacgtacacattaaacgtgttaaaaatgctttgcccaaacatggtaaaattggaattttatgtgttacggataaacaatttggaaacatggaattatttcacggtaaaaaacagaccgatttgcctggtacaacgcaacaattagagctcttttaaaggccttcgagcggagtagagaagcaattctatatatagttaaattataaaaatgtaaggaagattatatatttagaatactataaaagaacgtaaaaattatttaacaataaaggtcatcgagcggagtcgagatgagaaacatttaattatatagagtaaaatacaggcggaataaataaatggttctcgactccgctcgaacaccaaaacaagatattccatttcttaaaaaaatagcagctatttatgttttctgatgacactcttttttataaaataaaaaacacctaactataaaggtcatcgagcggagtcgagatgggaaacacttaattataatagagtaaaatacagggaggaataaataaacggttctcgacttcgctcgaacaccaaaacaagatattccatctcctaaaaaaataacggctatttatgttttctgataacacacttttttataaaatacaaaacacttaacaataaaggtcatcgagcggagtcgagatgggaaacacttaattatatagagtaaaatacaggggaaaaaataaatatatggttctcgacttcgctcgaacaccaaaacattagaataggaaaattcaagtttaaaacagacgaaaccaacaaaaaaaataattttttaatttctaaaaaggaatccccaaacctttatttatctaaagttttggggattgaccttgtgaatcctcacgtaaaaatacaatttgaaatcaattcacaacggacttatgggcgcaaatttatttactggacttgtgaatcctcacgtaaaaatacaatttgaaatcaattcacaacaatctaaaaacaaggtgtaaaccttagtgtcttgtgaatcctcacgtaaaaatacaatttgaaatcaattcacaactaaacttgtgtacatcgccaaaaagcatttcttgtgaatcctcacgtaaaaatacaatttgaaatcaattcacaacaaaccactaattgacttgccgcagcaatttcttgtgaatcctcacgtaaaaatacaatttgaaatcaattcacaacgcgaagatggccaaaacattaaacggtttgcttgtgaatcctcacgtaaaaatacaatttgaaatcaattcacaacgacggagtcagttatgaggttcagtcgggtacttgtgaatcctcacgtaaaaatacaatttgaaatcaattcacaacgtaacatcgcaacataaagcgtaagtaatgcttgtgaatcctcacgtaaaaatacaatttgaaatcaattcacaactcattaatcttctaaacaattcatctgtttcttgtgaatcctcacgtaaaaatacaatttgaaatcaattcacaacagcttcatacatgctgttatacccaatactcttgtgaatcctcacgtaaaaatacaatttgaaatcaattcacaacgaaattatagccaaaatagaagacgaagctcttgtgaatcctcacgtaaaaatacaatttgaaatcaattcacaacaagttcagaggcacaaatgaagatagtgaccttgtgaatcctcacgtaaaaatacaatttgaaatcaattcacaacgtgtctatcatcattagctacaattagatacttgtgaatcctcacgtaaaaatacaatttgaaatcaattcacaacgggcttgtggtgcaagtacgcctccctgtacttgtgaatcctcacgtaaaaatacaatttgaaatcaattcacaactgtaaacaatgtttttctaaactcatagaccttgtgaatcctcacgtaaaaatacaatttgaaatcaattcacaactagtatttacggcttgcagtttgtttcgcccttgtgaatcctcacgtaaaaatacaatttgaaatcaattcacaactgtggatagggaatagattgtatgaggtaacttgtgaatcctcacgtaaaaatacaatttgaaatcaattcacaacacgcgataagtagcggaaaaacaaaaaccacttgtgaatcctcacgtaaaaatacaatttgaaatcaattcacaactgctttgatgaagcaaatccatttcccgttcttgtgaatcctcacgtaaaaatacaatttgaaatcaattcacaacgcatcgtaaacgcgtttaataaagtcgcttcttgtgaatcctcacgtaaaaatacaatttgaaatcaattcacaaccaacgtacaggacgggcaaagcccaagaagcttgtgaatcctcacgtaaaaatacaatttgaaatcaattcacaaccattaatcacatagcgcgcgtataaataggcttgtgaatcctcacgtaaaaatacaatttgaaatcaattcacaaccaggtgccacggttactgcaggccatcctgcttgtgaatcctcacgtaaaaatacaatttgaaatcaattcacaacacgctttgctcgagagaaaatttaataaggcttgtgaatcctcacgtaaaaatacaatttgaaatcaattcacaacaagaagttagaaataacaggaagaaagttgcttgtgaatcctcacgtaaaaatacaatttgaaatcaattcacaacgtgatgatggttcgcctttaaaaaatatgacttgtgaatcctcacgtaaaaatacaatttgaaatcaattcacaacataatgccacaggttacacccaccaagatacttgtgaatcctcacgtaaaaatacaatttgaaatcaattcacaacagaaagtacaagcgagttttaagcgtgtggcttgtgaatcctcacgtaaaaatacaatttgaaatcaattcacaacgcttctgtgatgctgttatgcgttcgtttgcttgtgaatcctcacgtaaaaatacaatttgaaatcaattcacaacgctgcctagtgaagagagacaagaaagatacttgtgaatcctcacgtaaaaatacaatttgaaatcaattcacaactagtgtttgcgctgtttaaaacgtcattatcttgtgaatcctcacgtaaaaatacaatttgaaatcaattcacaactattgcgctcaaacttgtctttttcttcatcttgtgaatcctcacgtaaaaatacaatttgaaatcaattcacaacaaatcgtccaactggcttcactagctatttcttgtgaatcctcacgtaaaaatacaatttgaaatcaattcacaacgagaatagcgagttgcctatgaatagagaacttgtgaatcctcacgtaaaaatacaatttgaaatcaattcacaacggtgtgtaattaaaataattcagtaactatcttgtgaatcctcacgtaaaaatacaatttgaaatcaattcacaacgtgtgtatttagccattttgtctgtaaaatcttgtgaatcctcacgtaaaaatacaatttgaaatcaattcacaaccaattctttactgtttttaatacgtgctatcttgtgaatcctcacgtaaaaatacaatttgaaatcaattcacaactgcgttgctactccctcattctccaagaactcttgtgaatcctcacgtaaaaatacaatttgaaatcaattcacaacgtttatcttcattacttttcaaaatccattcttgtgaatcctcacgtaaaaatacaatttgaaatcaattcacaacgcaacacctattaattgagtttgttcaagacttgtgaatcctcacgtaaaaatacaatttgaaatcaattcacaacacataatgagttatcctaaaaaagtaaacgcttgtgaatcctcacgtaaaaatacaatttgaaatcaattcacaacaaaaagcctacacaataactaaagaagttgcttgtgaatcctcacgtaaaaatacaatttgaaatcaattcacaacggcgaaaagggttgggggttttacgtggatacttgtgaatcctcacgtaaaaatacaatttgaaatcaattcacaactgttaacggcttagtttctttgcaaataggcttgtgaatcctcacgtaaaaatacaatttgaaatcaattcacaacacagacaataagcatgctaaaatagatgatcttgtgaatcctcacgtaaaaatacaatttgaaatcaattcacaacgagtaactgttccaatagtttgtaattctacttgtgaatcctcacgtaaaaatacaatttgaaatcaattcacaacggtaactcagaagtaacaaatacagtattacttgtgaatcctcacgtaaaaatacaatttgaaatcaattcacaacctaacacgtttacaattcctgcaagtgatacttgtgaatcctcacgtaaaaatacaatttgaaatcaattcacaacagatagttcagggaggtactagtgctggcacttgtgaatcctcacgtaaaaatacaatttgaaatcaattcacaactgctgtctaagtcaatactatcatttacgccttgtgaatcctcacgtaaaaatacaatttgaaatcaattcacaacttacagataatctgagtctcactaataggacttgtgaatcctcacgtaaaaatacaatttgaaatcaattcacaacccatggacaagtattcacccattttaaagacttgtgaatcctcacgtaaaaatacaatttgaaatcaattcacaactaaaagaagcaacatcccttggtattgatacttgtgaatcctcacgtaaaaatacaatttgaaatattctttttaacattatatttctttaaacataaatggaatcgattcattgggcgattaaatagaaaattattaaataagttttttaaaatattttcatgtcttagtgttcctgaatatggggttttctttatatttatcaggtgttgaataactgacacaatgtttaaaaataaaggttgtttttgtgcttcatgaaattgacaaggctagttattgacatgttgatcataaaaatcgactaattattgaaataaaaatagcgttatgaaaattgttaaaaaattgattcttgggggtgtttttatattctttttaggatgtgattatgagattgaaaaaggtgtcatgaaaagtgatttatcaaaagatgtagagcttattacagactttggaacaattgtttttagattatcgaatgatacccctaaacaccgaaacaattttattaagttagtcaatcaaaaatcttatgataatgtgtcctttcatcgtgttatagaaaattttcttatacaaacaggaaatatggatacaaaatatcccgaccctaagcaagaaaaagatagttctgaacaagcttataccatagatgctgaagttaggccaaacttatttcatatgcgaggtgctataaacgcagctcgaatgggagatgattataaccctaatcgttcttctagtggtactcagtttacaattatccaaggtaaaccatacaacgatagtactttagctgttgccgaaaaacgtattaatactaacttagcataccatagaattattaataaaccagagcacaaaacagaatttaataaactctttaagttgtcaaataaaatggaggatattgctgtagcagaagatgttttggatagtgaggttaaaaaaataatgctagattctattcagagattaaaaaataaatttgactctctggctagggttgaacttattaaaatgaagcattatagttttcctgaaaagcatcgtgaaatttacaaaacattaggaggtgctgctcatttagatcaaaactataccgtttttggaatggttgttaaagggatgaacatagtggatagtattgctgctgtaaaaacaaataaacaagacaaaccaattaaggatattcgtataatttcggcaaaaatgattgaaagaaaatgatataattaaaacatctaaaaaagaaactttagtacttaaaccataataaaatgtataaatatactgggtatagatatataattttaaaccccgttataatgcttgtattttactaaatataggatataaaaaaaaagactaaaatagttatgctaattacagaaaacaatatgcaaaaggtgctctacaacctttttgttaaatataaatttactagcgagaaggcacatttactagctaatgtatttacagaaagtactttagctggcataagctcgcacggcatcaatcgcgtacctctttttattggatatatagaaaaaggaattattagaatagattctgaagcagagcaagttgcttcttttggcagcatagaacgttgggatggaaatctaggtccgggtattgtaaatgccactaaatgtaccaaccgggctatagaattagcaaaacaacacggaatgggtatggtagcattgcgaaacaccaaccactggatgcgaggaggaacctatggactgcaagctgctaatgctaattgtatatcaattctttttacaaatactaaacctaatatgccgccttggggtggaaaagatagccgaataggcaacaatccctttgttgtatccataccaagaaaaaaaggacacgttgtattggatatggcaatttcgcaattttcgtttggtaaaattaacgattatagattaaaaggcgaaaagttaccttaccatggggggtgggacaacaacaatgagctctcaaatgatccggataaaattttatcgaaagaacgtggattgcccattggctattggaaaggttcggcgttatctattgttttagatatgctcgctaccttattgtcggctggaaattctaccgccaaaataagtgctaacgacttggaaacaggtatttcacaggtatatatttgcatataccccgaagtttttaccgatgaaggattgcagcaaaaacttatagaagaaattattgattatacacataatgtagaatctataaatccaggagatcaggtatattacccaggcgaaagaagttcacaaactagagcaaaacatttaaaagaaggggttgctgttaatgaaagtatttggaaaaaaattatattactttctgaaaaataaaactattgaattacatttaaaacaatactttacgtaactgtgctatcgctattgcgtaagtattaaccttgttttccttgtcattatttaaaatgtatttttgaattgttggtcataataaatccgcattataggttaaaactttgggatgcggatggtctaaatttatcagttaaatgtgtttctttttctttcattttgtctaaattaacagaaaggggtatcttataaaattaggcgctacatcttttttcaataatgatgtaacaataatttaaatggaactacaaattattaaaacacaaattaagaatgaaaaacataacaaaaagaaaagcgttaaccctactatctgtaggaatatttataatagctgcttctcaagtgttttctcattatttgcaattaatcgatttaacgaaaggaacatttacaggaattggtattggcctattacttacggccttggggtttgggagttttaaaaacattcgtgggtataaataatttgcaatataggaaactaaaaaaaattatcacgaaaaagaaggtggttcgttttaggccttaaaagccaaattagctttgtaaataattagcataaaatataattgtaagcagtgctactcatctagcttaaaatgataacatctaattccaagacttaaaagttatttacagcagtcttttttataaaacaactcccgtattatctctctacgacacaaaatattgagtacaaaaaaagctccatttttatggagcttctctttttaatattttaaaagaccattataccaagtccagaacttcaagtctttcttttgcaagaatatatcttgcatgaacatcatcaatttgctgttgcgttaatttcttaccaaaggtacgaagtcctcctacggcatcattatgatgaattccaaaagcatacttaagatattcgagaagcaacggcttagcgtccaggtatgaaatggaattcattgcctgagaaattttattagccttagcccattctccttttgttacgtactcctgcatagtaacactggctttggggaagatacaacctacacctgtaattcctccagatgcacctgcaagtcctgcgtgtatagttacagtatctacacctgctaacacttttaaatctttgttggctaacatcattgtttcaattattgaaacatctatagtcgatattttaagagccgttacatttgggagtttagcaattcttaataaaagatcggtagagagtgcatgatatccagctgcatcaggattattataaggcatcattgttattccagcacctcttgcagttgcttcagctagttcataatacgcatacatttcttcatcagaaggaagcgccttagtttttggtggcattatcatggctgtatctactcctacagtcgctagtccttcaacaattttcacaagcgcttctttattttctgccgcagctccactaatcaatggaacattgtattctttagcaacttcagaaagcgctttaagtaaagaaaggcgctgttcagaagttagatagctattctcaccaagagtaccagaacccacaagtccgcccatttggcttcccccttttcctttagcttttaaaatacctgcagcgtatttttgcgtggcatcaagatcaatttcaatagagccggattttgactctttcagccaggtaaacacagctggcataacggtatatctccaatctaaatta

SEQ ID NO: 1165 - DNA, 24482 bp, synthetic construct
  source 1..24482: mol_type = other DNA
  misc_feature 1..24482: note = Synthetic
gcgttgacgcctgacgggaagcgtctttattttgtgaccgaccagttgccgggaggattcggaggaaaagatatttggtatgtggaaaaccgggaagggaaatggagcgatcccgtgaacgccggggaaacgatcaatacttccggggacgaaatgtatccttatgtgcgggataacggcgatttgtattttgcttccaatgggcattatggtatgggaggtttagacctttaccgggtggagaacatcgatggaaaggaacagttgaggcatttgcctgctccgatcaattcgtttgccgatgatttcgggattgtttttaaacccggtacggacgaagggttattgagttcatcccgttcgggcaggagtgataatatatatagcttttgttttattccccagcagttacaggtgaggatgctggcccgtaatgcgataaccgaattgccgatcgctaaagtacaggtcacggtgacctctgataatggagatgtggtatacctggaaaccgattcggtcggaatggcttctatgcctgtggtatccgaccgggaatatgtttttgttactgaaaattcagcgttcctgaaaggaaagggaaccgtatcgacttaccgggaaaagtccgaccgactgtatgaattggctgtggatatgcagccgattgaaaagccgatcgttattcccaatatttattttgatgtggctaaatgggatttgcgtccggaagctaaggagaatttgaatgagttgttggttattttgaaagataatccgaacattgcaattgagttgtcggcacatacggatatggtgggaaatgacaaggccaacatggttttgtcggaaaaccgggcacaatcggtggtggattacctgattgaaaagggagtatactgggacaggctggaggctaaaggatatggagaaacacagccccggcagattaatgaaaaagatgcgaaggcataccctttcctgaaagtgggggatgttctgaacgaacgatttgtgaaccgcttgcggggagctcaaagagaagatgctttgcaattgaacaggcgtatcgaatttaaagtattgcggacaaattacaagcccggccctaattctttgcataatcccaatcgaaaagcgatagccgtagaagaaaagcagaccgttaatatcggtaagactcagttgcgggatttgaaaagcgtagagggcaaattctttaccctgcagttaggcgtattcaggaatgtccctgctttaatcgatcagtttaaagtggtatttaccgaaaaagtgaaagacggtattgtgcgttattgtacgggaatctacgacacccgcgaggaagcggcggcggcggcggctcaattaaaggcaaagggcattgaaacaatgatccgggaatattgatcccggcagaaatggccaacggcgtaaagcggttagcgtagaaagaatttcctgacccgattgtcgataaatagtaataaaagagctgccccaccgacaatgatagccaaagtcagggtgtggccggcagattccgtcggtacggggaatatgtccctgaatattttcaacatatcaatcgacaagtgccggaagattccgataagcaggaagatcatagcaacagaggcgagggatacggcagtccaaactccccatacgtttctacggcggcgcgtttcattggccttttctatgtgttgtagaatgccggaatttaatcccggtggtaattgttcttccggtagctgcttaaatagctgttttagggctttatccgtatatattttatctgccatagtttttatctttctgcaattatactaaattatatcagttactgtttagcatcagataaagtttttttcggatgcggtgcagttttacttttacgttactgcttgaaagtgctgtgacttcagcaatatcctcgattgttttttcttccatatagaacagggtgatgattccccgttcgtccggggatagtttatctatcgcccggtgtagtgcctgtaaattttcttcagtgaccgtattttcaaaagcttcgtccacatcccggtcggaaatgttgttcatagtttgctcttctatgtaaagaaattcctgtttctttttgcgggtatatgaaatggctgtgttataagcgacacgatatagccaggtggaaaaaagactgtttccctgaaagttttttaaggtccggtatattttcagaaaaacatcctgtgtcaattcctccgcatcttcctgattacggatgattccgcagattaataaaaagacaggtttactataatgttctacgatatgaccgaaacattccgtatcgccattttgtatccgtctaatatatagctcgtcctgtgttttcatgttgcctattggacgcaagttacgtatttcggttacacttttttgttaaaaaaatacagatatatatatatttaaaagtagtatcaaattaagaaattgaatattaaacgattgtggattcatgaataagcggggcaatgaaaacggagtctaaaaaatgcgtttttccactaaacagagattgcgtgggagaaaatggaattcatcttaaacggattcttcttttcggacaggaaatgctattttatccgtgcatcaaagctatggatactaccggataataggaaaaattttaaaatctggtaactttgaaatggcaccgattttgttatatttttatattgtggcgggaaagcacagatggtttgcaaagtgatgatttaaatgttggcagtcgtgattatctggaatttcggaggtggttgcttgggtctaccaataataggaacattaaaaaatagaacgaaaaattattttttttcccaaagttgtaacctgcttttgctttatgcgtcaaatgggcaaaacaaaacaattattcactttaacactttgaattatgggttatattattgctccttttattgttggcatgatttgtgctactatttatggcttatttgaactatttgcccgccggaaagaacggattgctattattgaaaaattggcagagggaaaaacttttggacaaatagaaggaaagatcgatctttcatttaatagatcgtattcattttggggattaaggggcggatgcctgatgttgggtttgggagtcggtttgattttgggaatcaccattaccgataggacacttggtctttccggggatataggttggagaatgagagaaattcaggatgttatttacggtggatcggtgcttttatgcggaggtgttggattattactcgcgttccttattgaaatgttttgctttaaaaatagaaaataagattgatcaccattgatttttagtttggaggggattatttccgaaagggaatagtcccccagtttttttaggtttaattaaaaaaatgaatcatggatttccggtaagcctgattttatcgggtgggtaaggagatataaaaacaggaggagatatatttcattttatctcctcctgtttcctttagcgatagaacgcacagtctttagaacgccgccagtttattcctgtaataggtttcgacatctttccaatggtaatagggagcaatatcgcttttaacgggaagtgtcatttcgtgctcgttcagcatcactttcaccaaaatatcatcacttccttttttgcggaagaaaacaaactgaacattacttgccatcgggaatatccgatagttccgccatacttcagcaactttatccgcatctttcgtctggtaaccgcaatcccccaattccagtagacaggcaaaaggcattaaacaaacttcatgtccgaaacggagagtggcactattctcttttttcgtgatacaggtatctgctgtgttcaatatattcttcagcaggtctgcttccgaataaggaatcctgcctttattcaggggagaaggcccgtaatttaaataccagtcgtagttgtcggctaaccacaaatcataacattcgtcttccgtaaaaatggaataaagctctaagtctgtatcatggctttgcatattgcctgccaacttaaataagtctgtcatcagcttattttcgtctattttccatttcacgtaatcccggttgttgaaaagggcgttcattaaacgttccggatgaaggtgtgccttttggaatttattattggctgaaacgagttcatccgatttacggagtttcctgaattcttcatcgctcgaactgcctatgtaatacatgtcgtgggaactggcatcgttcttaaatttcagtttcggattcaaggattgtaatttcaggcattccgaagtcatggaaaggatgcaacgaatgacaacagaggaacgtgcgtctatttctgcttccccctgaaatacttcaggataatttttatacattctctcggcaatgcctctgtgctggcgggctcccagcggagtgagttccccatatctttgctttgccattccggccatgctgtcgagaacatttaaaacctgttttcccaatggggtaagcacgccgtattggtctgcttcacgcataaggctcaatggtttttcataatcgtttgagttaatcaaaaaacgggaaccatgacgggcgtaatggctcaggtagaatggtttatatcctttgggcggtgcggtcagtgtacctgtcggtgtgggataagcataataattactggccgaacggcggatgtcggcagaaatctcttcttttgctgtttgtgcgaataattctaataccaaacagcaagcaatacctaatagcaggaagcgtttcatatttctgatttaattttatagaatgttagagtcaaaattaattaaaattgaaatccctgctctataatttataataattatttgtgaaaaaatagcttggctcgtttcttctgaatagcgggttttatatatctatttgtttgaattttaggatgttgtgaaagagtaggaggactggatatatacatttcagaaagctctgtggatttttcctgtctttagtataaaatatccggctactgctaagagataactgttatttatcggttaaacgtatttaaatattgttatttatcttgtcgatgacgcatacttcggagaattgtttcttttgttttgggatttatttaattttgaccgtatcatagaagataatagcagacaatagatttgactgcgtaataatctgttacctatgggaaaagaacgtgaaattatcgataggctgattggaaagatttatccggtgagtgaggtaggaagacaaaaattgtctgatatactgatgcgttttcatttggaaaaaggagattattttcttcatgaaaggcaggtgtgcaaatacatcggttttgtggaacagggaatggtgagacagttttacaccaaaggaaaccgggatttgacggaacatttcacttatgaaaacggtgtttttctctgtttggaaagttttttcaggcaaattcccagctatttgcaggtggaggtattggaagaatccgtgatttatgcgcttcctcatgatgctctgatgcagcttatccgggaaaggcaggaaatacattatctttattccggtatacttgagaattgcctgattatttcgcagcaaaaggcagacgcttcacgttttgaaacggcacatgaaaggtataaccgtttactttcccagcatcccgagatcgtgaaacgtgcccccctgaactatatcgcctcttatctgggtatgacccctgaaactttaagcagggttagggcgggaggctaagggttaagctgctttcaatgtatcttccgaagaggataggggttttacctttgtgaaggtttttccgatccatttgcggctattccagcgacggacaaaaatcacggcccggatgttttcatcgagtagaaaggcgaaccacatcccggctaatccccagcctaactgaattccaaaaacgtaactgagataagtggccacaccccacatcacgatcactcctgtaatgaaagggtaggttacatcgcctacggcattcagaacgtttaccgaaaggatattgaccgccctgcccacttcaagaagtatgtccacacaaagaatgattatacctaaatggacgacctccgggttgtttgtcaggaaactaaaaataaatttaccgagtcctgcggtgataaccgccatgattaaagaaatcagcacagaaattttcatgcagtagcgttgcaggacgtaagcggcatgagttttatcggctcccactaaatgaccgatgcagatggcacctccctgcccgatggctattgcaaatacataggtgaacatcacgatgttcatggcataggtgcgggcggtgagggcggctgtgcttaccagaatcgtaaagtaggtcacaaccacttgtgaaaggctatatgaaatctgttctccggctgcgggcagcccgatatatagtaaatttctcagtttgtctatcgggaaaggacgaaacaacgataacggtatacgtggcgtgactttacggaacagtaaataagctaataagagcattgcaattaaacggcatgttgaggtagaaatggctgcaccttccactcccaaagccggcatgccgaatttgccgaatatcagggtgtagttaccgatgatatttaaaatgttcattaataaagttacccgcatgggataataggccatgttatgacttcgtaaaatggccgacaaggttagtgctactgcctgtaaaaatgcgcaacctcccactattcgcatgtacgacaatccttctccgatcaattccggggcaagatccatcatttgaagcaattgcctgccgaagaaaaacaaaaaagcactggtgattattccgatcacggcattgaatagcaaggatacgcctatcgtctggagaacattggtgtgttgtttggctccaagatattgtgaacaaagaacggatgttcctaaagtggtcaccccgaaaacgatgaaaatcatgttcagcaattgattcaccacgcccacagccgctactgtttcgtctgaatggcggctgagcatgataatatcggttgtgcctaaaagaataacaagcagggtctctataaaaataggagctgccaggttaaacaattgtttccgaagaacttgttggcgtttgatgaacattttttattttctcgcaaaaatagatggaatcttgcattgctggcttgatttatatcaaaaaatgcaataccttttttctgtttccgggaggagattttttctgctttttgaacgatttttctcgcgaaaaaatgctgattttgaagataaaatttgtatatttgtaacatgaaaagaacaatcaaaaatacagtacagattattcctgttcgcccggtcgagcgtaaaaatattctcgaatctactatcgcctcttttcgtatcgaaggtatttttttaccggatacaaaaatccagtccatttatgaccgggtgaatgaaaaactcagaaaagactatcgataattctttccatggggagataatttttctcactcacccgttgtactgctattatatattccctgaaattaattttattgaatctcaacccttcatatccctgttttctgaccattagattggccaatatgcgggcagtccgtccattcccttcacggaaaggatgaataaaaagtaattccccgtgtactttggcaacatccctgactaaagaatgtttgtcgggatattcatcgggtaattttgtcaatacttcattttcaaatagctgcatgctttccgggataaaacgggcggtggggaacaggaatccgtttttagacatgtttacggtacggtatttacctgcaaaagcgtataaatgccctaaggccagcttgtgaatttctttaatgtatttgcaattgaatcgggtatgggtgtccaaatgttcggtgaacacaatctctgctgtcagaaacccttcaaattctgcttctgctatttcttccctgttggtgagccccagtagattagggagttgttcgctttcggcctcatttgtggtgtacttatccatatccgtagcctttagaagtagttctgtaaatgtaagaaaaataattattatttattactcattctacttttcattttccttgttctgttttcaggtgcttatttatatctttgcacgtttactaatcaggaagataaaatgtttcaaatcgaaatagaccgggcagttccccgttttaaagaatttcagtttacggaacctgtttgctggaaaataaatgaaggcgagaattgggctgtggttgggcctaatggagcgggaaaaactttacttacggatattctgcaaggaaagattgttttaaaagaaggacaggtgcgtatttcctgcggggaggaagtggaggcctatcgggctatcaggtcgatggctttccgggatatatattcattgacagattgtcggaatatgtattatcagcaacgctggaattcctccgattccgaggatgctccgttggcaggtaccctgttgcaagaatttccaacggaaaagattgctgattatactaagctttttcatatcgatgaattgcttcataaaaggattatttctttatccagcggggaattaaggaagtttttaattacccgcacattattggcagagccgaaagtgttgatattggataatccttttatcggattggatgccgtgtcccgcgattccctcagccggatgttgcagcaaatgtctgttttaaacggtttgcaaaccattttgatattgtcgaatctcggagatgtcccggaatggacagggcatgtcctgcccgtattggataggctatgtttacctgtgcggagccgggaggaatttctgaaggattcctgcctgattcatcggttattcccggaacaggagggacaaactccggttttgcctgcggacgacgataaatgtacagaatatgcagaaacggtcagaatggaagctgtcaccatcaagtatggaaaccgtacgatattgaagaatatcgattgggtggtgaaaagcggggagaagtgggcgttgctgggagaaaacggtagtggaaaatccaccttactgagcctggtatgcggagataatccccagtcgtatgctaataagctaacccttttcgatcgtcgccggggaacgggagaaagtatatgggatattaaaaaacggatcggttacctttcgccggatatgcatacctattatttgcaggatattccctgtatcgatgtggttgcttccggcttttttgattcaatcgggttgttccgtaagtgttcggaggagcaacgtgttacagcccgtcaatggctggaagtgtttcacgtagaccatcttgccgatcgttcttttgtcaaaatatcttacggggagcagcgtttgattctactggcacgtgccttcgttaaaaatccggaattgttgattctggatgagcctttacacggattggatgccggaaaaaagaaattagccaggcaggtgatagaggcgttctgcctccgttccggtaaaacattaatttacgtaacccattacaccgaagaaattccttcctgcgttacccttttcaaaaccttgtccaaaagttaaaagagcagtttaccatagaaataccgtggctttttctaaaaagtaatttacctttttagaaaggtaaccacaataagaaagcgagcagaggaaacctttgcccgctttaaatgttttcacaacggaataatccttattgtgatttgcttcaaaatcgtaattacaaattacaccataatttttcatatatacaaattattttcaataaaaatgtaatgtcatttgtattaaagtataataatttgaattttatctataatttattgcataataaaatatttacttttatttttaaaaggtgttattataattaaaatagatatgaagcgtgtattaggtttagatcttggtaccaatagtattggatggagtgttgtttcaaaagatgaaaatgaccaattaaagaaaattgaaggaataggaagccggattattccgatgagtcaggatatattaggaaatttctcagtaggcaattcagtttcgcagacagcagaaaggacggcttttcgtagtgtgaggcgtttgcgggagaggcatttgttacgacgggaacgtttattgcggattctgcatttgatgggatttttaccggatcattacgattcttctatcggatgggacaaagccgaccaccggacatttgcaaaatttaaaagcagcatagagcctaaggttggctggaaaaatgatgcccccggaaattggacgttcatttttgaagatgcttttcaggaaatgttatccgattttgtgcgtgaacaaccggaattagtcgctggtggtaagaaaattccttatgattggacaatttattatttgcggaagaaagctttggaaaaacctatttcgaaagaggagctggcatggattatcctgaattttaaccaaaagcggggatattatcagctcaggggagaagacgaggaacaggaatcgaataaaatggtggactattgcgaattaaaggttgtagaggtacaggcagaagagccgcaaaaaggaaaagaagacatttggtataacatcattttggaaaatggctgggtataccgccgttcgagtaaagtgcctctgttggactggaccggaaaaatgaaggaatttatcgtaacaacggaattgaatccggacggaacaccgaaaaaggataaagaagggaacgagaagcggtcgttcagagctcctgcggaaggggattggatgctattgaagaaaagaacggaaaacaatatagaaaaaagccggaaaaccgttggttgctatatatacgacactttattacaaagcccggaacaaaaaattaaaggaaagctgatccggacgatagaacggaaattctataagaaggagttatttaaaattttgcaaaagcaagccggatttcatccggaatttcaggataaaaatatctataaagcttgcattgaggaactgtatccgcaaaatgaaaatcgtcgtttgaatttagcaaatggcactctggcacagcttattctgaaagatatattatttttccaacggcctttgaaaagtaaaaagtctttggttagcaattgtcggtttgaataccggacttttgtaaaagacggtcaaaaacaaattgttcctttaaaatgtatcgcgaaatccaatccgttgtttcaggaataccgtttgtggcaatttattcaggatttgagaatatatcagcgggaaaaagaagtggatggaaaattgcggacagatgtggatgtgacttctgaatttttatcgactgaagacgcatttgtggaattgtttgattggctatatacgcgtaaagagatcagccaaaaagtgctattgaaatatttggttaaaaagaaaccggaactttatcgttggaattatgtagaagacaagaactatccttgtaatgaaactcgtgccctgatattggaacgtttgggaaagtgtaatatcctcgttgatttcctgaccaaggaaaatgaaatgtcgctttggcatatcctgtattctgttcatgatctcggagaactcactcaggccctgaaatcttttggttcgaagcatggattgaatgaggcttttgtcgacatattccgaaaattcccaccttttaaaaatgaatatggaagctattccgaaaaggcgatcaaaaaactattgcccttgatgcgtatgggaaaatattggagtagggaagtaatagacccgcagacgttgcagcgtatagagaaactgcttacaggggaatatgatgaaaatattcgggatcgggtacgtgaaaaggccattcatttaacggatatttcttcttttaaaggtttaccggtatggttggccagctacattgtatatgatcgccacgcagagaccggagaaataaaacattggaaaacgccacaggacattgaacattatttaaataccgaatttaagcaatattctttacggaatcctattgtggagcaggtgctaacggaagccttgcggacggtgaaagatatatggcagcaatatggtgattttgccgaaattcatgtggagttaggcagggaggtgaagaattcagccgaaaagcgggcgcgaatgaccaggcagattattgcaaatgaagatacgaatttgcggcttaaggctttgttgatggagttacagaatgatccggcaatagagaatgttcgtccttattcacccagccagctggatattttgaagatctatgaagaaggagcgttgatttctgaaactgaactgccggacgatattgcaaaaatatccaaaaagaatcagcccactccgtccgaattagtccggtataaactgtggctggaacaaaaataccgttctccctatacaggcgagatcattcctttgagcaaactttttactcccgcttatgagattgagcatgtgattccacaatcccgttattttgataactcgctaagtaataaagtgatttgtgaatcggaaataaataagctcaaagataatgctttgggttatgagtttatccgggaacatgaaggggagatcgttcagtcgaattttggaaagaagctgagagtctttacggttagtgaatatgagcaatttgttaaaaagaattattctcaaagcagagagaaaatgaaaaaactgttgctggatgatattcccgattcgtttatccggcgccagttgaacgacacccgttatattagcagggaagtcagaacattgttgtctaatatcgtgcgggaagagaaggaacaggagtctatatctaaaaacgtgatttcctgttcgggaaaagttaccgatcagttgaaaaaagattggggattgaacgatgtgtggaataaaatcattatgccgcgttttgtcagattgaaccaaatgactgaatcgtcaaaattcggagagtggaaaaacggacattttcaggtgcaaatgcctttagaacttcaaaaaggattcaataaaaagaggatagatcacaggcatcatgccatggatgcccttgtgatagcgtgtgccacccggaatcacataaattatttaagcaatgaatcggctttaaaagatgcccgggtgtcccgttacgatttaaaacatctattatgcgaaaaatcgaagcccgatgctaatggaaactattcctggttgttcaggaaaccctgggaaacttttacacaggatacttatgaagcattgaaaggtgtgattgtaagtttcaaaaagaatgtaaggatcattaataaaacgacgaattattatcaggcgtacgatcagggaaagaaagtgatgaaaaaacaggaacagggcgatagttgggctataaggaagtcgttacacaaggcatctgtttttggaaaagttgcgctgcggcggcaaaaagaggtacggctcggtgtggcgttagaaaattggaagatgttggtcgataaagagttaaaagaaaaggtaaaacaactgataactcaatatggcaaagaggatgccaaactcttttcgaaatatttcaaagaccgtgaaaataaattcaacggtaaagacatttctaaagtgtctatatactattgggatactgaaaatgcggcgatacgaaaaccgttagatgcttccttcacagaaaaggagataaaaacgataacggataccgggattcagcagatactcctaaatcatttgcaggcaaaaggagggcagtccgatatagccttttcacctgaagggcttgaggaaatgaacaagaatttagctttgctaaataaggggaaagggcataaaccgatctataaggtcaggatatttgagccgatcggtaataaatttcaggttggtgaaacaggtaataaatccaggaaatttgttgaagctgataagggaactaatttgttttttgctttgtaccgggcggagaatggtaaacgtacttacttgacagtacctttaaacgaagtggctgaaaggcagaaacaagggttacttcctgtgccggaaatggatgtgaaaaattcaactcctcttttattctgtctgtcacccaacgatctggtttacgtgccgaccatcgaggaacgggagaattttcaggaattcaattggaaaaatttaaccgaagagcaaacaggtaggatatataagatggttagttgtacgggtaactctgctttttttgttcaggcggctgtggctaatccaatcgtaaataaatatgaattttcacctttaaataagatggaaagagccatagaaggggaaatgataaaagaagtttgttggaaattgaaggtagatcgtttagggcatattgtggaatgtgttcaataattgtgcatggatgttgaattggtcatcggagaattatgattaaaaaaacactttatttcggtaatcccacttatctttcacttcggaatgaacaattggtcataaaacttccggaggtagaaaagagtgatttgccggactcctttaagcaggatgcagtccgtaccattcctatagaagatattggagtgatggttctcgaccataagcagataaccttgacgcagggtgtcattgaaaaattgttagaaaacaattgtgccctgattacctgtggagataatcgcatgccggtggggttgatgttaccactttgtggaaatactacgcagaatgaacgtttccgttgccagttaaatatttcattaccattacagaaacagctttggcagcagacagttcagtataaaatcaataatcaggcatcggttcttggaagcacccgggggacaatcgtaaaaaatatgcgggtttgggtgaaggaggtgaaaagtggtgatccggataatttagaagcgcgggctgccgcctattactggcgtaatcttttcccagaaataccggattttacccgcgaccggggaggagttccacctaataatctattgaattacggctatgctgttttgcgtgcggtggtcgctcgttcattagtgattagcggactgcttcccactttagggattcatcaccataatcgatataacgcttattgtttggccgacgatattatggagccctatcgtccgtatgtagatgaattggttgtgaagattgtggatagtggagtggattgttctgaattgacgaaagaaataaaaagtcaattactcacgatacccgttatagaagtgatgataaacagagaacgtagtcctttaatggtagctgtggggcagaccacagcctcactatataaatgttttagcggagaattacggaaaattgtgtatcctgaaaaatcttaatggatcggtttagcgaatatcgcatcatgtgggttttggtgttttttgatttgccaacagaaacgaaaaaagagcgaaaaatgtcctctgattttcgtaagggcttgttaatggatggctttaccatgtttcagttttccatttacgttcgccattgtgccagtcgggaaaatgctgaagtccatataaagagggtaaaaaatcttttaccctcccgggggcatgttgggattttatgtatcacagataaacagtttagcaatattgaaatattctacgcacaaaaagaagtcctgccttcaacccccggtcaacaattggagcttttttaaaaaataagaaaccgcctttatggcggttgcttttaaacgatactcttgattcaaatttgcttcttattatatagacgtatacataattcattcatctcgtatactatataatacgattttgaaagcaaatcacaacaatattaacccatgggtattatttataacgcaaggattatttatggcaaaggtacattttaagatgtaaaccatctaatgtttcatgtaaaatcatataaatataataatgtttgttttaatgaataaatatttatttgtttattatgttgttttgtgttaactttgttttttaatattaaccatatgatgatgtattggaaataagaatgagattattttttgtattacggcaacttgaaatatgttgccacttaaagacagaaaggaggtaaatatgggaaagaacatccacgtagttcacaacggaaaccagtggcaagtaaaacaagagaaagctcaacgtagttctggtaatttcaggacacaacaggaagcatttgagcgtgctcgtgaaattgctattaataatggtcaagaagttgcaattcacggattaaatggtcgtatccgtgaaaagcatagctatggtaatgatccatttccacccgagggttaatctctcgtaacaccttagatttgccctgacagagctgcaactttgtcagggttttctcctttcttatctttaagaacgttgcaaatataacgtataataactgtaaatgttatattacttttcaaagtttaagattcagttattataaatcagacaaactcatttaagatattgtcgtaatcagactcttaaaaaattaagtgaaactgtaacagaagtacctttgtttttatgtaccctgataaataaagttttacttatatttaaccgaagacaaacaaaaaacgtcgtaaattattcatttacgacgttctttgatttttttaacgtggtgccaccgggaatcgaaccagggacacaaggattttcagtcctttgctctaccgactgagctatggcaccattatttgattgcgagtgcaaatgtaagggttttctttaatagtgcaaggttttaggtgcttttttttgtttattttatttagaatttatttccgtataggaggggaaattcttttctgtttttgtttttgtctgaaacagaggtatatcatcataaggatgaatgggagcgaggctaagggtacggcgggttgtgccagaaaccatacaggaattgcaatagtaagcaacagaatgtacagggtgagatagccccgaacgatacggggtaactgccggaaaaagataaaacacacgacgatcaggtttaacgggtttgcccatagaatattccagttgggagcggttatagggtgttctgtgaaaaaaccgaggaagacgatcaaaactcccacgattccggtaaaaagaaagaaaaggcagctaaccgtatttaaaagcatcaggtttttttggttttgcagcaatagaataagcagtaaaacccctaagctgaatataaaccagggactaagataccacggggtgttgacccggagaggaggagcctgatagaggatttctgttttttcgacaagcggtttcccgttataagtggcggaatctaagctgtacatcaggtaatcgggaaggaacatgtattcaaaagtggtggctttccgggttccgggctgtcctaatatggtgtgtattccccattttacccacggagacacccgaaggtattcatcgagcaggttccaaaagtttttgtctgtgtttgccagatgccagtttataggtaagggcaggcttttctgaacaatatcgcggctgcgggtggtacaattgtcaaatagaaagttatataaataagaacggttttccggtcgatagttttcaagcaataaattgaataaggtttgtttttccagcgaatccagtttcaaggtttgagaatagaccgacctattttcttcctgatagctggataagaaatgaggatacgaagtgatggccaattggtaaaggagtagcccctgagcatattttaagtaaaatccctgagtttcaaaatcgaaagttccgaaattgaatacatagtcaaaacgctgggatggatcggaaacacggattgccgtatgcccgaacagcgagtatagttgtgttcccggtgaacaggttaaaatgctgatttcggcttctttggaaaggggaaatgccaaactgttgaacacggacagcaaggcgataataaatatggatagttttttcattttgggtcgggttcaggtatttgttttttatcgtattctatgtcgcagagaaagagggcgtttccgggtactgatgttccggcactacatcgatttttcgattctataatctgtcttaaatcctcgcaatccaatttgccttgcccgatttcaagcatcgttccgacgatcgcccgtaccatattccgtaaaaaacggtcggcttttatcgtaaagataagctgattccctttttctgtccattctgcctgcataatatggcaattgtttgttttggtatcggtatgcagtttggaaaaactggtgaaatcggtatactcgaaaagtacccggcaggcttcgttcatccgtgaaatatcaggcaacgggtgaggacggaaagtaaaaggataggtgaatgggtcttttgtcttgtctatgaaatatttatatgttcttgacagggcgctgaaacgggcgtgtaaatcggatggaacgggatatattttggatatggcgatgttacgccctaacagtcggtttagtttgtaaacaagatacgcggtgtcctgaatttctgccggactgtcaaaatgagctacgtaaaatgaggcatttaccccggtatctgttctaccagcgccaaccacattcgtgttttcacgcagtaaggtcgttagggcctggttaagctctccctgtaccgacggggcggcgggctgaatttgccagccattgtatccgttaccgttataggctaattctatgaaatatcgtgtcatatcttttgcgaagataagaaatatatttttcagcttaatattttgactttacttttcccgtttccggctttatagacatggatttggacagggatgcgctctgccatttcgtgtacatgggaaattactccgacttttcttccctgcgaacgaaggcgttcaagggcttccatcaccacttgcagggtatcggtgtcgagagttccgaaaccttcgtcgatgaacaagttttcttcgtggtggttttgtgaggagaaagaggaaagtccgagagcaagggcgagggataccaaaaacgattccccgccggaaagagagaataccgagcggatttcgtcacacatatcgtgatcgataatttgtaacgccaattctcccggtacacgttgcaactgatagcgcgaggtcagttcctttaattgtttgttggcatagttcaggagaatatccaaagtatacccttgagcaatttctttgaatttattgccgctttgcgatccgatcaggtcgtcgagcttgctccattgttccatcacttcggtctgccgtaccaaggtctgtttcagttctccggcttgcaaactgttttgctcgtggttccgcagggttactgaaatttcagtttgttcctgccgcagtacttcaagttgttgtttcaataaattatctttttctttcaatgaatcaagctgttcgtgttcttgtggtttcgaggataaagaaaaatgttgccggatttgcttttgccgctcttttaaagtggtttctgcaattgtaaactggcgttgtaattggtcggctgtctgtctcatactgttcagctcgttagagctgattttcaatagttccgttaagttgttttctgttaaaggagtggaggctgtcgaattataattttccagccattctgacaactttttccgattttttgcctgttgtgcttttagattctctatgttttctgttagttgttttgtttcccctcttaattgttggagttgggtgtcggtttcctgtttccgggtgttgagcagatctgtttctccggtctgattttctattttttgccgatattcctgttctacttccgtaactgtttttccttccaataaaacagcgcgttccctgcgaagtttatttaatgtgcctgttcgtttttccagtaaggaaacagtttctttttcttgttcccgcagaatttccagcatgtggagggaggctgttatttttgcctgttgttgtgtgacggaaatttgcagggttgcttgttcctgttgtctggcctcccatttggctgcggcttcggaaagttcctgacggaataaggcttgtccggattcccagcggttacgccagttatcaatagttataatactgtcgagtttattcagtgcattctcggcttgtatatttaaattattacaaagggcttgctctttcagaatttcacttgaaattttatcggtttcttctttcgcttgagaaaattgtttgtcaagttctttccaaatttgctgctctttttcgatctggtctatggtttcattcaggagagaatttgtatgttcatatacggattcctgtcgttcgagatcgttcaatttttcttcaacttcactaaattcctttgagagttgtctggccgtctctgcttctatgattggttgtgtaaaatcaggcgaatatagtttgctccaattttgcatacattcttcgcactggttttgtccggcttgaatctctttttccaaagacagaagaagctggtcggcatgcagaaggtcttgtgataaccgaatgattgtattttgtaattccctgcagttggtttcatatttttcatattctatttttaataggtctattgccggctgttcagaggaatcatgggtgacggcagggtgctggcaacttccgcaaaccgggcagggggtatccggaatcagttgccgccgtaaagcggagatgtcggtattggccaattgttgcgccttttcatagatttgccgggaagtatcgcgctgaataaccgcggtgcggagttctgtgtcgatttgtttcacttgttgctgtaagttctcccgttgtgtctgctggatctgaaattgctcttctttttgcctgattctatcctgccatgttagtatctcttttaaaacgttttgagattcttttaaatattctttgcgggtttgtagttctttacgaatattcctaagggcaaggatatttatggcgtttacttgttgctgtatgtgttgtttctcctgtaatttttcatctaaattcttttgccggacagttagttgtgctttcagattttcctgcttcgaaagaagttgtttccgttggctggacaactctgtcagttgttgctctttttgctgtttttgttccagcgcattcgtagcagaatctaaaaatccggtgattagatttatattcaggcacatctgttcatgtttcctgtttttgtcgaaccagtctgtcagtgctttttgtcggttttgcagatgggccaattctgtttccctgcgggcgagggccgtttcttccgctatacgtttttgcgtggtggcttgcagggtttgtgcacattctgagtggctgttctcttcctgaccgattttgatgtctgtttcctgtgctttttgcagttcgggttgccgggcttgataggccgctgtatattcttgcagggtggcgtaggattggttatatttttcggtcagttgccgggcttgctgttctaaggttaaaagggatgcttgatatgttttacctatttgttcctgtttttcaatatcttccgtatatttacgtaagttgtgccaaagaggagaggcactttctacgctttctatttgccttaaacgttctatttgcggacgggctttttcaatggtctcgctgatttggctcaggttttcctttgcttgggattcttcccgaagcaagttgttataggtggtcagccattctatttgacgggcgtttttttcctgttcttgttcggtgacagagcaggtgtgttgcaattgttttagtttttctgtcagggaagtaatttcttcgtttgtaagcagatgaattcctgaaaggcgttcgctggtcagtttccaatcggctttcgccgctgcgtttttagtatagaccgtatttgagattacggaataaatttctgtcccggtcagtttttcaagcacttccgctttttcttctttccgggctttcagaaaacgggcgaattcgttttgtgccaatagaactgtccgggtaaattgttcataggttaaccccgtcagttctttcagtttattctcggattctgaaattttggaagctatttcctgttggttatctaaatggtatactctccaatcaacgggttgcagtttgcccgatattcggttattcgcccgccgtatgtgccagtgtgcccggtagctttttccgtttaccgctaagaaatccacttccgcatacccgtcggtagttccccgtcgtagtatctgccttttatccccttgttgtatttgttctttgccgacatccgccattttgatgttctctgttccggtagttcggggcgtattgttaaatagggcgaggcataaagcgtccagtaaggtggattttccggcgcccgtagctccgcatatagcgaaaattccggcggaatttaaaggctcggtcgtaaaatctatttcaaattcgcctgcaatggaggctaagttttttccccgtatagctaaaattttcatgacctgctttctgttttccggtaggattcctgcaaagcttccataaagagtttcaacagggtttccagtagttctgtgttgtatttttgttggtatacggcttgtatcatttccaggggagccattagctgttcgctcgtaggatcgccgttttctcccggcatatccggtgtcgccgggtagaatggaacgacccgtgtcagccggacgtgtttcttttctacggcttcttcgatctgatgccgcagcgaaggctctggtccggtcaataatactctcacttcgagatagggagccgcttctccggggcattccggaggcagagctgacaattcccgcatcacttccggtaaaggtttcggtttttgcgggatgcgcagcaaacggaccgatggggaaaaagttagtttctcctgacgtagaagttttccattttcaatctcaagtaaaatcactccgtgctgataattttcttctgcaaaagacattggcaggggactacccgcataacgtacattttcccgtttacccactctttgttcccggtgaatatgtcctaaagccgtgtaggtaatgccgggagggaatgtgtcggtcggaataccttccaatccgccaataagcaggcgttcgctgctatcgtcttccgagagggaacagtttgccgcctgtaagtgtcccatggctataacggcctctccgggcgttttgcgttgttctatggtgcggtaaaccgtttcatacatactttttatgcctgccgcatagctaccgtcctctgcttccgggggaggataatctccggtcctcaggtatggaatggccatacaccaaacccggctatttcctgtacggtcgtgtagccttacgatcagatcttccacatcgatttgccctgtttcatctcttttgagcgttcctttgatgtgaatgtccagaccttccaataacggcataggtgtttccagacgggcggcagagtcgtgatttccggcgatgaccactatttgcagtccgggattggcagtggttatatttttaataaatcggtaaaatcgtttttgtgcctgggcagaaggattcgctacgtcgaaaatatctccggcgatcagtaaggcatcaatttcctgctctttgatctgtgtggcgagccaatcgaaaaaggcctgatgttcttcagtccggtcgtaaccgaaaaaagtctgtccgatgtgccagtcggctgtatgtagtattttcatagtgtgcggatgcttgaataactttatagcgagtttcaaatttagggaaaagatgaacattcataaaggattttcgtttattttggtatatatttgtcaaagttgtcagaaaggcggaaaacagcttttttgtaaatttgttgtatcgtatacaattatgagtattacagaaaatttagaaaaaataacgcgatcattgccgaaaagcgtaaaattggtcgccgtttcaaaaacgaaacccgcgtcggacatagaagaggcctggcggtgggggcaacgggttttcggagagaataaagtgcaggagatggtgggaaaatacgaggctttacccaaggatatagagtggcacatgatcgggcatttacagaccaataaggtgaaatacattgtgcctttcgtcaaactgatccacggtgtcgatagcggagagttgctggcaaagatcgataaagaagcaggtaaggtgggacgcgttgtggattgccttttacaattccacattgcagaggaagaaacgaaattcggtttaagcgaggaagaagcggatgtgttgttgcaaagtgccgcttatcgggaaatgcggaatatacgggtgatcggggtgatgggaatggctacttttacagacgatcaggagca

SEQ ID NO: 1166 - DNA, 24479 bp, synthetic construct
  misc_feature 1..24479: note = Synthetic
  source 1..24479: mol_type = other DNA
acattgggtggggtgaaatccaagaagttacgcaaaatattttaggtactgaaagcccaactcttgctagtaaataccaagtgagtcttgctcttggtgtagatatgaattggtctgaaaataaattagtaacgcgttttatagacatgaatggcgatgggataccggatgtcgtaagacaaaccgataacggctttctcgttgctctgatgtctgcgcaaggtgccgaacaacaaagcatagttaatggtagaactatacaacgtagcaagacttttaattggggcataaacattggagtaactgcaggattccccgtctggtttttaaaaatttgcatcgggcttaacggttctccgaaaggccagtcgactactcaggggacacatgacctaattgatatgaatggtgatggattacctgacttggtatggaccgatgctgatgggatacacattagatataaccaattaggtaaaagtcgtttgctaaaaagtgtaacgaatcctacgggacagaagtatgagttcgaataccgcctttcagaaccaacatatgaacagaggggcagacaatggttaatgagtacaatgtacaatatcgacccacacgctcattctgttttaggatgcgataccatgatgaggacattcgaatatgccatcccgcattatgattatgcagaaaaacaatttttgggttatggaacaactatttcaaatgatataaatacagacaccctaccacataataaatatcgtaaaacactgcgccattacaataatctagattttatagaacatggtaagatgacatacgagggtgtgatggatagcaatgacaatctgttccgcgaatacgaaattggcacatggtatgttgattcgacttttactccaacaaataacctctgtggtgacgcctcaataaaggttggttcagaagttcactatacgcgtttctatgaggggggcagtgacagaatagtaacagccaagcagtacaaatatgataaataccacaacgttatagaatatactaattttggagattctagtcttaataacgatgaacttaaagcattgatcgtatacgactccactgctgtcaatacgtacaatctcatttcttcaccggtaagagtgaccgtctataataacgggactgctgttcgggaaacacatgctgattaccaagaaggtttattgactgaattacgtcaaacagacttgctatattcccaaacggatacgacaaattactattatgacacttttggcctttcagatagtattgtactacctacaaaccataatggagaacgggctttcacttccataaaatatgatacatttagtcatactttgcctgcaatggttactgaccaatgggggcgaacaatgcactatacatatgacaaattttggaaagagccactttccatgattgacccatcaggaaattctatgttgtatagttatgatgaattagggagactatcgacaatatcattaccaggggataccactcgctatagttattacaatccatttaatggtatcacaacatattataccagaaggaatacaaccgttacctatacatattcaccatatagtacattgaacgaagatgatgcgtatccatatacacaagtacaacttcatgcaaataatgaaacaatacaaaaaaaggtctactatagccatcgtggtaatctcttatatcgtcaagagaatggtctcaatactgcagactggcgtgacaaatgggtatttagcgatataacagcaattgattgttttggaagaacaaagacgttatacaagaattatgaagtagaaacctacaatgatattacattagacacagatagtttgcatgtttatttcctactgcataatgatatccttgatagacccactcttgtgcagtggcaaaatgctacgcagcaaaaccgtttatattcgctcggacaagatgcgtacggggtaaaacgcctaaaagaaaccgtgatagacgagcgaggggggacttctcaacaattctttgcaccgcaaggttgggttacaacctctatactgcccggcaataataccacatcttttgtttatgatgcgttgggtcagctgctatcctctaccgaccctgacggactttctactatttatcattacaatggtcatgggcaacagattgcaagacaacacccggatgcgggcactactcattggcagtatgaccatgccggcaacttaattgcctctgccacgcaacgacaaataaatgcaggtacacaaaccaattatgagtacgattacaaccgacttaaagctgtccattatccgcaacatccacaattggatgttacatacgagtatgatagcgtaggccgattagcaaaacgtgaagatctaaccggctatgaaacatttaaatacgatgcattaggtaatatttctgtttcggagaaattattagttgtcccctccgaagataatgcatatcacttcaaaacccaattcaaatatgatgccttaggcagaatagataatataatatatccagatagcgaaaaagttatatataactattatacaggaaaactatatagcacatatagtagagatgatagcccagaagattggggagttttacattactatataagtggcattgattatgatgccaacaataatcaaaaggttttcataagcggtaatggttatacaacagaatatggctatgatgagaatcgctactggttaacgcacattaaaacacacaacaatagtcacctgctgcaggacattaattatttacatgatgatattggcaatataatatctatagaacaggaagctgatagcgttcgttggcttggaggaccgtacatgttagaatatcaatacgattcgctaagtcgtctgactaaagctgacatgattagcgactattggggagaatatagcaactattcaatgtcgtatagcccttcaggtatggttggtataaagtcgtgtcctgatatgttgtgggattattggtttggttatagtgccaataatttaggaaatattaaaagtcatcaagtgcgaagtatatacgatatggacaatgatgaaactgtattcctgcattgggatgctgacggacagttgcagaacattttacgtccatgttcaggcgatgttcgtcatcattggtggaatgaagatgggcaaatgactgcatttgttgacaatgagcgatgtggattttacggctacaatggaaatggagagcgcgcctacaaactaacagggcattcgctaattgaccaatataatgcaggagatataaatttccaactatcctttgatgacgcagttctctatgtcaacccttattttatagttaccccaaaaggatacacacaacattactataacggtaaccaacatatagcaactaaaataggcaaactatctgatttgccacgcgatatcattgatagttcttctttcgcttcagaacgcattgcaaatgctcgttcttatatgatgacattacttggtactacggagatacagaatgtagatacagcaagtgtttttgttgatattgacggaacagcactaccagagttgcaatggcaatgtttagatgaagattgggcattgagtacacaagtgcaatatacatcaaatttattgcagcctattctgacaggcaataccacccatttagataccagagtaagtggaacgtatttttatcaccctgaccatcttggaagtgctacatggataacgaactccacaaatggactacctgtcgaatttatccattatatgccattcggtgagatgtggtataatcagcaaggttcagcatataacgagcgctttaggttcacaggaaaggagcgtgatgatgaaactggatatgatttcttcggatctcaccgtatgcgtactgcggctggaaccctatcaaatatgttgatccgaatggaagggagtggaaagactgtgatggtaatataataaaagatcattcaaatatcaaggcatacatattctataataaagaagaatttggaacccaaacaactaaaatgtattcggatttggaaaacaaatacggaaaaggaagtgtagcactaagcgatgtcctcacggccaaagagtttcaacaagattgggttgcgatgtcaagtcaggatattcaggaagtaagtatcaaccatcatggaagcaatcaagcaattcatttagattggcgaaataatgaatatataacctctactggaacaggagagacgcgaggaggcgttcctgctattaatgttagtgatttaggatttccctctggcaatgtaagtaatgcaacactaaatctgaatacttgtcactctaatagtaccggcagttggttgggtaatctacgtatcggtgattttcgtattcccggaacaagtgcaacattggtcggaacaaaagaaactcttatgcaaagttttcgaaacaatttcaagtttcacaccatacgtggtacttctgccggtgtaagttataatcgtaaaactcttcggccggaaccacaatttagatttcagtcatgggtatacttaaatagtaaataatgaaaagaataattaaactgatttgtgccatattcgtggtgcttttatccataattttatttatatggataactttagcttgtgtccaccttattttgggagatgtagactttgaagaagaaaacgggatttacctcatgattcctaaagaagaaacacctacaggaagaactatcagtggcattttgtcttcgcaggaagacttacaacgctatttagccactagagcatattatcacctaccatttgaggggaatctgacaatagaattgtttgattttgagaattatgattatatattttcagaaggatgttccattattcagatgcaaaaactcctttgggaccaatgtagtagttatgataatactggtttaatgccagtattgattattcgtggagaacatatatcacataaaatttatatttataaaattaaacccaaaaataagtatcgcgtggaatgtggatagtatcatttgattacgacaatgtcacagttagactctcctgcggatcaacaaactattagaaacggttatatgttcaatatgcaacgaaaatgaaaaaagcaaccacgtatataatattattagttatttcatgtgatagataaaaacacccaagtaatcagcaaagaagatgaggtttatttctaccacggagaccatctcggcagtgccaactggataacggatataaaaggagatgccatccaatacatgcactatgcaccgtatggtgagatgtggtataatcagcaaggttcagcatataacgagcgctttaggttcacaggaaaggagcgtgatgatgaaactggatatgatttcttcggatagcagataagtacccatacatctcaccgtatgcgtactgcggctggaaccctatcaaatatgttgatccgaatggaaaatggttggaaacggcatgggatattgccaatgtggctatggatgccgttagtttagggtctaatatcaaagacgggaatcttggtgcggcaatgatagatggagtaggattagttcttgatttaggtgctgctattttacctgtcgtgccgggtggtgcaggaactgcgataaaagcatatagagaggcagacaaggtagttgatgcaactaaagttgctacaacatccggtaagaatattgcaacagcaacgaaaaatacttacagacaagcactacaaaaagcaactggaaaaaataggaaaaggatacgaagcacatcatacattgccacagaaatatcgtgagaggttcgagcaattaggaattaatattgatgaacctaaaaatgtggtgtggcggaaaacagaaaatcatcacgcagggaacgttgagcatggaaaggcatgggatgagtttttcgaaaaaaaccctcaacccacaaaagaacaagttctacaacaacgtgatataattgagaaacaagtatggtccaatgcgccaacaggagaaataccgacctactaaattaatacaaacttttgagatagaaaaagcaatatggaaacatttataaatttcagaaaaaaactttatggcggagtttgggaaataaaatcagatatgccatatgatagtattagcgaagtgccttttgatatggctaatattgagttgttgaatcttccttttcgaatatatcacggaaagaaacaacgtgatataatttatcgtcatggcgatattagtattgagttcctgtcacagaatatatatgatattctgtctagatatggggatgtaagaccatacttatatcccattcatattaataatgtagaggatgtgtattattttgttcataatttgccagaagtcaaatttatcaatcgaaacgtgaggatttcaaacacagattataggactgaaattccttgttttttgttacaaaacaatctacctccgttgtttagtttggacaataccaggtgtaaaattataactacagagatgaaagcggcgatgattaaagcgaaattaaccaatattgctttcgaacctgtgtatggagtctcatgtatggaggagtattatgagttacaaagtgaaggtaaattgcatagaccttaggaagatttgtttggtaatctctataagcataatcattttaatataaatgacgcatattggtattatattgttaagtctatggttctctactacgcctaaattagagatggctggtctgaaacagggacagcagaacatctatctccaagacagaatctacgacgaacaaggacggaaaatataccaacaggcaggaaatggcgtatggtcaggatatatctatgacccaacgcgtcaatggctgagcaaccggcagccgaagatttggcgaaggcaatcaacaaaacggagttcagaaaacccttctgcccgatctaccagaacgtaacggcaaaagcagaaacagaaccgggaattatccgcgaaaaccttctaaaacaactcacggcccccgttcgctggacgcaatccgtgcaaaacatgattgctgacaccaacaacggaaactacggaaacaacgaaaataacggcgtagccttttatgagtttggaccgggagatgtgctcaaaggcatgattcgcaagatcaatccggaggtgcaactcggttaaaatgaacaaataataaataaccaaacagtaaataaattttaaagttatgatttccaaaaaattagaggacgctatcaacgcccaaatcaatgccgaaatgtggtcggcatatttatacctcagtatgtctgcttattgccaggatcaaggctatgcaggcatggcgaactggtttgctatccaattcaaggaggagcaggaccatgcacagattttctacaactatctcgttagtcgtggtggccgtgtactgctcaaagccatcgatgcggtagagaccgaatgggcttcgcctttagctgcttttgagcacacgtataagcacgagcaacacgttacttcgctcattaacaacctcatgcacatcgcagttgaggagaaagactacgcttcgcagagccgtttccaatggttcatcgatgagcaggtagaggaagaagagaatgcggtagagattatcaataagctcaagatgttggacggcaacaattatggtctttatgtcctggaccaagaactggctgcacgtgtttatgctacgccgtctccattagcggcaaaagcataagcatattcatcgatggaggttacacatgcgtataacgtatgtctttgatttaggcggtgttctaatcaaactgaatgtgcaacgctgttttcaagcctttgagaaactcatgggcgaggaaaacatgcgtctcgttctgggcatggacaaccgtggcgaaggcataaaagcagttagcattgcctccaaccaactgatggcgaactttgagcgaggaatgatctctccggagactttcctctctcaagttcagcaatattgccatctgggaacgacgaccgatgaaatcatcgaggcatggatgtccatgctggatgaactgccggaagagcggttggcgttcgttgactcgctgcgcgccaaaggacatcgcatctatctgttatccaatgggaatgaacttcattttgacttcatcaaccgcacgtacggcttagacagccattttgacggtcttttcttgtcccaggaaatcgtctggcggccgagcaaacagttcattggaaaaccttcgaaagcatcgatgcgttacggcttcatcaaccacaattataagaaagacggacttcggtccgtttttttgtgcctcttagcactaacaacaaactctaaactaaaaatctctgtcttttcttatcctgcggaacaattatttgaaaaaattcttgcatatatcaaaaaaatgttgtacctttgcagccgaaatcgtgttcaatattaaaaacacaaatgaaagtattgtgttcattgtaaaaaacacaaatacgatatttttgctcattgaatcaaacaaattacaatatgaagaatctaattgacaagcacgttcgttattataaacaaacgcccatgacgatcattcgtcagtgcggttccgagatcaactggaatgtcccattgttagctttacgaggtccaaagggagtggggaagagtacgattatgcgccaatatattcgacttcattactctgtctcggataggtcggtgctctattgctcatgtgatggggcatactttgcttcacatactttattggatttggcggatcagttctataaaactggcggaaaacacttgttcttagacgaaatccacaagtatcctaattggagtcgcgagataaaggagatgaccgacttgtattcagatatgcgaatcgtaattagcggtagttcgttgctgagcttgcagcaaggagatgctgatttaagcagacgatgcatcaatcatgacatacaggggcttagtttccgggaatttttgcttttttataagaatattgaccttccaaaatataccttggaacaaattcttgccaatccttggaccttagcagaagaagtgaataatcaatgccgaccacttcagtattttgcagagtacttgcaatatggttattatccgtatttcatgcaacttaagaacacggtggattattattcggcaatagagaacaccattagttatattatagatgatgaactgcctcggatatgtaaagtgtcggtggaaaacacgcggaaaataaaggcgcttgttaatatctttgccaattctgttccgtacgatattgacatcaaacgtctgtccgttcaaagtgagttgcagcgagctacgattttggagtacctaaattacttggataaggctaagatcattcgcttggtttattccgattatgtaaatgcaaaaaaaatgcagaaaccggacaaggttcttatggataatagcaatatgctttatactttagcggtacaagttccaaatatcggcactgtacgagagtgctttgcttccaatcaactatcattcagtcatttagtggagtatggtaagaatcacggtgacttcaaggtggatggtaaatatacctttgaagtgggtggagtagataaggattacgaacaaatagccgatttacctaactcatacatccttgccgatgatatggagtttccttatgggcacaaactaccgctttggatgataggcttcttatactaattcccggctataacatcttaactatttaacgtcgaacttgttcgaccattttaaccctttaacgaaaaatccacgatttttctatatttatttgcatatgtcaaaaaaaagtaataattttgcaagcaaaattgactgataagaaaaataatcattaccatgaagaagaaaattctcggtttagatttaggaaccaatagtatcggttgggcagtagttaatgatgaaaacggcatgaaaagcatttctcatgccggtagccgtattattcctatggatgccaagttgatgggagattttgaaagcggaaattcgatttcgcaaacggcaactcgtacagcagcacgcggcgcgaggcgtttgtacgaacgtcacgctttgcgtagagaacgtctaaacagggttttaactattcttggtttcttgccggatcattataccaaagagctgaatcgttatggtcagttaaacaaaggagcggagcctaaattagcatggaatattgttgatggaaagtattcgttcttgttcaaagattcattccttgaaatggtaaaagatttcggaaacgcacatccggaattgctggtaaacggacgaaacattgcatatgattggacgatttattatctgcgtaaaaaagctttaactcagcctattagtaagcaggaattagcttgggttcttcagcagtttaatcaaaaacgcggttataatcaagcccgcggagaggaagaagagcagaaagagaataagcgccaagagtttataacccaaaaagttatttccgttcgcgatactggcgaaaagtcaaaagggaaatcggtatatgaagtatgtcttgaaaatggatggatttttaccaaagaaagcaaatattccttagattgggaaggtaaaactaaaaacttcattgtttcaaccactcttaattccgatggaacagatgcaatagataaagatggtaaaatcagaagaacatttagagcaccggcagatgatgattggggacttttaaaactaaagacacaacacgatattgatgcaagccacaaaaccgtcggagaatttatctacgatgctttgctacaaaatccggatcaaaagattatcggtcagttagtacgtgtcgttgaccgaaaatactataaagaagagttgaaacgcatccttgatactcaaaagcagtttattcccgaattgcaaaatggagatttgtataatgagtgtattcatgcactgtatccacaaaatgaagcttatcggaatagtatagccggcaaggattttacgtatttgctgttaaatgatatcatcttctatcaacgtccgcttaaaagcaagaagtcgcaaatcaacgaatgtccgtacgagtatcatgtatttaaggaaaaagatggtaaatggcaaaaacaatacttgaaatgtatctccaaatctcatcctatttatgaagagttccgtttatggcagtttgtggaaaacttacatatctatagagaggctgctaatggaataggcaaggaagattgtaccacagaacttattgctaataaagcggatttaatctcttggctgctaacacaaaaagaggtttcagaaaaatctctattaacgcaattagttggtaaaaataaaattaaaggattatcttggaatttcgtatctgagaatgacaagaaataccctgctgctcctgtatcttctaccataatgggtactattaaagaggccggtggagaagtttcggcttcagaagtagaacatatatggcatattttgtactctgtttctgacaagtctcaactgctcgctgcactcaaacattatgctgaaacaaaccatttgtccgatgtgttcgtagagaaattaggtaagatgaaaccattttccgactacggagcatatagcgaaaaggctacgcgcaagttactgaacttaatgcgtagcggagagtattggagcgaagatgcaatagatgctcaaacaaaatctcgtattgatcatattttaacgggagaagtggatgattcggttagtgagcgcgttcgcgagaaattggacacaatgaatgatgtacaagattttcagggacttccattgtggcttgcggaatatgtggtttacgatgtgcgcaagaacgacaccaaatgggagaagccggaagatattgacaagtatcttcaatcattccgtttacactcgctcaataaccccattgtggagcaagtagtcatggaaagcctaagaacggttcgtgacatttggaaacaagaaggacaaattgatgaaatacatatcgaattaggtcgtgatctcaagcaaaatgctgagcaacgcaagaaaaccatgctacgccagcaggagaacgagaaagcaaatttgcgtgctaaattgcttttgcaggaatttatgaatccggagatggatgtggaaggtgttcatgcctattcgccgagtcagcaagagttgttccggatctatgaagatggtgttttgtctgctaataaaccggatgatgatacccagcgtattatcaatgagttatcgtctctcaaacagccgtcattacaggatattaagaaataccgtttgtggcttgatcagaagtatgtttctccttacaccggtgagattattccattagctaaactctttacaccggcataccagattgagcatgttattcctcaatcgcgcttctttgatgattcgatgtccaacaaggttatttgcgaggcagaagtaaatgcacgtaaagatcgaatgttgggacatgagtttattgctcaatgtggtggggagaaaatcactttgtcaggaggaaaagtggtacaaatattgtctctacaagcatatgaagatactataaaaaagaattttgctggagatcctcgcaagcaagaaaaactgatgttggatgagattcctgagaagtttgtcgctcgtcagatgaatgatagccgctacattagccgactgatgatgcaattactcagcaatattgttcgcgaaaagattagtaatacggaatatgagcaggaagcagttagcaaaaatctgattgtttgcaacggagcgacaactactcgtttgaagaaagattggggtataaatgatgtgtggaataagattattcttccgcgtttcgagagactgaatcagctccaaaacactacggtctttaccgccaaaacggcaaacggccatattattccgaatatgcctttggaactcaaacaaggatttgagaaaaagcgtattgatcatcgccaccatgctatggatgcgatagttattgcctttaccacacgcaatcatgtagctctactgagtaatgaatccgccttagacaaagacgaaaaagcacgttatgacctgcaaacattgctgcgcaaacgtgaagtatggagaagcgcagatggaaaagatcactataaatttacagattttatcgctccttatgatggtttccaaaaagatgtgcaagaaacgctggaaaatatagtggtcagcttcaaacaaaatctgcgtgttatcaataagagcaataatcgctctacccgtattgtagatggcaagaaacagatggtacgccaagaaaaaggcgaaaattggtctattcgcaagtctctgcacaaagcaactgttttcggagaggtcaatctgcgcaagcagaaatatgtaaatctaacatacgcgctccaacatgttgaagatgttgtggagaaggatttacgtgcaaagctgaaggaattgttgcaggaaggcaaaaacgaaaagcaaatcaagcaatactttgcctctgagccggatgtttgggcagatgtgaatctaaaacgtattgaaatttactattataccaaagatacaaacgaccattactatgcggtaagaacggctttggatgattcctttactgaagattacatccgtaacaaagtaacttcggaaactatccagaagattctcttggcacatttggagcgttgcaataacgatccaaaattagcgttctctccggacggtattgagaaaatgaatgcggacattcaggctctcaataatggtgtacaccataaacctatatataaggtacgcacgtgtgagaaagcagagaaatttgcagtgggacaaattggttctaagagcaaaaagtttgtagaagcagacaaaggcacaaaccttttcttcgctgtttattctataataacagaaggcggagcagagaaacgcgcctttgccaccatacctttcaaagtagcggtggactgccagaaacgtggaaagaaagaatggcgtactttattggatgagtgggtacactctgaaaacatagtttcagagaatgccaaactgcaatttatcctttctccgggagatttggtatacgtaccaactgctgaggaaatacatagtggaaacataagattggataaatccagaatatataaatttgtttcgtcaagtgatgttgatgcatatttcataccagtagcagttgcctcgccaatagtaaataaggttgaatattctcagttaaacaaaatatcacgcgtaagccaagatgagccattaatcaaagaaatttgtaagccgattaatgtagatcgacttggtaatctaatagagaaatgattaagagagttctttgttttgagaatcctgcacgactgagtctcaaattggagcagatggttgtggagttgcaagatgccacgcgtaccgtgcccattgaggatgtcggagttgtaatcctcgatcataaacaaataactatcacgcacgccctccttgacgcactcttggcaaataactgtgcgattgtaaccagcaacgacaagcatctcccagtaggactgatgcttccgttagacggacacaacttgcaaagtgagcgtttccgcgagcagatagaggcatccgaaccactcaaaaaacagatgtggcagcagacgatagttgctaagattttagggcaagcacacgtattgggtatgcaacaaatcgagcacggaaatatgctcaaatgggcaaaagacgtgcgttctggtgatacagataatatggaagcgagagcagctgctttctattggcgcaatatgtttgagaaagatgtgtttatccgtgatccgcaaggtttgccgcccaataacttgctcaattatggttatagtatagtgcgcgctatgatggcacgggcattggtgggagcaggtttattgcccatattgggtattcatcatcatagccggtatgacgcctattgtctggcagatgatattatggaaccttaccgcccgttcgtagatatgaaagtcttggaaatgtggaagaaaggaagtataacaagcgacatttcgtctgaacaaaaacgccaattattaggagtaaccaccatggatgtgaacatctccggacatcgcagcccaatgatgttagctgtccaaacaaccgcccaaagtgtacagaaatgcttttccggcgaagcaagaaagattatctatcccgattggtaaaatgaaaacaagttctaaattatcgaaacgtagtaatgcgacaagtggtcaaaaagcgcacaatgaaagccaattcattaagattggtcgtgttcgtctgcatagttggatgaatgagaattagcgggcaacgaaagacagatagcgatttggagcaatgtgcggttgtggaactcaaaatagaatggatggggcgcaaaagagtctatgtaataaaatcagcccgcccgatgaattggggcaggctgcgtaaaattgagttggtgtgtgttaaaccccgctcttaacataagacttccgtaccagacgcaggtagtgagccacacgcgctcaatatgcttttgcgactgcaaaagtactacaaaaaaaatgatatatgcaaattttttgaagaaaaagtgagaaatttattaatatttattcaaaaaagtaaacaatagaggtctaaaacaatctacggcatcgaaaacataataataacccgttgtgtatgtcattcaaaaaagtaaacaatagaggtctaaaacaatcacattttaggtggcagctgggagagactggttgtgtatgtcattcaaaaaagtaaacaatagaggtctaaaacaatcgattctcaaaactatgggtatcggccgcggttgtgtatgtcattcaaaaaagtaaacaatagaggtctaaaacaataaaaggcggcgcttcctaaacggtccacttgttgtgtatgtcattcaaaaaagtaaacaatagaggtctaaaacaatccggatgggcgggagcaaacgcgcgaggatgttgtgtatgtcattcaaaaaagtaaacaatagaggtctaaaacaattcttgcatgcgcatttgtcggctaagcagtgttgtgtatgtcattcaaaaaagtaaacaatagaggtctaaaacaatctacctctttcatgatctttacaagggtaggttgtgtatgtcattcaaaaaagtaaacaatagaggtctaaaacaattacgattatggaaaagacaaaaaccaccctgttgtgtatgtcattcaaaaaagtaaacaatagaggtctaaaacaatagaaatgcaaataaaatctttcagcgttcgttgtgtatgtcattcaaaaaagtaaacaatagaggtctaaaacaatttttaggctcttattagaaccctttagccagttgtgtatgtcattcaaaaaagtaaacaatagaggtctaaaacaataaagggctggcaggtttaacggctactgatgttgtgtatgtcattcaaaaaagtaaacaatagaggtctaaaacaattccaaggtttgaagagcgctgtgtatgatggttgtgtatgtcattcaaaaaagtaaacaatagaggtctaaaacaataaacacgcccgcgagtgccttaacggccgcgttgtgtatgtcattcaaaaaagtaaacaatagaggtctaaaacaatgctaccaggtattgctctcctactggtacggttgtgtatgtcattcaaaaaagtaaacaatagaggtctaaaacaatctctgctgcgcttaactgctgcatctgctgttgtgtatgtcattcaaaaaagtaaacaatagaggtctaaaacaatactcgtccatcatgccgctcaccgctggaggttgtgtatgtcattcaaaaaagtaaacaatagaggtctaaaacaatcagctacctgcagattcaagttacgcttatgttgtgtatgtcattcaaaaaagtaaacaatagaggtctaaaacaatataacgacacgaagaagcgggctatcattagttgtgtatgtcattcaaaaaagtaaacaatagaggtctaaaacaatacaacgctaacgaggcgagcgctacgttcagttgtgtatgtcattcaaaaaagtaaacaatagaggtctaaaacaataccagcatcctgaataatacccaaactctggttgtgtatgtcattcaaaaaagtaaacaatagaggtctaaaacaatttttgagtgttggtttgataggtgaactcggttgtgtatgtcattcaaaaaagtaaacaatagaggtctaaaacaatagaccttatataagaccctaaaacacaacaagttacacattgttttagaattagaaaaagcagcactatgaagtactgctttttcgtttttatagacactttttatatttctaaaacaactccaactgctgaaccggctgatcaacctgtatctctttgcagcattcaaagatctgcatatccccgaactgtttgtccgtgatccgaagaataccgatcttaccgaacggaggcatccatttcttgacacgcgctatatggacatctgcattctctgcactcgggcaatgccgcaaatatatgctgaattgaaacatagtaaacccgtccatcaagagtttcttgcggaatagggcatattccttccggtctttcttggtatctgtcggaaggtcaaataaaaccaacacccacataattctatattcgctaaaacgtgtgtccattaagctgcaaaattacagaaaaatgcggaaatgacaaaattttttgcagatttatttgcatatgtcacgaaaaagtagtacttttgcacaactttttgaatgacatacacaataaggattattccgatgtgtaaacatttagggtgggaggcaactctcgcccttttttaatgtccaaattgaatttggacgtaccgaacataataagatctggaatgatattcgggataatggataaaaaatatatcaaaatttgcatatatcaaatattttttgtacctttgcacccgaaaataacttattcacataaaattttataactatggcaaagtacatttgtgatgtctgcgggtacgaatatgaccccagcgaaacaggaaaagcgtttaatgaactcccggaagattggacatgcccaatttgcggtgtaggcaaggaccagttttctgagttgtaatcccccaacagtcccctcggtgcaaaaccgaggtttttacagtccaaaataatggttgaagggggtgattacggggcgattaccgggtaattactgcgtgattaggggaatgtttatacgacgccgggctaagaacgcccaaaagaactgccaaactggcagacttatagaaatactataatatacactgcaaaaatcgtgccaatatatgactcaaattaaattttatgcaccggttaaagaaatgaacggtgaattcgaaaaaggaagcggtattgtcatgagaaaaaagaaatatcgcgcaccgaatggagccgtcctcagagaaggtgttcaggaatcctacaaaatcgttcatccgcgtgattacgataagaacccgcctaaaggagctgaactcgctaatattcagctgtttagcgattccaaacgccagacttccgagattatcaattccggcaaacttactgacgaggaactcgcagccatgacacccgaggagcgccaaaaaacgcttgaactgcgcgcagaactggaaaacttcagaaatcgtttctacgcgcaattcaaacatccggatccggaagcaccgttcgaaaagaaactgagaccgggcgcatcggttctccgacaaaaacaatatgctaaactcgataacttcattcaagcgatcatacgtgagagacttcaaaaacaactataataacatcgtttgcgaaaatcacgtaaactacattaactacacaaactacgtttacataatttactgacattatggcagatttatttcttttcattattatggtataattattgtactaataccatagtacgaaatgtgtgccttttaaacctaatcggcattatgtaaaatagcatatttcaaaaacaaccttaactacacaaacaaccctaactacgcaaactacgtttacaaaatggaagataagtatcaatcagaaaacaagatttacaaagtactccctattaagaatactgtcattttcccgggagtactcttacctattgctgtttcaaagaaaagcagtctgaagctcatcaaagaagctgaaaaaacagatgagccgataattctgctgacccagaaagacaacaaggccaaagaacccacggagaaagacctgtaccctctgggcaccttggcgcatgtggtacaagtaattcctgttccggaaatgggaaaagatacgatgatgaccatcttcgaggggcttcatcgtgtacaggccatggatttcacaactgctgagaacggcggattaatggccagtgccgttgaaatggacgaaaatatgccgcggaaggacgataaacagttcaacgcgaccatcgaaaccattcgtgagacggtacagaagatattgccgaaacgagaagactcccctgccggattgcagtctgcgcttcaatcctctttgaaaaatcttacttcctcgccttctttcttgaattatgtgtgctccatctatattatgccgacggagaccaagcaaggattgctggctattcacgacttaactgaacgtgctaatgccctgctccgtattctcgagaaagacctggaggaactgaatatcaaggaagatattcgtcgtcgtaccgtcgagaagatggataaacagcagcgtgaatacttcctgcaacaagagttggagaccatcaaaaatgacctgggtgacaccgattcatcggcacaaaaagtcagtgaactgcgtgagcgaggcaaagaaatgaaatggtctgcagaggtggctgaacgctttgagaaggagttagcccgcctcgaacacatgcatgtgcatgctccggactactccactcaactcgactatctggagttcatgttggacctcccttggggtgtttattccgaagataattacgacatggcgcacgcccaagaagtgctgaatcgcgatcacttcggattggataaagtgaaggaaagaattgtcgaatacctggccgtacaacgtcaattggcgcttcgtagcaaaaaagagaaggaaaatcatccggtgaaatcgccgattttatgtctctatggccctcccggagtcggaaaaacaagcctcggaaagagtgtggctgaagccctcggacgaaagtatgcacgcgtctctttaggtggtctgcacgatgaagcggaagtgcgcggccatcgtcgtacatacataggtgccctgccaggacgaatcgttgacggcatcaagaaatgcggaacttccaaccccgtctttgtgctcgatgagatcgacaagatcggcgccgactacaaaggtgatccgactgctgctttactcgaagtactcgatccggaacagaacaatgccttccatgacaactacctggatgtggattacgatctgagcaaagtgcttttcatcgctaccgccaatagtctggagaccgttcctcgacccctactcgatcgaatggagttaatcgagatgaccggatacttgcaggaagagaaagaagaaatcgctaagaaacacctcatccccaaggaactcgcgaaccatggcctgaaagcctcgcaactcaagttcaagaaggagattcttgcccatatcatcgatgattatacccgtgaatccggtgtgcgctccctggaacgtcagattgcgacgatctgtcggaagatagataccaaactggctttaggagaagaatataacgtttctatcacccttgatgacctgcgtacctacctcgggcaagcacgttatagccgcgatagctgggagacaaacaaatacgtcggtgtggtaacaggcttggcctggacgcaagtgggcggcgagatattgtttatcgagacgagtctgagccagagcaaaactccgacactgactttgaccggaaacttaggcgatgtgatgaaagaatccgccactttggcactcggatatgtcaaggcacatgctaaagaactcggcatcaaacccgatgtattcgagaaaacagccgtacatatccatgtgcccgaaggagcgattccgaaggacggaccttctgccggcatcacgatgacgacggctttagtaagtgccttcaccaaacgcctcgttaaaccacgcatcgccatgaccggagagatgactttacgaggtaaggtattacctattggcggagttaaagaaaaactgctcgcagctaaacgagcaggtatcacggatatcatcctctgcgaggacaacagaaaagatgtcgctgagatcaacgacatctacctgaaagggctgaaactgcacttcgtgcacgatatcagcgaggtgatcgaaaaagcgcttacaaaataagcgcttttttcatgtatgatgtagggtttatgatttttgatttataaactcttcgtacgtaccatccgtatagtacactactatattcttaatctgttttgaaggagctgcaactacttgcggctcttctttttgtgccgtacgcactgttttttccttcggatcaggtggtaatatatcaaataaaccggcatctttaccgggtacagaacgccacatatcacctcttccggcaattaaccactccggattcaaggtaggatagcgctccataatgcgtttcatcacttctaaactgggattattacgtccagccatcatattactgatagtaccgggttgcacatgaatctctgcagcaaactgccttgctgttagtcctaaggcatcttttaccttctctatacgttctctctcattcataaaataataatttattatttaaatggtgcccccagagtaaactaagcctaaggctgtttgctatggggagagcgtagcgtaaggcggagtgtttaaggagctacgaggtagcaactcacacgagccttaacgtaagcgagtgcaaaattacaaaaaaaatgtgaaatacacaaatgtttgcacaattatttttaaaaatattttcacatttgtgaatacatgaaatttgcaattgtgaaatttatttatcagcaacaagccgtggaacatttttacaaagtcatctccctcatccctgtctatgttcaacaaactattcaaatagtcatacttattttactttgtgtagtgcgcatatatgccttataataagcaagttatagtaattattaaacgtattttaacttctttatgcctctatttcttcatataccgtgatatcttcatagtattactttaattaaatacgtaaaatgctcatatatagatagttatattatcactaattgtgtaatttgcttgattttgaaggcatgtacgattgttaagattcgtgcatttctgcaaaatgaattctactctactctctttggactcttaaatcaaaagtttgaggcctggagattcttttatgcggtttgtgaacgtttggtttgtgagcaaacaatacctaatttgtgttcacacttattctgctaacatttttgattttttgcttgcataattcacaaaaatatactacctttgcactcgatttgagatgaataattcagtaactattgccattaaactttacctgttatgaaaatgaatgtttacactatcaaacaacaaacgcaggatttcctgcttcgattgtttgttgagggcgtaccagatgctactccatccgattcgtattattacacctgttcccgatgtgggaccttcagaaagcgtcattaattcgaattatttctcagtatttgctgtaaaggcttgcatatttcctaaaaatattgtacctttgcagcaaattttttattatacgatgctactctatccgaattgcaaggtaaatatgggtttgcgtgttgtacgtaaacgaccggacggataccacgatctggagacaatatttgtgcctgtttatggtttacatgatgaactcgaggtcgttcctgccccctcatttgcctttacgcaagaaggaataacggtggattgtgctccggaggacaatcttattatcaagtgttaccgtcacttggccgctaaatacccgcagataggtcctgtttctatccgttttaagaagaatattccctttggcgcaggattaggcggaggaagtagcgatgccgctcacatggccatcgccttaaatgggttgtttgacttaggattaagtaaaaagcagttagccgcagaggtggcttcattaggagccgactgcgcattctttatctataatgtaccctgttttgccgaaggcatcggagatatcctcactccgatcgacttggatttgaaaggtgtacgtatcgtgatgatcaagccggacgagggggtatctaccagagaagcttattcgggaatgagaccgcgtccggaggttgctcagagtataaagaccgctatcgctcaaagtaaaaagaaaagtcttttgtcttttgactttctactttctactcttttcatcaacgatttcgaagcaacggttttccctcatcatcctattattgcttacataaaaaagcgtctgctggacgcaggcgctttctatgcttccatgagcggaagtggttcaactgttttcgggttttttaagaatgatgcggaaagtggtaccaacacccacttggctgctcttaagcacgagtttgcctccatggtactgctcgatgatacgtttggcgagtggaaggcctaaaccccatcctctttccttggaagtgaaacccggctcaaagatgcgacgctgggttttgttgtcaattcccttgcctgtatccgaaacatcgatcatcacatcgtgctcgttctcatgaagctggatggtaattgcgccctctccggagatagcatctaccgcattcttgagcagattttcaaccacccattgaagaagcggagcattcagcatcaccgtacgattgacctcattcagacaactatcatcaatcgtaatcctattagatatacgcgcgcgcatgtaggtcacagcgttctgtacaacaggaatcaaattctccgcctgcaacgtaggttctgaacctatcttctggaagcgatcagcaatcatctgcaaacggtctatatcccgcttcatctgcggtacatattcgtcttccggatatttctctgccaatatctgttgccaagcgttgagggaagagataggagtgccaagttgatga

SEQ ID NO: 1167 - DNA, 24476 bp, synthetic construct
  misc_feature 1..24476: note = Synthetic
  source 1..24476: mol_type = other DNA
gacctcgtcgtcaaagagcctgagcccgacccttacaaggtgtccgacaaatggtttcaggtgatgacctacgcctggctgtattgtcgcaaggagaaactccaaaccaacttccaatcgggcatattcccgttgcgagacctttcatcgggctttattgccgcctcgtggagcgatggcaacctactgtcgccaaacgacatagaccgattcgagcatatcctgcaaactctcttcggagatatgctcaacccagagcttgacttcgtcgccacgcccgacagaaacacctgcgcttactgtcctgtaaagcgcatctgcaaggcaaaaatcataaaatagacgattttttatggcagaatatacaataaatcaaaaaatatatgtaaatttgcaatttcaattatactccttttttcaagttgaatgaggcttgaaaacaaggtgtatataattgtgaattaagtaatagtacaaaaacaaacattggttcgaaatatcaaaaaagaatatcgttttatgaaaaaatcgatttttagcgtcctcctgatgtctctgttgcttatgagttgcagcggtctgtcgagtatgaaatccaacagcaagaaggttcgctatcaggcgactcccaaccccgtcgagacccgtgacgacaaagtggtagtcaaatttgtaggctccatccctgagaagtatttcaacaagggtgccgcagtgttcatccagcccgtcttcacctgggaaggtggctcaattcctcttgaccccgtgacacttaaaggcgagaacgtcaacggcgaaggcatcaccatcaactacgagaatggcggtcgcttcacttacaccgatgagtttgatttcaagcccggtatggagacaggacgtgtgaccctcgcacccgtggcttatattgcctccacaaccgacgacgaagccaagttcgctgacgagattcagcataagactgttaccttcccgacggtactcatatccgacggagtcaatacaacctcaacgtgggtaaacattcgcggcaacatctccatttcgcccatcaactacaacaaaacgcagggcgtaatagagaccgccgacatttacttccccaacggtatgtccaccctcgactggaacttccagatgaaccgcaccttcaacagcaaggctcagcttgaagaactgcgccgcattatgcttgaaaacggcctgcccaaacagattaccatcactggctgggcatcgcccgagggagaagagaccaacaatgtgggtgtcagcaagaaccgtgccgaggtcgccaccacacagatcaaacgcgtccttgacgacgtgctcaacactatggcaagccgcaagcaagtgcccgcctacgaagttgaccactacaaatatgagctccagaagcagataattgtctccacccgcgccgccggcgaggactgggtacacttcgtcattatggtcgaagagtctgacattcaggacaagcacgccatcgtaaacatcgtagaaacccagcagaaccttatcaagcgcgagcagatgatcaagaatatggcagagacttacactcagctcaacactgacatcttccccaacctgcgccgcgcacagatagccctctactacagcgaggctcgcaagaccgaccccgagctggcaaagcaggcgacactcaaccccgccaaactgaccttcgacgaactgatgtacgctgcatacatcaactacaactatgagaccaagctgaaatactacaagtgggccaccgagaactacagcgccgaatgggccggatggaacaacgccggcgccgtgtcgttctatcttggcgactatgccgaggccgagcgctatctcaatatggcacgccagctcaacccccacaaccccgacgtgctgaacaacaccggtcttctctgtctggcacagaaagactacgctttggcaaaatactacttcgaagaggccgaacgtcagggcagcaccgacgccgagaccaacctgcctatccttaacctgaagaaaggcaactacaaagacgccgagaaacagctgaaaggcagcacctgcagcttcaaccttgcttttgcacagcttatgaacggcgagaccagcaacagcatccgcaccctcgactgctgcctcgaccagaatgccgacgtgttctatctccgtgccgtggcctacgcccgcctgggtgacaaggtcaacgccctcaagaacctcaaggtggcttgcgacgaagagtacaactacaaggagcgtgccgccgtcgacaccgagttcaaagcctactgggacgacgaggagttcaagctgattgtaaaactctggtaaccaaagccaacaatgaaacggcaaataccgaatctcataacactctgcaacctgctttgcggagtgttttcttgtattttcgcctatgaagagacgctgcacatagcagcgatgttcatctgtctgggcattttcttcgacttcttcgacgggatggcggcacgcctgctgggtgtggcgtcgccgttgggcaaagagctcgactcgctggccgacgtcgtcaccagcggcgtggctccgggaatgataatgtatgtactcatcgcccagttgaccgacctgtcgtggctgaaatacctggcgctcctcataccgctcttcgccgcctaccggctggccaagttcaacctcgacacccgccagagccacagtttcctcggtcttcccgtgccagccaacgcactcatctgggtcggtctggcccttgcctggcgtttgtcctgcagcaacgaatgcatcttgacttgcgaccacacggccatagccatcatccttgtcgccgtatcgctggccaccaacatcctgatgataagcgaagtgcctatgttctcgctcaagttcaacttcaaggatatgtcgtgggcaaccaactccgtgcaatatttctttttggtaggatgcgcagccatcatagcagtatgcttcctcaccaacgctttctggctcagcctgtcgttcataatcatctggtacatactcctttcaataatcactcgaaagcacaacaatgccaactaaccctcgcaatatagccattgccgactacgactacccgctgcccgacgagcgtatcgccaagttcccgctggccgaacgcgaccggtcgaaactcctcgtttaccgagacggtaccatcaacgagtcgcagttcttccatctgcccgagttgctgcccgagggagctatgctgctcttcaacaacaccaaggttatccacgcccgactcttcttccgcaagcccacagggtcggtcatcgaaatcttctgccttgagccgtatcagcaacctgtagccgaggcattcgaagagcgccaacgctgcacctggctctgcttcataggcaacaacaagaaatggaaagaaggttccctgttttcagaattcgaaattcataattcgaaattcaaaatcgcagcttcgcgccgcgaagcgaaaggcaacgcctggattgtcgactttgagtggaccggcggcatcagctttgccgaagtgattgaatatgcaggcgtcattcctcttccaccatacctgaaccgcgatgccgaggagagcgacaaagagcgctaccagacggtctacgcccattacgaaggctctgttgcggcaccgacagcaggcctgcacttcaccgaccgtctactcaaagagctgaacgacaaaggcttccttaccgaatacatcacccttcacgtcggtgccggcaccttcaagcctgtatcctcagacaccatcggcgggcacgagatgcacgtcgaaaaagtgcagataagccgacagaatatcgtcaacatcctccaccagctcggcaagcctatcataccggtaggcacaaccaccgtacgcaccttggaatcagtatattggtttggcgtaaagctacaacccaagcctgaccttgaggcgatgcacatcctgcaatgggacccctacggacttgaagtcgaaaacatcagcacaaaacaagcctaccagaacgtactggactggatggaccgcaagggcattgagcatctcgacggcgacacgcagctgctcatcgctccaggctacaagtaccacgttatcagcggactcataaccaacttccatcagccaaagagcacacttctgctgctcgtgtcggcacttgtcggcgatgcgtggaaggagtgttaccgctatgccctcgacaacggcttccgcttcctcagctacggcgacagctgcctgttcctcaagcaataagacaaaccaatgccgaggcttttacgtaacttcttcgagctcttttttcccagcacctgctgcgtctgcggcacgccccttgtcggcgacgaacacgaactctgcaccaactgcctgctgaagctgcccgaagcgacaacaacactgaaagacaacaatttcgtagagcaacgcttcataggacgtgtgcccgccgagcactgctccgccctgctggtatacaggcgtaaaaccaacgcacagaaggtattgcaccagataaagtactacggcaacgagaaacttggcatcgttatgggccgccagctcgggttgcatcttgcccaaagcgggctctacgacagcgtcgacctgcttgtacccgtgccgctgcaccgccgaaaagaacggcgacggggctacaaccagagcctgcgcatctgtcagggtatagcccaaaccttccctcgccctattgtcaacgacaaccttgtccgcattcgccgcaccgactcgcagacccacaagacacgcctgcagcgactcgacaatatgcaaggcgtattcgccgtcaaggacagcgaagcactgaaaaacaagcacatcctgcttgtcgacgacgtcataaccacaggtgccaccaccgaagcctgctggatagcaatgcgcagcatcgaaggcctccgcatcagtattgccgccctcgccgtgagcggcgacaactaaccgaaatcggtgaaattgcaaaatcccttccaaagcgccccaaataaggtataatcaattgaagttcaacaaataacacacaattccaaaagagttcaatttcctttggaaagccccgattttaccctattgcaacatcttgatttccatacaacatcttcttatcaaattctacctaaattcttatcaaattctaaccaaagtttataatagtagaacttgataagaatttatcaaaaagtcggatggaatttgagacagcgaaaccacgttgtaaactaccccctgtcccaaaggtacccatattgtccgcattgtcaccccacacggcacgtcgcacaaaaaacttgttatcaactgattgacacccatacaacaggttttctactaaaaaaagataactttttcttcgctattttcatattatttcttaatttcgttgcttaaaacggcaatgcctttttaagcaaaagatatgcttatcaatctgttacagccgaacaagaaaatagaaataatatgaaatacaatcgagtactactgaaactgagcggcgagtcgctaatgggcactcaaagctatggcatagaccctgcaatgttggagcagtatgccaaagacattaaacaagctgtagaaaacaaggtagaggtggccatcgtcattggcggcggcaatatcttccgcggcctcagcggtgcggccaaaggaatggaccgcgtgcagggcgactatatgggaatgcttgccacgctcatcaacagtatggcgctgcaggccgagcttgagaagcaaggactgcacaccgagttgctcagcggtctggccatagagcccatctgcaaggaaatgagccgtcgccgcgctatcgaggcaatgaaagaaggcaaagtggtcatcatcggcggcggcagcggcaacccgttcttcaccaccgacaccgcctcagccctgcgcgcagtggaaatcaaggccgacgccatattgaaaggcacacgtgtcgacggtgtctatacagccgacccagagaaagaccccacagccaccaagttcagcactctcaaattccaagaggccttgagcaagaagctcaagataatggacctcaccgcctttgccctctgcgaagagaacaacctgcccatctacgtcttcgatatgaaccgtccaggcaacctgctgcgcgtggtcaacggcgaacccatcggaacagaaatatgctaagatgaaaaggaaccattaaatccttttaaccctttcaacctttcaaaccctttcaaccctttcaaccctttcaacccttttaacccttttaacccttaaaacctttccaacccttaaaacccttaaaacaaaacataatgaacgatttatcaaaagcctgtatcgacgaagccaaccaaacaatgcacagcgccatcaactttcttgagaaagaactggccaaaatacgcgccggcaaagccaaccccggaatgctcgacggcgtaaagattgactactacggcactcccaccgagttgagccaagccgccaatatcagcacgcccgacccgcgcagcatcatcatccagccgtgggacaaatccatcatcggagccatcaacaaagccatcctcgacgccaatctgggcttcacgccgcgtcacgaaggcgaaatactgcgcatcgttgtccctccgctgaccgaagagcgccgcaaagagctctccaaggccgcaaagaccgaggttgagaacagcaaggtcaacatccgcaacgcccgccgcaacgtgatggacaaagtcaagaagctgaaagacaaatccgtgcccgaagacgaagtgaagcaagttgagaaagaaatccaggacatcaccgacaagttcattggcgaatgcgacaagatctacgcagccaaagaaaaagagataatgaccgtgtgatggacatccgctggtttgagaccctcgagtccaccaacaactattgtaaactcctcgaccccaaaaccgtcggggagtttaccgttatttgcgcccgtcggcagaccgccggcatcgggcagcaaggcaacgtatgggccagcgaaccatataaaaacctaaccttcagcctaatcctgaagcccaccttccttgctgccgacgagcagtaccgcctcacgatggccatagctctcgccgtcgccgagacggtggagcacccgttctccgatttccgctctccgttctccgctcaaatcaagtggccaaacgacatctatgtcggcgaccaaaagatctgcggcacactaataaccagccagataagcggaagccatctctgccaatccatctgcggcatcggcctcaacgtcaaccagaccgccttccccgactgggtgccaaaccccacatcgcttagcctgttgacaggcaccgaacacaatctcgacaacctgctggacaccttgctcagcaacattgagacagagtacgaccatctgaaagaaaacgacagcgacctcaaaagccgctatctgagccgcctctaccgcctcggagtcgaagccgactacatccacgaaggccaaccccttcgtgccaccataaccggcatcgaccgctacggtcacctccagctcgcaaccgccgccggcactcccctcacctgcggaatgaaagaaatccaatttgtgatataagcgtgccccccgccgaaccaacagatttccagtatatttaaaaggaaagcattattgtttttgataaaaataagtaataagtctattagtcataagtcaattagtcacaggttaattagtcataaacctattacctaataatacaaacagccccagcgatgggaatctggctgaaaagacaattatagaaatcccgttcttgatatgaaagcatcgtcacttttcaagaaatacgtctggcttgtcgatatcatccgacgtgcaggcagaattacccttcgcgacatcaacgagcgatggacacgcaccgagatgagcgagggtattcccttcagccgcaccacgttccgtcgacatcggcaggaggtggaagaaatgtttggcctaatcataaagtgcgacagcgacaaccgctattatattgacgaccccacgttgatgtcctccgacagcgtgtcgcaatggatgctcagcaccctggcagtaagcaacatagtcagcgaagcccgaggcctgcacgaccgtatcctcttggaaagcattcccaccgaaggcgagcgtttgcgacaagtagtggatgctatgcataacgggcaacgcttatgcataacatacaggcgctacggcagcgacgacccacgccaatggatagttgagccctactgcataaaactattccgtcgacggtggtacctacttgggcgcttcgaagaaggcagatacatcgtgctttcattcgaccgcatcctgcaaatgcaaaccgctgacggtagcttcacaattgacaaaaactttgacgcgcaagcctattttgccgaatacttcggcgtgatggtcagcgacagtacgcctttgcagagtatagttctgcgcgcctacggcaacgagcgctacgctctgcgcgacctgccgctccacccttcacagcgtgaacttgaagaccacggcgaatacgttgattttgaagtacgcctgcatccaacttccgacttcttggcccatatcctctcgcgaggtcgttggctgcaggtcatttctccagcatctatagcacagcaaatcaaagagatgctacaagagacatcctcagaatacaaatagccaccaccagtggtccgttttttggagcacctatcggtgtatctttgcatcgtgaaagaattcaatacaatgcaatgatgacctccttgtttatattactaaccaaaggtgggttcggcgtaggagatgccggaggtggcttattccttattctcattctgttagggcttttcatattgttcggctatatcctcacccacgccgcaggcggcatcctcggtattttatggttattttacgacaagttgaccaaagggacctcactggacaaagaatacgacggacctctttctattggtgccaaatatgctttgatctcacttggcgtagcaagctggcttgcattcataatcgtccccaccgtcagagacacagacacatctgggtggtatatattctggtgcaccgtctacccttttatatacggctacatctacatcatactacgacacttctatttcaggcatctttacaaaattggaacaaagaaagccaagcaatcactcgttgcacttatcatctgcataatagccattttcctcctcaccatcttcgccattgcatacacatcgccaagcaaccgcgtcgaccgtttcaatgcaattttatccaaagcccaaaaatctgagttgatcgagagcgaatgcattgaaggattccgtttaggaatgcctttttctgaatattgcgacaatgtggacagactcatcaaagacagtttacttgagcgcgacagcactggtgaatacctattctacaacaaatacaacacagaagaatacaacaattcaaaactatacctcgaacccgtattttgtgacggacatctaagccaactggcattcagtgtatataacggtatgggcgataaaggtttgacacttgaattgcactcatcaggaagattagtaggcttcaaaaaactggtcgttcccgaattgacattcacatcagatggagaagccaaagtgccagaatatagcaatggtcctgaccaactctataactattatgccaacgatgaactgtttcttaaagacaatatgctgattgtcatctccgtcctccaaatcaagttcatcaatatgcgcgacctttaatgcttcacaacaaaaaaaatcgtatatttgcaccttgaaacgaaaccgcaccaaagagcaacatcatataatacaatcatttgacaagaaaaatacacaaaacaagtcaaagcaaaacctaccaacagacaatcttaatccactatggcaaaaatattaggacttgaccttggcaccaacagcatcggttgggccgtgatagacaatgaaaagaaatgtattgaagcagccggctcacgaatcatccctatggatgcagggcgcttgggagactttgaaaaaggcaactctgtatcattcaccgccgaacgcacccaatacagaggtgcacgtcgcctccacgaacgatatattcttcgcagagaaaggatactgcgaatcttaagaataatgggattcttgccagaacattacgtggctcagatggaccgatacggcaaatttccctctgacaaagagccaaaacttgcttggcgagaagggaaagacggaaaagcagaattcctgttcaaagaatcatttgaagaaatggtggcagagttccgtctgtctggaaacgacggaaagataccctatgactggacgatatactatcttcgcaagaaagcacttgtcaaacctctcacaaaagaggaattatcttggattctgatgcagtttaatcaaaaacgtggctactatcagctacgaggaaaacctgatgaacttgatacagacacgaatgacaagaaagaagaaaaagaatatcacgaactcaccgttttaaaggttgatgacaccggcgaaaaagacaagaaaggcaacacttggtacaatattaaccttgagaatggatggatttatcgacgtgcctgtagcatcgcccctgattgggaaggaaagaaacgtggatttatagctacattcaagctcgacaaagaaggcaaacgcactgatgaccaacccaaaatcagctctccaagcgaggacgattggaacttgcgaaaactaaaaaccgaggacgacattcggaaatcaggcaaaaccattggcgaatacatttacaatctactattgaacaaccctaagcagaaaatcataggggattctgtccaaacaataaaccgtgaatactatcacgacgagctgattctgattctgaaaaaacagagcgagttcttgcccgagctaaaagacgatgaactatacagacaatgcatcgaagaactctatccaaacaatgaagcccaccgcaacagcatatctcgtcgagacttctgctatctgattgccgacgacattcttttctatcagcgtccactaaaaacaaaaaccagcctcatcgccgactgcccctacgaagagcgcaacggaaaaccgctgaaatgcattgcaaaatcacatccgctgttccaagaattccgcttgtggcaattcctctcaaacctgcacattttccgccaagacaacgacataacctcaacacttcttcctaacaacgaatcttatgccgaactttacgacttcctctccacacagaaagaagttgaccaaactttgattctgcgttactttaaaatagggaaaaaagagatgtcccaatatcgatggaactatgtcccggacaagaaatatcctgccggagagacaaaatccattttgttgggcggccttcgtaaagcaggcattgacatcgactttcttgactccgaaaaagaattgcacttatggcacatcctttactccgtcgacgacacgacacaatatcgcaaagccttgcggacttttgccagacgacaagactgggacaatgaacggattgaagcatttgccaaagcctttgaccgtctaactgtatacaaagaaaaagattatggcgcatactcggccaaagccatagggcatttactccctttgatgcgtagaggacgttattggaatattgacgccatcgatccactaacccgccaacgtatcgaacgtttaatcaccggcgaggttgacgacaatctctcattgacgctgcgagaacggttcaaacatattaacgacatcaaagactgtgaaggattgaacacttggcaggcctgctatattgtatatggtcgacattccgaagccactgacacacaaaaatggaccagacccgaagacattgatacgtacctaaagacattccgccacaactctctcaacaaccccgttgtcgaacaagtggttacagaaagcttgcgtgttgtacgtgatatatggaagcagacaggccatatcgacgaaatacacatagagttaggacgcgaactcaagaaaacgaaggccgaacgtgaaagtatgtcgaaagcaatcgccgaaggcgaagcaaccaaccagcgcattcgacttttgctcgctgaattgaaaaaccctgattttgaaatcgagaacgtccgtccacagtcaccctcccagcaggaattgctaaagatctatgaggacggtgttatgcgaagcggtgttgagattcctgacgacattatagacatacaaaaaagattcacctccgtaaaaaaccaacccacacacacagaggtaatcaggtacaagctatggctcgaccagaaatacatttcgccctacaccggtcgcacgataccactggcaaaactattcacacctgcctatcagattgaacacgtcattccccaaagccgttggttcgacgactctatcagcaacaaagtcatttgcgaggccgaagtgaacgccttaaaaaaccgagaattaggacacgaattcatcgtacatcatcacggtgagacagtaccgttaagtatgggaggatctgttaacattctctctgttgaggaatacgagacactcgttaagaacattttcgccaacaatcacgccaaacgcaagaaaatgatgctcgacgacattcccgaagacttcacttcgcgacagatgaacgacagccgatacattagccgactgatgatgcacttgctgtcaaacattgtccgtagcgttgacgaagatggcaacctcgaggacagcgtcacctctcgcaatgtcattccttgcagcggtacagtcaccgaccgactgaaacgagactggggcattggtgatgtatggaaccgtatcattctgcctcgattcgagcgcctgaaccagattacaggcactaccgactacacagccgtcaccgccgaaggtcataccatcccggctgtgcctattcatttacgacaaggctttaacaaaaagcgcattgaccatcgccatcacgctatggatgccattgttattgcctgctgctcacgcgaccacgtcaacatcctcaacaacgaggcggcaaaaagcaacacccgttacgacctccagaacaaactgcgcgccaaaagcacctaccttgacaaacaaggcaacaaacacgacatctttaccgaattcctcaaaccctggccaacattcaccgaagatgtctaccgcactctgcaaggcatcatagtcagtttcaagcaaaatcttcgcgtcatcaacaaaacaaccaaccgctattcaatcttacacgatggcaaacgcaccacagcagtacaaacccaaggtgacagttgggccatacgtaagccccttcacaaagagacagtatttggagaagtcaatcttcaactcaagaaaagaatagccataaagaaggctctcaaagacatcaacagcatcgtaaaccgcgaactgaaagaaaaaattaaagaaaagaagacttcaggctacaccgacaaacagattatcgagtatcttgaaaagaacaaagatatatggagcgaaaccgccgacggcaagattgaagtatactattatacaaaagacactggcgaccgctacttcgccacacgaaaagaccttctttctcttatgtcaggatgcacaacagttaatgctgcctatgctgccattgacagcatcaccgacagcggaatacgagccattctgcgggctcatcttgtcgtcgaaggcaacaaccctatcgaagcgttctctgccgacggtttagaacgtttgaatcgtaacatacagcaactcaatggtggcaagagccatcaacccattaaaaaagtccgtgttttcgagcaggcaaacaaattcagcatcggtgcaacaggacaaaaggccaccaagtttgtagaagccgccaagggcacaaacctcttctttgtcatatacaccaatacaaaaggcgaaagaggttacgccacagtgcccctcaatattatcatcgacttacaaaagcagtatgagaacaactggaaagagaaactcccggagcgtttgagccaaaacgaccttgcactaatgcccaaagacgcaaaactactatacgtgctatcacctggcgatttagtatatgtgcctatgcttacttccaattctaaacatagcgagaatgtagagtcatccagaatttataaatgtgtttctatgtcgggttcggtacttgattgcgttcaatattgtatctccaaaatgatagctgatccttttgaatacactcgtcataacaagatgcaacgagccattactggcgagatgattaaagaggtctgcattcccatacaggttgaccgacttggcaacataaccgaaatcggacaacaatgatcaaacgcacactctgcttctcaaaccctgcctatctgtcgatacgcgacaggcagttggtggtgcgcgtagacagacacgacaacgagccggaacgacagacaacaattcctatagaggatatcggtgtcgttgttcttgacaatcgtcaaatcaccatcacccacggcgcaatgtcagcgctactggagaattgtgccgctgtcatcaccagcaacgaggcgcatctgccagtgggtcttctgctgccgctcgaaggacacaccatacaaagcgagcgcttccaagaccaaatcagcgcctcgctgccattgcgcaaacaactgtggcagcagacagtgcaacagaaaatccttaaccaagccgcgctactgcgacagctccacaacaccgagacaggcaatatgcagcgttgggccgccgatgtacgcagcggcgacagcaccaatctcgaagggcgtgctgccgccttctactggagccaaatgtttccgcaaataccctatttcacacgcaaccgtgacggcggctatccaaacccactgctcaactacggctatgccatactccgcgccgtcatcgcacgtgcattggtcagcagcggcctattgcccactctcggcatccaccaccacaaccgctacaacgcctattgtctggccgacgacattatggagccctaccgcccttacgtcgacaatctggtggcacagacaatggacgaatatggcgacatcggagtcaccaccgacatcaaacgacggctactaaccatcccaaccatagaagtacgcatcgacgggcaacgcagtccccttatggtcgccgcaagccaaacaacagcctcgcttgcacgttgtttctctggcgagagccgcaaactggcttatcctgaaatgcagtgatggaccgtttcagtgaatatcgcattatgtggattctcgtcttcttcgacctgcccaccgacacaaagcgtgagcgcaaggccgcaggcgacttccgtaaacaactgctcaaagatggattcacaatgttccagttctccatctatgtgcgccattgcgccagccgtgaaaacgcagatgtccatctaaagcgtgtcaaagccatcctaccacaatatggacaagtcggtatgctgaccattaccgacaaacagtttgctggcattgagctgttcactgctcgcaaagagaccgagcccaacgcaccaggacaacagctcgaactcttttaggattacaaaaacaacctataaaaataggaaatcccgcctcgcaaggcaggatttcctactcaattgacatcgttaaagacattgagtttattgcttttacacaaatcgtgttgtttatcatcaatgtcaatgttctctttttaagcaattcacaactctgtatctcgttatcattagtatttgtggttgtttatcatcaatgtcaatgttctctttttaagcaattcacaacgcattgccagctgtgccatttcatcccactgttgtttatcatcaatgtcaatgttctctttttaagcaattcacaacgtgatggtccttctattcctctttcttctcgttgtttatcatcaatgtcaatgttctctttttaagcaattcacaacagcagcggcgaggtgctgaacgatgtggtgttgtttatcatcaatgtcaatgttctctttttaagcaattcacaaccaacttgggttgttaatgctgctgaggcttgttgtttatcatcaatgtcaatgttctctttttaagcaattcacaaccccttccttagttttgattattttgtccaggttgtttatcatcaatgtcaatgttctctttttaagcaattcacaacatgccagccagcacagccagcatcttgatagttgtttatcatcaatgtcaatgttctctttttaagcaattcacaaccaagagtgaaaggagaagttaaatgaaaacgttgtttatcatcaatgtcaatgttctctttttaagcaattcacaacaccacagatgctcaatttgctactcagaaagttgtttatcatcaatgtcaatgttctctttttaagcaattcacaacaattcgggcagtcgaaaggctgccctttatgttgtttatcatcaatgtcaatgttctctttttaagcaattcacaacgtattggtttatcgcctcatccagccgcctgttgtttatcatcaatgtcaatgttctctttttaagcaattcacaacttattgtagtggtattgttatatatagtaggttgtttatcatcaatgtcaatgttctctttttaagcaattcacaacagtgggagaactacgacaccaacgtccgcagttgtttatcatcaatgtcaatgttctctttttaagcaattcacaacaggggtcgggcatctccctgccccttttttgttgtttatcatcaatgtcaatgttctctttttaagcaattcacaacgcgatgtcgagtgatgcaaccatagtgagagttgtttatcatcaatgtcaatgttctctttttaagcaattcacaacgtgcctatttgtcaatgttattctgtctctgttgtttatcatcaatgtcaatgttctctttttaagcaattcacaaccacttacgaccacttacgaggtaggctgcgttgtttatcatcaatgtcaatgttctctttttaagcaattcacaacgtctctcaaaaatgattatttttgcatcggttgtttatcatcaatgtcaatgttctctttttaagcaattcacaacaggatgtgaacggcaaatactggttgctcggttgtttatcatcaatgtcaatgttctctttttaagcaattcacaacagcaatattgcaaaggtattgaagattctggttgtttatcatcaatgtcaatgttctctttttaagcaattcacaacaaatcccgttcgtaaacttgaggctcacgtgttgtttatcatcaatgtcaatgttctctttttaagcaattcacaacaaccaggcgttgttgccattgtactcaccggttgtttatcatcaatgtcaatgttctctttttaagcaattcacaacgcgtcgggatgctctggcttctcaaagcaagttgtttatcatcaatgtcaatgttctctttttaagcaattcacaacactactacggtatcaacatccacaagagccgttgtttatcatcaatgtcaatgttccctttttaagcaattcacaacaggtccatagtgaagaaaaaaaattgtcagtttaaaaaatagttgtatttttgcagccgattatgaacataccgaaacccatacagaaggcaatggaaagctggtgtgacgactacgccggccgcattgagtaccttggcgagtaccagggggaaggtgcttattgctatcattttgacgagcctgtcaatataggtttcccggttgtgtatttactcaattccgacggcaaagttgacgaaatcgatgcaccgaaatcgtttgaaataatcaactcacttgtcaaagatctcgacgaagtcggtgttgaatagcgttgtttatcatcaatgtcaatgttccctttttaagcaatttaaaaactatttttatcaattgcaaagatacattttttcacaccacctatcacttatagtttacactcccagcaccacttccgctggaatacccagtttgcggctgattttgcgcgcaaggggcaacgacggctctgtctttccacgcactatttcactgaaatgtggtgcagaaatgcctaacaattcagctgtggcactttgagaaagcttttcttcaaacattttctgacgaagagcgtccaccaatgacggcggttcaatcggacaatgttctttttcatactcttccacaaggtcggacagcaacaccaattcattcatattcggatcgtcactcggccactcgtcaccagttatgggaaggagttcatctatccttttcatcgctgccctatatgcagcctctgtctgtatctttgccataatatctatagtttttcaatatttttaattctgtcatattcagcgtgggttcctacaaaacgtatgtaaacgcggcccaccgtaaactttatcacaactacaagacgatgatcgttacccttaatattaaacacatagtgctgacctccaacttgcgacactgtggcgaagtcacgcctgatgtctgcaaaattcttccactcggccttttcagtcgttttgtaccaactccataaaggcatcgatgcatctggatgaaccctacaatactctcttacaataccttgtgatataatatgcatactgcttacctctaatatgacattgcaaagatacaaataatattttgtactacaaaataaaattacacaaatgtataacttctactttctcccccgataataattgtcgtctctgtattcggtttaagtcacagacaaaaaaaggcgacgaagaaatctcgcccccttagtagttttcacaacggaataatccttattgtgaattgcttaaaaagtattgcaaaaatacatattatttttgataccgcaaaatttattttatacattactaacaatcaaaaatttaccaaatagattatttattccaccacatatattgtgttaaaaaacccacatcttttcgaacgaatccttgatgccttcgtcgtagggggtcagttcctcgatgcagttgcaggcggggctgtagtagaaataggtgctgttggtgcctttggtgcggcacacatattccgatagcatcttctcaatatagagcgtggcgcactgggcgccgaagttccacgccagccggtaggcgtcgttaaccgttatgcggtcgaagtgcgtcttcatcgtcgccttgtcggtacgcagcgacgtgacggtgccgtgaaagtcctcggcaatctccctgttcttgaaataaacaatgtcggcggtgtcgcgtgcgtcgaagcggaaccatacattcatcgcgaagtggcgcaactcgtagtcgtagccatatttgacgccgcgctgcgtggtgaaaccgctgcggcccggctgcagatactcctcagcctccacctgcgcgatgtcgatggtgaagtgattgtcgtcggcttgcggcaagcggctcgcatcgtccaccagcacaatcggtatctttgtgcggctcagcacatagagaaacgccccgttgaactgggcaaggaaaatgctgtcgtccaggcggttcagtatcgccgtcttcgaggcgatgaccgaatcctgctcgcggtcggtcataaacataaagccggcaatgtcgttgagcgagctgttggtgtgtataaccgacttaggcagagaaacataaatctgttcggtagcattgtccttctgttgctcgaacttgctcagaaagcttccggcatagaaccagtcggccgagcagccggtcagcagcagggcaaaaagcgaggtgaatagtatggtcttcttcataaacaggcatttgatgaattgcagacctaaaacgcgacgcggctcaaattattgtatcaaaacgcctccctttttgcatccattttcgcaccccaccccgaccaaataccgaccctacaccctctcaaggctttatcaattaacaattattatgttaattttattatcttcctatcaagttctaccaatctgaaatttggtaagaacttggtaagaatttgggtagaacttggtaagaagatggtatatggaaatcagggtgttgggtgagagcaaaaattgacgtttttcggtttttttttactgccgaaatgttaaaattcaggggtggcggaggcgaccttggggcagaggcaaagggacgaggcgccccctccggcagggtgccggcggaggggcgcagaggcagacaatcgggcacagcgacagcaaaagatgaaaatattttcaccaatcatccaaagtttagtatttttgcaaaatgtgcagcatcgcagccaatcccgcaacaagctgcatattaacgacataaataatacaatataataaaataacacatcaaataatgaagaaaaagagtctgaaagaggaaattgtagcctatttgcttgtggcattgggcagtttgttgttcgccgtgggcgatgttatgtttgtcaatccctacaacctggctcctggcggtgtctacggtttggccaacgttttccacgctttgtggggctggaagatttcggttgccggtatctgtatggacatcccgttgctgattatcggcaccatcatccttggtccgcgtttcggcatcaagaccattgtgtctgtgatacttatcccgatcttcacctacattcttgaaatcacgtggggctacgctccgctgattcacgacggattgtacgacagcaacgaaggcctgctgagctatctgacctacaccgtcggacagggcgacgcagccatcgacaagttcttcattcccgacttcttcctcaacaccgttgtggccggcttgatctacggtgccgccatcggtgtcatcttccgcgccggcgccacctcgggcggcagcgacatcatctcgatgattatccacaagtacaccaagatttcgcttggcgtgctggtgcttatcgtcgacagctgcatctcgctgaccactctgattatcggcgacatccgtctgcctatatactctatcatcctgattttcatcgagagcaagattatcgacatcatcgtcgaaggtgtgacaacctacaagacggtgtttatcatcaccgacaaggtcgacgaggttaaagactacattctcaacgatttggagcgcggcggcacctgcttcccgggcatcggcctctatcagggccaggagcgtagaatgatctacgtcaccctcgaccgcaccgacctcgtcaagctgaaagccaatctgcgccatctcgacccgaacgcctttgtcaacgtcattgagagcgccgagattatgggcctcggtttcaaggctttgcctgaagaataatgtcaattgtgaatggtgattagtgattagtgaatagtgatttgtgaatggtgaaatgtgaagtgtgaagcaatcgcactcgaagttcacatttcacaattcaccaatcacatttcaccaatcacttttcaccaatcacttttcaccattcacacttcaccaatcacttttcacaattcacttttcacaattcacttttcaccattcacaattatctatgcacgtcctccagctctgctacaagcccccctacccgcccgttgacggcgggacgctggcgatgaacagcgtgacacagggacttatggcttcgggccacaaggtgaaggtgctaagtgtctgcagcgacaagcacccggtcaggagcgacgcattggaggcgcaatacaaggatgccaccggctttgaggccatctatatcgacctgtcgatacatccgctcgacgccgccgtgtcgctgctgtgcggcgagtcctacaacgtcaagcgtttcgtcagcaaggagttcgacgagcgcctgacggccatacttcagagcgaaagctttgacgttgtgcacattgagagcatattcctcgctccatacgttgccaccgtccgcaagcatagcgacgcaaaggtggtgttgcgggcccacaatgtcgagcaccgcatctggcggcagatagccaccgccacacgcaacccgttgaagcgctggtatctgaagaagctggcattggctttgagagcctacgagttggagcatatcaacgactttgacggcattgcctgcatcacggccaacgacgccgagacgttccgtggcgaaggctgccgcaagccgctggccgacatcccctttggcgtcgacatagagcccatcgacaacgtcgatgccgagccgcagacgctgtttcatatcggctcgatggattggcggcccaacgaggagggcatacgttggtttctgaaagaggtgtggccactgatacacaaggagatgcctgccgtaaggctgttccttgccggccgcaagatgcccgacgacctgatgcagatgcagagcgagggagtggtagttgtaggcgaggtgcccgacgctgcctatttcattgcctcaaaacagattaacatcgtccccttgatggccggcagcggcatcagggtaaagattatcgaggctatgtcgctcggcaagacggtagtgacgacaagcgtaggcgccgccggcatcgactacaccgacggcaaggagctgctcatcgccgacacaccgcaacagtttgtggagcaggtgcgccgctgcatcgacgaccccgaattgtgcagcagcataggtgccgccgcccgccgactgattctggacaaatacagcaacgaggccctgacacaaagacttgtgggtttctacaataaactgggcgccgtcgcgttatagcagaaaaacaaactgaaatgaacagaaagagatttttcatattagcaatgctgctgacagtggtatcgatggctgcggcacagatcaagattcccgagacaaacgtaagtttcgagttcccgtcgaatagttggaagtatctgcaaaccaacaagctaagcgacaacaccgtcatttatctgtattcatattcagccgactatgtgatagacagccaaggcgacaccacgctgccgtttatgcgcatctatgtccgcaagaactacgacggcaccgtctacgacctggcctacagccgctttatggtgcagccgttccagtcgctcgacgagactccgcacccgaacgggtcgcttgaatacctcggggcctacaccgacgaggaggacggcaaagactacgagttcagaatgttatacatcaaagaccgcaacaacatactcgaaataaggttggaatgcacggtggacaacttcgaggatttcgagaacgagtttgcggagatcatcaagtcggtcaaggtaaacaaatagcatccgatgagaaaaagcatcatacttctggcggcattggccctgagcatcgcggcaaaggcgcagggcgacgtgtcgcaatactcgcaccaatacgagaaactatacaaagcctacgtcaaagagcccgagaatgtggccaacaactatgcccttgccgccttttacgccgacacagcaaacccgatgcgcaactatgccacggcgatgaagtatatctgcaccgccgaggaacaatttgtgacaatacttgaagaccgcgacaagtacaaagaagtcaagcggttgctgaagaaaaacatcaacatccagctgctcagggaaacgaaactaagcatccgcatcaaggcaagagagtttctggacaaggaggagaccatctcggacgaaacccttgacagctacgcagatgcgttcaagaacgaccagggcgcgctgaggatggttgaataccgacgtatgggcaaccgctaccagcaggtctgtgcgacgaacacgctggaggcatataagagcttcatttccagctatccatccaccgccgagagcgaagaggccgaacgcaagatggctcaactggcagagaccgtagtggccggcgcacaacgcgagacagaggtggacagcctgcttgacggatatctggacatcgagaccatgaaagcggcggcacaacgcaaaaaaagtgctctggcatacgccgcactcatcgagaacccctcgcctcaggcatacaggtctttcttggccaaatatcctggcagcaacgaatactcgctggtgctcgacaagatggacgcccagcttcagaacgacttcaaccgcttgtcaacgcctcgtcagtatgccgactttatacacaacaaccctgacaacccgctggcggaagatgcactgaccaagctgaaacacctcatcaacgatgagcacaatatgcaggctctgcgtatctatcttgacgagttcccgcttgacgtgaactataacgacatctacctcacctactacaaatggcacaccgaggaaggcaacaa

SEQ ID NO: 1168 - DNA, 24467 bp, synthetic construct
  source 1..24467: mol_type = other DNA
  misc_feature 1..24467: note = Synthetic
tttgttggtatattggttggtgtgatacttatcgctatgtatttacctatgtttaagttgagtagtgttattggttaatcctttttattgaatcacatggtttgacatgtgaattaattattctttgagttataggatttagggttttgccattaactggattaatcctagggtaagtaaaataacttaaaacattattagttttatcataccaaacgattggtttgtcgtttctaaaaaatgtagtagtatcacagacttcaattttcttaaaatttagcatcgttattttgtcaaatggaacctcaaggggttcacccgaacaactaactctttcataatggttatttttccaaaccatacaatttccaaaatatctgttagcaaaatccaaatcataaaaaaagtatcccgaagttgaaatgactattatcccaataaaaggtatgattttttttagggggaagttttttttttgctctttgttactttctttaccgtatgaattggtttttttttctccttctaaatttgttgaaatctccaacacacttaaatctcctattttttcttttctatcttcttttgtggtgtaatcatactccttaaggaacttagtgtaaggtctgttttcataactaactaaagcagcaaccaaatccaatgctacatgcgatttaatatattcagattctccttttaagaatttagtaattgatttaaattttcctataccaaatccctcaatttctcttatataatttccattttctttaaagtcaaaaaatcgcttggcaacttcaaaatctgactttttttgatcacttattagttcaatacatgcacgcttcaacgaagcagcagtaggatttgataatagatcactaaattgagaattaccttgtaagtactttctttttatttccttattatatctttttattttcttgtcaatcattaataaacgtataggaacattctataaagcatgaatcttttggaatgttgtagaatttaaagaacctccggaatttacaactaatataagcaaaattcactcataaattcgcaatggaatcaggtcaagttgtgattagctaaacataacaaaaacaagaaattgattcttgcggaaaaccgtaatgtaatagataagtagttgccttgggaagtaattatagatcaattgcaatacactttccacttcccaaaaatgaaagttttttaacccttaaaagggatgttgattatctgaatagaaaaattggacggtcacccctttttgaaaaatttagaaattatgagaaaatttttatatgtatttgtagctctattgcttggagccaatttcgtgtcatgtacaccaacatcaataacagaaaattctgatgttcctcaagcatgttgtggtgaagaaggagaaatcctgcctccaccaccacctccaccacctccattgccaattggtggataatgtaatcaataactcataaatagttattattttagaggaatgaaaactaacagtacttcattcctctttttttgttttattgtcaaggctattttgtttatttgggtttcaaaagcctattctcaaaaagctgttgatagtttatattattatcataatgctataaatagccctgaagatgatcaagacttaatttcagcatacaatttttttaaaaaatataaagagcaaagtttaattgaaagagacactttaaaagcgatttacggtttaagatatattgcaagtattgaaagcacattaggatttccatatgaaagtgaaacaactgtattagaggctctcaatcttttaaatgaagtgagttcaaatgaagctaccattgaagcgagaattgggctttataatcatttagggattatatccaagggccttttgaactatgatgatgcattaaattactataataaggtcttaatgttagcacaaacacctcagcaaaaaagtatagttcacaataacaaatccattgtatataaggagttaaatcgatttgatttggctattgatgagctaattatggcatatgaaaacatcgagaagcttaataataaggtagagttagctagggctttagataatttaggtattacactatccaaaataaatgacccagatggcttagttaaaatgaatcaagcacttacgattaggattgaagaaaatgatactaaaggtctttattctagctataagcatttgactgaatactatttagagcgaaatagtaaaaaggaagcttcatatttcgcttctaaagcatatgatttagcaaaatctattaatagtacatcttatttagtagatgcattatcataccaaatgcgattaaatgatgacccaaaagtagttgaatacaaaaaactaattgatagtattaatttgagaaaacaattgagcgaaaataaatttgctctaaaaaagtttgactttgcacagtataaaagacaagctcaaataagcgaattaaattctcaaaaagaaaaggcaaatcgacaattttttcaggtcattttatgcctaattattgcgttagcagtagttgtttatttacttctaaaatcaaaatacagaaaagccaaacttcaagacgtctatgataccgaaacccgtatttcaaagaaagtacatgatgaagttgcaaatgatatgtttcaatttatgaccaaactacaaagtgaagagcatttaaatgataattatatagatgatctagagcgtatttataataaaacaagagatatttctaaagagcatagtttattggatatggaatgtgattttgaagatgttttaaatgatttgattttgagttacagcaattacgaaactaatattatggtcaatggtataaccgaaataaaatgggaaaatgtttcagaaataaaaagaacaactatttataaagtgttacaagaactattgataaatatgagaaaacatagtaagtcatctgttgttttatttatacttaaaaaagagagaaataagattttaattaattatagtgataatggggttggttgtgaattcaaaaaagggacaggcttacaaaatgtggaaaaccgtatcaaagcaattaatggaactattatttttgtgtctgaagccagtaaaggatttaaagtaaaaatggtggtataatgatgttcaaaaaagttttaattgttgatgatcatgatgatattaataatggtgttttaaatgtcttacatgattttgaaataaaaaacatatatatggctcaatattgtgacgatgcctttttaaaagtaaaaaaagccaatttagagaatgaaaactttgatttaatcattacagatttgtcatttaaaaaagattatcgagaatgcaaaattgaatctggagaaggattaatcgcaattattaaagaagaatatcctgaaacacctattattgtttattcaatggataatcgcttgcagaaagtacgtagtttaatcaataagtaccaaatcgatgcttatgtgtgtaaagacagaaatggctcagtagaattatctcaagctattaaatcggtatttgaaaagaagcaatttctttcaccccaagtttctaaggccttaagtccaaaaagtgatttagaaattgaagagtatgatattgagcttattaagcaactggcaaatgggttgtcacaagacgaaatcagtggactttttaaaaacaataataccactccaaatagcttaagctctatagaaaagcgccttaatagattgcgaatacagtttaaggccaataatgctatacatcttgtggcaattgttaaagatttgggattaatttaaaatagtaagggaaacagtaaggaaataataaaccataataataatattgctcaaagtatgttatttgttagttactgttatgggaaagttgaaatacacactattttagtgtgtattttgtgcttatggttttccgtaaggaaatggtttaggatagttttaagtttggataatattaatcttataaatttgaaacgatgggacaagcaaaatttgtaataaaaaaaagaattaacggagaattcatgttcaatttaaaagcgggcaatggagaaaccatagccacaagtgaaggttattcttctaaacaaggatgtaaagatggaatagaatcggttagaataaatgctccaaatgcagatattgatgatcaatcttaacaatcattagttatttataagtcagacaaaaatgccttacggaatcccgtaaggttttgttttttaatagggttaggtttgaatagttttaatttaaaaagaaaatattatggcagtaaaacatttgcaaacaggagaggttcataaagggcaaaaaggaggaactacaggttgtggttttgatactaatgaaaatccaagccattggacagatacaagtgaagcaataaattgtgataaaaatggatgtaaaaatcaataactatgacgaaacaaagaaaaacaagtaaaagtgttgcatcagcagcttcaaaagttttaaaagataaaagaacaagtaaagatagtaaaagagcagcaggtagtgctttgtctcaagcggcccctaaaaagaagaaataatgcataattttaaaatgaaaaaaaagcttacatattgatttttctatgttgcctcctgtacatcgcatcatgtgattcaagtagtgatgattcagattttgaatgtggaacacataatggcaacacactttatttaggacctcaaggaggttgctattattataacagtagtggtaataaaacctatgttgaaagatctgaatgcagttgttaagtatttgttatatgaaaacatcaacatttacatacaaaaccaaaccaatttcgattatatgtgccagtttgcttttcatcgcaatcttcaaacttccaatagagttttatatgattttaagaattgttgtttttataggtgctttgttggtgcttaactcgtttatagataaaagcgtgagttggactattgtttttggacttatagcaattttattcaatccaattgttccaatatatctatatgtaaaagactattggattccaatagatattgtatcaggaatagtgtttctaatgtctttaatttctaacaaaactaatgagaaggatgaagtgaaaaaagataataaaaccaaagaatttcaaagagataaaatttactaaatgtaatagaacaaatttagaatatggaaataataaatattaatactgaattaaaaagtcattttttgaggttatatcaaattgccctttcagatgaaaattttagtcatttagaaatgcaattattgtacaaatttgctgaagaacgggctatttcaaaaatagagcttgatgctattttaacggggtacgcaggagatgttatagtcccacaaactttagaaatgaaaatagaatatttatatgattttgcattgatgatatgggcagacgaagtggtaagtatagacgaagagataacacttaaaaaatatatcaaagtttttggttttatagaagaaaatattgatgaattatcggcatatcttttaagaagtgcaaaagagcacaagcctaaaaatgaaattcttgcggaacttaaagaataatgattatgggactattaaaacgacttactgaaatgacatctcaaaatgggaaagttaacactttagatcctccacagataattgagaaagctaagaaaacatatcatgaggatggatttataacctctaaagcctgtcagggccttgctcaaaatttagaggcctccttggataacatttatcaaaaatttgaaaatgattgcaaaattaattttaacgaacaagaaaagttaaagcagccatatatctctgaacaaaaagggaaaaggactgctttgttgaataaaacagaagaattagaaaaaatagaaaagaaaattgaaaagattgatgaagatatagaaaagttgaatcaggattgtaggaaagtccgaaccaacccagaagactatttgattgatgtggacaaaagagcttcagccaaattttggattgggataagttttctaattcctttggctatttacatttttattttctacatatcaacttcgtattcagctttttttagagaatttaaccttggtaatggttttgttgaagggatgttttatccacaagctttaacaaacgcttattctgatggaattcttgagcttggctttatcttattcattccgtttgtgttttttggactagggtatcttgtgcatatgtttcaggaaaaaaagggaattactaacaaatttaaaatagcaatgctctacttaattacatttctgtttgatgctattttggcttatctcattgatgagaaattatacaatctcaataaaacctttgatagcgaaccattcaatattgcaattgcatctcaaagtgtaagcttttgggtcatcatttttgcagggttcgtatcctacattgtttggggattggtgtttgattttgtaatgaaagaacatgctgatagagacaaagtcaaatcgtttattcaatccaaaaaagaagagattctttcaaaagaaaagacgttgcaaaaaatcaatgagactattgataaaattgaagaagagatgtcaaatttaaaagtgcgtatttctgtacttcaaaatataatagatggttttatacttccggtaatgaactacaaagctttgtctacagaatattttcaaggttggcagcaatatattgccgcagaattacgactaggaagagaggaacaagataaagctctattagaatgtcgtgaggtttacaacaaacacattaagagtttagaattagataccgattcttaccaaaacaaggtatataccaaaacattgtaattatggaagctactaaacgtatttctttaagcatttttaccattgtttttatcttaattatgagttgtaaagaggataagaaagaggctgaaattttaattgaagagccaatacattcatctgaacagtcagaggggtgcccatcatatatattaaaagaaaaaaagaacaatctcaatataagtgtattgctagacttgtcagatagaattgaaaagcttaaaactagagaaaaagattcttcttatttagcaagtttatcccaaacatttgtagagcatgtgaaaaagaaaaagctgattcttttagaggataaaatgcaattattttttaatcctgaaccttctgatgaaaagattaataaaattgccgaaaaattaaaaatctcatttacaaaagacacaccaaaaccatacatagaacaaacactaggtctttatgctgaaaaaccttcagaattgtatgaattagcaattgatgatgcagaaatagctaaaaactaccctggctctgatatttggcgattttttaaagataatgttaaagattattgtattgatgaatgtcatcggaacatattggtcattttaaccgatggatatatgtattatgaaggttcaattatgaatgataaaaacagaacttcgtatttaacacccaagagtttagatcaattgaaattgaatacggcaaattgggaagatgaattgagaaaaagagatttaggttttattccagcaactgctgacttatcagatttggaggtgttggttataggaatttcaaatcaaaatgaaaacaatccgtattcacaagacattattgaaacttattggagtaattggcttgaggaaatgggcgtgaaaagatacaaagtcaaaaacgctgatcttccatcaagtatagaaaaagtgatatcagacttcatacttaaaatttagtagatatgggattaagattcaataagcgtattaatttaggtaaaggattgggagtgaatgtgagtaagtcgggcatcacgccaagttacagaactaaaagaggctctttaagttcaaaaggatattcagttagaactggaattccgggtattacctataggagaacatatagtaaatcgaaaaacaagggttgcttgctaattttaatattctttgtgcttataagctcaattttgacaattacttcttgtaaaagtgaaacattaaagtccgtaaatcaacggtatcaaggaggtgttttacataagtctaaaattactgattggaaaaatgccacggaagaaaataagttagctacctgtggaggttattgtgcaagtatctataaggatgattcttatattgaaaaacattaaaaactatgagtttattcaataaattattaggaaatgctagtgaagtttctactgaaaagttaaaagaaaaatatggaagacttctcatatcgaatgaacaaattgagcttgggtttgccttatttagagatgtatttatgtttactaataaacgtttaatccttatcgatgtccaagggcttactggttcaaaaattgagtataagtcaatgccatataaaagtatatcaagattttcacttgagacttctggaacttttgatctggatgcagagttgaagatttggatttcaagtgaaaacattcctacggttagcaaaaagtttaataaaagcattaatgtttacgaagtccaacaatatttagctgaaaaagtaatgtaagaatgaagtatttcagaaaaaccatttgttgctttactttattaatcacatttctttccaattcccaaacacttacgggaaaagtagttggcatcatggatggtgacacctttaaactattaaaaagtgattcaactactgtgaatgtgagattagcaaacatagactgcccagaaaaaaaacagccattctccgaaaaggccaagcagtttacctctgatgcaatttttggaaaaacagtgactataaaaattttaaaaacagatcgatataatcgttatattagtaatgtcatctataacgactctttgagtttatgtcatgaattagtaaaatatggtttggcctggcattatttaaaatattctaaagatgaaacattacaaacattagaagatgaggcaaaacgaaaaaagattggactctggcaagagccgagccctatcgccccatgggattggcgtagttcaaaaaagaagagaaaacagtaatccaaaaatgaactttataaaagttgtcatattcattttttgtctttcgtatgcttgtgatatgcctgcgcagaatgtttatgtcacaaaaacaggcacaaaatatcataaagaaacttgtcattttttaaaaaactcaaaaaaagaaatcacctacgagaaagctattgaacgtggttttgatgcttgttcagtttgtaaacccagaaaagaagttagtgattctcaatcaatatcatcggaaaactcactaacaaccacaaacagaaacacaacttctactcaatgtttgggtaaaacaaaatcaggggcacgttgtaagcgaatggcaaagagtactagcggtaaatgctaccagcattagtggtataaaataaacggcttaagttataaattctatagttatggataaggtttttgattattatgtctatttataccattcaagtataatgaagcgtaatgatgatacacaattttgagtttggttttatttatataatattgagtacttaaattgtcagagcatttttagcttcagttgttttaggaattcgattagattatttaatattgctttatatgaattttacatcgactgagttattttaaaaaattgattttctgtattaaacacaaaaatccgtttaaagtttttaaataaaaatgccccgaattagaagtcgaggcggcttaaatgttttcacaacggaataatccttattgtgaattgctttcaaaattgtatagctaatatataataaaataattaaaagaggttacggtttaccataaagaaattgtaaatcatcattatatattgtgaaatatttaaaaatatgaaaaaaatattaggactggatttagggacaaacagtattggttgggcattggttgaaaatgatttttcaaaaaaagaaggcttaataaaaggtttaggcagtcgcataataccaatgagtcaagatgtactagggaaatttgattctggagtttcaatatctcaaacggctgaacgtacaggttataggggagttcgaagattaattcagcgaaatttgttacgcagagaacgcttgcatagagttttaaatattttagattttttgccaagacattatgcgaattccattgattttgaaaagagattaggtcagtttaaaggtgattcagaagtgaaacttaactatcgtaaaaataaaaaaggaaaacatgagtttgtttttatggattcatttaacgaaatggttgaagaatttaagttgagccaaccatatatattttataataaaaaaaatggagaggaaactaaaattccttatgactggacaatttattatctacgaaaaaaagcactatcccaaaaaatacagaaagaagagttagcgtggattattatcaactttaatcaaaaaagaggatattatcaattaagaggagaagaagaggagttgtcttcagataaaacaaaagaatacttttcgttaaatgtagaaaaggttattgactcaggggaaacaattaaaaaaggtggagagaagttatatgatgtttttttctctaatgggtggaagtacgataaacaagttgtgaaaactgaaaaatggataggaaaaagcaaagaatttatagtaacaacatctacaatgaaagatggtagtattaaaaggacatataaagctgtaaattcagaagaggattggattgccattaaaaagaaaacagaacaagatatagataattcaaacaaaacggttgggcaatatatttatggagcccttttgcaaagtccaaaacagaaaatacggggaaaacttgtaaaaacaattgaaagaaagttttataaagaagaatttaagaaaataataaaagaacaaataaaacaccatccagaattacaaaatgaagtgttgtacgacttgtgtgttcaagagctatatccaagaaacgaagcacatcaacagaatattaaaaacaaagattttgagtatttgtttacagatgatattattttttaccaaagacctttgaaaagtaaaaaatctactatttctggatgtcaatacgaaacaaggtcatttaagaaaaagataattgataaggttactaatgaagaaaaggaaatttggcacaaagaacctttaaaaggtatttcaaaatcacatcctctatttcaggaatttagattatggcaatttctaaaaaacctaaaaatctatcaaaaagaagatgaaaacggaaatttgatagatcaagaaattacaaccgaccttttgcagacccaagaagattgggtagagttgttcgattttttaaatacaaaaaaggaggtcgagcaaaaacaaatcattcagttttttgtcgataaaaaattaatagataaaaaacagaaagacaattatcgttggaattatgtagaagataaaaaatacccttgcaatgagactaaagctcaatttatatcgagattaaaaaaagttaaaaatattgatgttgatacatttttaactatagaaagcgaactcaaactttggcatattatctattcggtaaaagataaaaatgaatatgagcaagctattaggaatttttcaatcaaaaacagtatagatgtagaatcatttgttgaaaattttaaaagatttccgccatttaaaaatgattatgcagcgtattcagaaaaagccattaaaaagatattgcctttaatgcgtatgggtaaatattggaatgaatttgcaataaagcaagaagttaaaaatagaattttcgatataatagaacgattaaaaaccattgattttgatataaataaaattgataaaagtgttgcagatgatgatataccaaaacaattattaaaaagttttatagattttaaagataaaaaccctttacaaggccttaatacatatcaagcgtgttatttagtatataaccgtcattccgaagcaaataacataacacgttggaaaacgctagaggatataaacaagtatttgaatgcgtttaaacaacatagtttgcgtaatccaattgtagaacaagtggttacagaaaccttaaggacagtaagggatatttggcaacattatggaaaaggcgaagaaaatttctttgatgaaattcatgtggaattaggacgggaaatgaaaaaccctgccaaagcaagagagtcattgactaaaagagttaccgaaaatgaaaacaccaaccatagaatcaaagaaatactaaaggaattacaaaacgaaggtgttgcagaagtaaaaccatattcaccaagtcagcaagaaattttaaaaatttacgaagaaggcatttatcaaagtttagaaacggttgatgataccattgaaaaaataagaaaaaacaattctccaacaaaaagagacatcacaaaatataaattgtggttagaacaaggttatatttctccttacacgggaaaaaccatccctatgagtagattgtttactacagactaccaaattgaacatgttattcctcaatcccgttattttgatgattctttaagcaataaaataatttgcgaaagtgaggtaaatcaattaaaagacaaccaaactgcctatgagtttattagaaaccatggaacagaaaaagttgatttaggagcaggtaaaacggttgaggtctttacattagagcaatatgaaaaccattgtaatcaatattttaaaaagaataaacccaaacttaaaaaattattaagtgaggacattcccgaagggtttatacaacgacaattaaatgatagtaggtacataagcaaattaatcaaaggtttattgggtaatttggtaagagaagagaacgaacaggaagcgacgtctaaacacatagtgccggtaacaggtgctattacttcaaaattaaggcaagattggggattgaatgataaatggaatgagttggtcgcaccaagattccagcgtttaaatgcaataactaattctgatggctttggatattgggatgagaaaataaatgcatttagaacccaagtaccagacgaaatctcaaaaggatttagtaaaaagcgaatagaccataggcatcatgctttagatgcattagtcattgcatgttgcacgaagaaacataccaattatttgaatgctttaaatgctgaaaataagaattatggattacgggattcgctattaataaagaatgagaatgggcattatacaaaatattttcaacttccttggaacaacttcccgactgaagctaaatctgtattagaaaaaaccattattagttttaaacagaatactagagtcatcaataagacaaataacaaaacatggcaatggattgaaaaggatggacaacttaaaaaaatattggtaaaacaaaccaaaggcaataattgggcgattagaaagccaatgcacgaagaaacagtatctgggattgtaaacttagcttgggtaggaactaaaaagggaaacattaccacagctacacgtaaaactgttgataaaacttttaccttaagtaaaatcgaaaaaattactgatactggcattcaaaaaatcctcagtaattacttaaaacaagaaaaatttaaagaattgaatagcaaaggtgaaatgtcatataattccgatttggcattttcgcctgaaggaatagagtatttgaacaaaaatataaaaaaattcaatgaaggaaaatcacatcaaccaatttttaaagttcgaatttatgaaaatggaagtggtagatttaaattaggagaagggggtgataaaaaaggtaagtatgttcagggagctcctaacttatttttcgctatttattgggatgaaaacaataaaaagcgaatctatgaaaccattccactaaatgagattattgaacatcaaaagcaaatagccaatttgcctaaaaatgaacgtacctctgttccaattaaccatactaaaggacagttcttgttttcgttatcacctaatgatttggtatatgtgccgtcagatgaagaaattgataatcctacattagttgattttaataacttaactaatgaacaggtagaatctttgtataatgtaaatgatttttcttctacaacatgctatttcactccaaatcccttagcaaaagcaataagagagaaagaagttgatatgagttttaatgaaaagaaaagaaaaatcacaggctcattcgatactaaaacagcaagtttaaatggtgtacagataaaagatatttgcatcaagcttgaagttgatagattagggaatatcataaatatcaaaaatgattaaacgcaccttatttttcagtaaccctgcctatttaagcaccaagaaccaacagttggtaatcaattatccagaagcggatacgccaactaaaacgatacctattgaagatattggcatggtagtactggaaaatcaacaaataaccataagtaatggtttgctatcaagactgatacaaaacaatgcggctgttataagttgtgatggatatcatttaccaattagtctgttacagcctttggtggggcatagtgaacagaccgaacggatgcgccatcaattaaatgccagtatgccgttaaagaaaaatttgtggcagcaaaccattagtgccaaaatacagaaccaagccaattttatggataatcaaggcattcccgcacgaaaaatgcacaaatgggtaaatgaagttaaaagtggggataccgaaaaccacgaaagtagggcagcagtatattattggcaacacatttttggtatagaaaactttaccagagggcaaaaagaagcacctcccaataacttattgaattatggttatgccatattacggggcattacagcacgcgccttagtaagtagtggcatgctgccatcggtaggagtttttcatagaaacaaatacaatgcattttgtttggcagatgatattatggaaccttatcgggtatatgtagatgtgttggtgaatgatatggtgcaattaaataaagattatgaaacgttaacaacagatttaaaaacccatttattgcaactcccagttatagatgtggtaatagatggaaacaaaagccccttaatggtagctatgagtagaaccaccaatagtttgtatgagtgttttgcagggattagtagaaaggtgttgtatcctgtttttgaatgatgttataataagcgaaaatacaactgaaacaactttaaaatagtaacgtcactacgagcgacatttaatgaagcgaggcctggcagtcttattaattgaaattcttattcatgagattgccgcgaccttagggtctcacaatgacataccgtaattatgagcaatcatttttcaagattaaaccagtatagaagcatgtgggtacttgtattttttgatttgccaacagaaacggctaccgatagacagcgagccaccaagtttagaaaaaatttgttggacgatgggtttactatgtttcagtttagtatctacatgcggttttgtgccagtagtgaaaatgccgaagtccatgccaagcgtgttaaaaaaagtttaccagaatatgggaaagtaggtgtgatgcaaatcaccgataaacaatttggaatgatgcagctcttttatgggcagaaacctgccgaactggaaacgccatcccaacaacttgaattgttttaagcctaatctgtctgctgtccagtcaagatagtaatccgggttgttccagaatttattcatcttagaaacgaaaatgtcaggtcgagcgtagtcgcgacctcatttaaaggtatagattttaaattctaacaaatcacttaacatgcagtatatcaatttaataagtattgatatactgcgaatgctaagtaaaaatacaattctgaaagcaattcacaacaggtctagtatttggctttcctttgtttttactgcgaatgctaagtaaaaatacaattctgaaagcaattcacaaccaaacggcaatccaacacttattgagcatactgcgaatgctaagtaaaaatacaattctgaaagcaattcacaactcaatcatgactattgtttttttaggtttaactgcgaatgctaagtaaaaatacaattctgaaagcaattcacaacacttagggagtgtgtctgggaagggctcaaactgcgaatgctaagtaaaaatacaattctgaaagcaattcacaactacaatatgtttcttattccaaaactcaaaactgcgaatgctaagtaaaaatacaattctgaaagcaattcacaacaacaactatctttttgaaatttgtatgaagactgcgaatgctaagtaaaaatacaattctgaaagcaattcacaacacaaccataaacattaagttgttaccgtttactgcgaatgctaagtaaaaatacaattctgaaagcaattcacaacacattatagttcacttatcagaatatcgtcactgcgaatgctaagtaaaaatacaattctgaaagcaattcacaacggaggtaataatgtgcataatttaatccttactgcgaatgctaagtaaaaatacaattctgaaagcaattcacaactacttgtttctttataatgttgaacaattgactgcgaatgctaagtaaaaatacaattctgaaagcaattcacaacaaaatctttgtcacgtccagttactgtaacactgcgaatgctaagtaaaaatacaattctgaaagcaattcacaacacagtaggtaagttccaaaactgaccatgtactgcgaatgctaagtaaaaatacaattctgaaagcaattcacaacagttggtcttgtctctctttttcctccttactgcgaatgctaagtaaaaatacaattctgaaagcaattcacaaccaatagaaacagaaacagaaagattttaaaactgcgaatgctaagtaaaaatacaattctgaaagcaattcacaactaatagaatctacatatacagcaaatttttactgcgaatgctaagtaaaaatacaattctgaaagcaattcacaacgacttgatcaacttttataactgtgaggtactgcgaatgctaagtaaaaatacaattctgaaagcaattcacaactggtttagggaaattatgatttgggttttgactgcgaatgctaagtaaaaatacaattctgaaagcaattcacaacccggtcgtcgtacttcttccactttagcggactgcgaatgctaagtaaaaatacaattctgaaagcaattcacaactaaaatattctgctatgttttcagcagtagactgcgaatgctaagtaaaaatacaattctgaaagcaattcacaacttacctcctaaagttcttgtttttattagtactgcgaatgctaagtaaaaatacaattctgaaagcaattcacaacgaaagtgttactgttccttctggtgcaaaactgcgaatgctaagtaaaaatacaattctgaaagcaattcacaacttagggattaatgcagcacctaacaataaactgcgaatgctaagtaaaaatacaattctgaaagcaattcacaacatatcctcaacagatagcgaccaagcgcatactgcgaatgctaagtaaaaatacaattctgaaagcaattcacaacttccactacttgcaagggtctgttaatgtaactgcgaatgctaagtaaaaatacaattctgaaagcaattcacaacaagtgtgtacaataggtcgataacatacagactgcgaatgctaagtaaaaatacaattctgaaagcaattcacaacactttggagcgttcactcaaagcatcttttactgcgaatgctaagtaaaaatacaattctgaaagcaattcacaacacgcaatgcgttacttgtatttgattttgactgcgaatgctaagtaaaaatacaattctgaaagcaattcacaacggcatccagagttaagcgccaataactttaactgcgaatgctaagtaaaaatacaattctgaaagcaattcacaacagatatgagctcgccaaaaggaacgtatcgactgcgaatgctaagtaaaaatacaattctgaaagcaattcacaactggcttcagctgctgttaattgtttttccaactgcgaatgctaagtaaaaatacaattctgaaagcaattcacaacatctaaaacatcatagttgctatttttaagactgcgaatgctaagtaaaaatacaattctgaaagcaattcacaacctgggtacgaacttcagttagataaaaaaaactgcgaatgctaagtaaaaatacaattctgaaagcaattcacaacacctctccaacttgaattggatcgtctttaactgcgaatgctaagtaaaaatacaattctgaaagcaattcacaacttacctatttctacggctatttttggtaagactgcgaatgctaagtaaaaatacaattctgaaagcaattcacaacccattttgccatttcgttaatagctactttactgcgaatgctaagtaaaaatacaattctgaaagcaattcacaactcaagctctgaaatgtgtgtttgattgttaactgcgaatgctaagtaaaaatacaattctgaaagcaattcacaacctgtttcttttttgtgttattttgttacaaactgcgaatgctaagtaaaaatacaattctgaaagcaattcacaactgtgactcgaatatatatacatcatattctactgcgaatgccaagtaaaaatataatttcgtttaaaatttcaataaagttaaatattagtttgttgcgtagagatgattgaagttattaatgttataaaagatttttgaaaaaatctaaattctggttcaagaataggtcaatgttgtgtacaaggcctgttaatttaatgattagcaggtttttttatttacatcctcttaatcacgtgagttacaataccccaaatttgaaaattattatcttcagtaacctgtattggctcataagcaggatttgctggtagtaaaaacactccttctttagtaacctgtaagcgttttactgtaaattcgccatcaataaaacaaacagcaatcttgttgtgctctggttctaaacttttatctacaactaataaatcaccatcgtctaaaccagcaccaatcattgattgcccacttaccttggcataaaaagtagcttctttattttttactaaaactctatctaaacttattttattatctctaaagtcgtcagctggagaaggaaaaccagccgaaataccagtttgcgctaaaacaatgtctaaactttgagtttcgtctggagtataaaactctaaagcatgttttggagtgaaaaattttaatgacattttacagtaagtatttcgttaatattggttgtatattttaaagataggcgttcttgacgcattttccaagtgcgttctaaatcttgatttcctaattttatttttgctgcttcgtatttatgatttatagcgtcaatacgttgcattaatggtttgtgttttgggttttcatgctgaaacaaattgagttgatgattgtcggttggcaccaaacctgtaacaataactccagcacgtttatatttaataccttctttaaatattgaagctactgcttttactgcacaatcgcttataattaatgatgagtctgtggcataagggagacttatggtcctgctggttttatgttgaggtaaatcttttttatgtctatcgctacttaatagcactataataacatggcagctagagccttgctttcttaatttttcggcacagctagtagcaaaggtagatacgcgctctttaatattttctaaatcggaatacgtgtactcaaaactacgtgttgttgcaatagaacgcttaggttctttatagtctagttctaaagttgggataccttcaagatcttttttaagtttccactctgtgattgaaaaattattacgaatccaatcatcagaaagctgaataaaatcgtaagctgttttacaatttttggctttcagccgtttttgtaaaccatagccaattccccaaacatcttcaacttttaaccactttaaagcttttattcgtttttcttcagaatctataacatacacaccattagtttgtttcggaaatttgcgagctattttattagccactttagatagcgctttggttggcgcaataccaacacaagtaggtattcctgtccacttgagaatgcgttgtcgcatttgaagaccataatcgtttaagttataattttcaaatcctttaaattgtaaaaaagcttcgtctatactataaacctcaacatctggagtaaactgatttagaatagtcattacacgttcgctcatatcgccatatagcgagtagttagacgaaaacacactaatattatgctgtttaaaaaacgcttcgtacttaaaagcaggcgctcccataggcaagcctaaagctttagcttcatcactacgcgaaataacacaaccatcattattagacaaaacagcaataggcttattgtttaattgtggctgaaaaacgcgctcgcaagacgcataaaaattattacaatctactagtgcaaacatgtgtataaaattagcctaaaagcattaataattataatttttagccataatgaatgtgttaaaatttattttgacaaatggttataaatcgtaactttgactcaacccaaataataaacttatgttcgatacttttttgcctcacatacaacatggcatgtatcacgtgcttaacgtaaatgcctacgaccacattttatttttaattgtgctatgccttccttatttgtttaaggactggaagagagtattactactagttactgtttttactataggtcattcattatcattgcttttagcaacgtttaatattataagagttaatattcagttggtagagttattaataccaattacaattttaattatagccttatacaatgtgtttacagcaggaaaaaaggcacaaaacgaaaaggctggtattttgttttttaccacattgtttttcgggttagtacatggtttaggttatttatctgcatttgaatcgttattaactaaaacggataataaatttataacccttttagaaatatcgttaggtattgagattggtcagcttattgttgcttttattgtcatttttataggatttatttgccagactctttttagattttctaaacgtgattgggtaatgataatttcggcagttgttgttggattactaataccaatgcttattaacagtaggttattttcttgaatactgtatttttgataaaattttaactcataattgtaaaaattaaaatactaacctactatattcgttatatagttctgcgttaaagattgaggtattgttgaagctcatttattttaaaaataaatagcgactaccgaaagcttgttttatttttattaaaaaataaaaacgcccaaaacattaaattttaatgccaaaaaagaaacaattacgatacgacaaagcctatttaagaatggcagaggaatggggaaaattatctcattgtaagcgcaaacaagtaggtgctattattgttaaagatagaatgattatttctgatggatataatggcactccaacaggttttgaaaactattgtgaagatgatgaaggttacacaaaatggtatgtattacatgccgaagctaatgctattttaaaagttgcagcatcaacacaatcgtgtaaaggtgctacgctatatattacattatcaccttgtaaagagtgtagtaaattaatacatcaagctggaattataagagttgtttatagagaaggttataaagacaattctggattacaatttttagagaaagcaggaatagatttgcaattaattgaagatttagactcataatgggttttcaaaaaaaatacataccactaattactggagttgcagttgcggcaggtgtttttattggtggaaaactaaattttacagatacttcagacaggctttttacctcaaatagtaaaaaggataaacttaacagacttatagattatattgattatgagtatgttgatgatgttaatacagatagcattgtcgatgttaccgtgaatggtattttaagtaatcttgatcctcattccacttatatacctaaaagtgaattgcaacgtgttacagaaaacatgaaaggtgattttgtaggtataggcgttagcttttatacgtatagagatacaattactgtaattagaccaactgaaggtggtccaagcgaaaaagcaggaataaaaagtggcgacagaattattgtagccgatggcgattcaatttttggaagacaatggagtaacgaggcaattattaagaaacttaaaggggaaaaagactctaaaattaacctaaaagtatatcgaaaaggacaaaaaaaactgctcgattttactgtaaaacgatcagatataccaataaaaagtgtgattgctgcttatatgcttacgtcagatcttggatatattaagattaatcgttttgcagaatctacctataaagaatttaaaaaggcgttagaccaacttcaaaatcaaggtgcaacaaaactggctttagacttaagagacaatccaggtggttttttagggattgcagagcaaatagttgatgaatttttagaagacgataagcttattttgtttacaaaaaacaaatctggtaaagtcgaaaaaagctttgcaacacgcaaaggtgattttgaagaaggtgaagtttttatacttataaatgaaaattctgcatcagcgagcgagattgttgctggagcattgcaagataatgacaaaggcactattgttggcagacgtagttatggtaaaggtcttgtacaacgagaaatggctttgggtgatgggagtgctgttagattaacagtgtctcgttactatacaccaacaggacgatctatacaaagaccatatagtaatggagataatgacaattattataaagattattataagcgcgaacgtaatggcgaattaaacgattataacagtataaaggttgcagattcattaagatttactacgccaaaagggaaggttgtatatggaggaggaggtattattcctgatatttttgtgcctttagacactagtatacaaaatgaaactttaagctacattcaacgtagtggctatattagttattttgtttttgaagagttagataaagacagaaaagtatatgagaatgtcactcaaaaagactttataaataattttataattagtgacgatgttgttattaagtttcaggattatttaaaccttaaagaaaatgcaaatgtcacatttgtagcttaccatgatgaaatgaaaaagttaataaaagcagctttggcagatcagttatatggcagaaatgtttacgaagaaattataaattccaatgatgatatgattgaagaagtaataaagttaagccaggaatgataatttaaactttatcgtgtacttgagcatcttttccatcattccacagcgttaaaatatctgtagcaacttgtgctccgctaccagaagcaatagcaaactggcttcgccaaccagctaaagtgccagcaacatacaatccgttttcaattaaatgattgttgttttttagccaaatacgttctttttctgcaactgctctaggatgagattctatatgtttttctagtccttttattgttagcaaattagtataacctactgcaattacaacaagttttgaggtgtgagttgttttattagtaaccactttaaaaccttcggtagttttaattatttcagaaaccttttcatcatttatttgctcaacatgaggatacaaatctgtgagctgttttataccactttctaaaatagattgtcctgtagtgccaggagccaaccctaaaacattattaaacaaagcgctttgtaaatgagatgttcgctgatgtgcaataatgccaatatgcttatgttctgcataaggtttatttttagcagaacctagtactaatgcacaagacatgccagctgcaccaccaccaattattagcgcatcaaacattagttattattacgttttgatagttgctctatacgtttagaggttcttaaaatttgcattaaaataataacacaaagtgaagctacaatagttataattgcaataatgctttcgccttcaaaaagggc

SEQ ID NO: 1169 - DNA, 24467 bp, synthetic construct
  misc_feature 1..24467: note = Synthetic
  source 1..24467: mol_type = other DNA
cggcgaacccgccaccccaactggcaagcactgcttggaaccctacgcctgcccctaccagcactactgcgcccaaggcatccgccaactggcccttttttagcccaagactcctctacccaaccatccagccactgcttccttatattttctcaggctgccgcttttcatgatggccttgtattgctttcggtccaacaactcggtttgatactcccaaaaggcatgcagccgtgccagaatctggctgtcgccctgcaacaccgtgcaggcatgttcgtataccctcgtgtgcatctcgcgcaccacctcctgcggctccttaccgcacagcatccatggccgtgccaacagcccgcgccctatcatcacccctttcagcataggccaccgctgcatcactgccgccacatcctcctccgaaagcaggtcaccgttatacaccacacgttgcccacacgcctccacaaaccgtccgaaggactcacaatccggcacgcccttgtactgctgtttgcccaagcggggatgcatcgtcacatgctccaacggcatctcattcagtataggcaccagccgcatgcactcttctgcatcctcctgccctaaacgcatcttgaccgagaagcgcacgtctctccgctgtctcatctcctcgccaatggccgccacacgctcctcatcggccagcaatccgctgcccctgccggccttcacctgcatggggaaggggcatcccatgttcaggtccacccgtcgccaccctgccgactgcacggcatcgcacagccgcgcaaactcttcacggtcgcgggctatcacctgcggcacggtaggcacaccgtcgttccgccctgaatcgatatcacgcagatccttgcggcggggctcgccgccctccaatcgtacaaagggagtgtagtactcgtccacccctcctgccacctcgcagtgggcgcggcggtagacgcagtctgtatagccctgcaacggcgcaaaggcaacaaaaggcttctccttatcccccatgtcagaacgaatagcgcacatgcagcaacacctgccaggccgagagcagattgttgtatacattccatttcggggctgtgaaggtgtacttcccctctttgaactgcaggatggtctgactggtgatctgcttgtaggtgccccactcgctgttgagcatgttggccacgttgttgatgtcggcgcccacctccagcgtggtgcgctggccgtggatgtcaaaatagaactgctggcacactttcaggtccaacctgttgtgccaaggggcacgcatggcaccccgcatggtgtactcgccgcggtggcggctcaggtaacggtcgttggctataaattggcggtattcctcgcggttctcgtccgtcacaaaaggcattccggccagctcctcctcggtaggcacatacaacagccgcgaggcattgatgccacccacattgttcatcaagtacgacattcccgacatggctatatcattcaccatccccacatggtagccctcatagaagagacccacgtgcgtggcggtgcggcgtccctcatagatggtgtaattggcggaggctatcagcctgtgcggtgccacaaaagcggtatagcccagctcaggcctgttgtcgccgtgtacggtgctggtctgcgtgagcgtatagacggcatcgccgccattctccaacaccgacagcgacgagctgtaggtgtaggccgccatcacatccaacccgaagccgaaatgcttctgcagctgtgccaccacggagaggtaacgcccgtgcagcccttcggcgttgtgcaagtggtagccatagatgccattggcgcagtcctcagccttataggccacacgcccatgctcctcgccgggcagccgcagcgaatcggtcggcacatagcccagcatcgtggccattacctcgtggtagttgtaggagaggattccctccacgctgcctcgcacgccccacggcagtcgggcatccactgccagcgagctcttccagctggtgggcatccgcaagttcttgtccaatattacaggcgacgagggaagccctgccctctcaccctgcggcacactgttgataatctcttcgcgagtggggctgaacggcaaaaccgggttctgggtctgagggtttgccacatattggttcaacatcacgttcgagctggacagggcattcaccaaccacacattgggtatgcggccagtgaagaggcctgtgccgccgcgcaccacaaccttgcggtcgcgggtcacgtcccagttgaagcccacacggggcgacacgttcacccgcacccgcggcatgtcgccggggtccagccctgcaaaggtgctttcgggacgctcggccacaaactgcgtgaacgccgcattgtggttgtcgttggcaaaacggataatgggtgcctccaaccgcagtcccgccgtcaacttgaagaaacggctgaactccatctcgtcctgcacatagaccgatggctgaagaaagttgaacacatactccggcaaggacagacggtcctcttggttggcgtaggccaccatggagagcaccggggcgcggtggttgacaaaactgctccacgagtcgaacacaaaccagccggcaccgccgggcatgaacacattgcgtatgttgctgtgctcaaactgcactcccgccagcagtgtatggaggtcggcggtgtaggtcaactcgtcggtgacgttaaaggtgccgaccttgttggccgtcatataggttgaggggtcgagcccaaaggtggtgtagagggcgtaaccccggctgccgtccttggcggtataaggctccaggatgtccaccgtggggaaatagtcgccatagtggccgcgcggctcgttctgataggaccacgtggcacgcagcacattgctcccgcgcccatcccacagacggctgtccaactcagcagccaccgacgagaagtcctgattctttgtaaatcgtgccgactggaacatcagcgcatagtccgacaaacggccctcggaatagcggttgaaggtataactctctccgtcgagcataaacgacgtgttcgagccgccgaggccgctcatggagttggaggcttcggaggtggtggtgtgcgtgtggctgaaacggatattgaaatggttgttgctgtccacaatccagtcaagacgggccagcagcttatagtccgacgcattgacggagtagttctgatactgaccgggatcatagccatattcatccatcaggtaccggcgtatgctgtccatgcggcccaccgtgggacggttgtacccgttgccgccccaggctgcaccctcgttggcacgtgcctgggccgaagcccccggcacatactccggcacatattcggcattgaggaagaaaaacagcttgtccttgactatgggtccgctaagcgtcagccccgtcacattgttcaacgtattgctcttaggcagctccacactgcccagatgcttgccgctcagcaagctgctggtgtaatagtcgttaagggaggcgtgccagtcgttgccgccctgcttggtcaccatattgatggcaccgccctggaagccgctgtgcctcacatcgaagggagtgatgctgaccgacaactggtcgatggcatccaacgacaaggggctgcccccagccggaaggctcgaccctatgccgaaagcattgttgaacgaagcgccatccaccgtcaccaccgaactgcggaaattgccgccgcccaccatgaagccattggccgtgctgacgccctgcggcgtgaggcgcagaacgtcgtagaggttgcggctgacggtaggcatctcgcccaaggcacgactggacacaatggtcgatgcacctgagttctgaatgttcatccccgaacgggtcatgccgtcggtcaccaccacctcatccagcacagtgctggtcattttgagcacaaaatcaagcaccaagcggtcgcccaagggtgccgtcacattctgcacagaggccgatttataacccaacagctcaaccttgacggtgtacgggccgcccgcggccacagcgttgatgcggtaactgccttcgcgattggtaatagcatggtaggacagccccgaatgggtatagactgcggtgaccatggcatcggccaaaggtccgttgtcgtcagccacacgcccctcgatagtcgaggtggtgctctgagccatagccgtcaccgaaaagagcagacccaagcaaagggccagcaagcgcacaaacgtttttccaatcatatccatcaattctcgaaatatgtatttaaatttttattattcaataatatacacacgcaccaacctctcaaaacgaagtacaaagatacgaaaaaataaaggctcaacaggccagcaaaggggttttaaccatatttatatatctcctgcaaaatcgcatggttgccgcccacccaccgccaccacacagcaaccccacagcaggtccactctttgtaggccacaagtaggtcactccgtagttcagttgtccaatgaaaaaggaacaaatgaggaacaaatgacggagaactgaggtacaaggagcgacgaaagggcaaagcgagggataatgacaaaaaaagtgccttgcagggattagcgactgcaaggcactttaaggggttcgttatcatccatctgctgcccacaaagggggccgcagcagaggtatcaatagacggggaaggcgatttcgcgctcgatgacctgataggccacgttgttgcgatagatggtctggcgcacccagttgtcgtcctcgtcgtattcgaagacatagctgtgtttccagttgaggtgctcatcgtagttgaacgaagagagctcgatgaggttgtcgtggtcgtcatagtagtaggtggtgagggccacgaggaagtcgtcagcatcataaaaacgccactctatacggttgccatggctgtcgtacttgtagaggtaacgctgagtgagttcgccgtcgcggtcgtagaactccatctcggagttgttgccggcagcgtcgtacttgtaaacgcgcttctcggtgagggtgccgtcgggggcaaagctctgctcctcgacaaggcggttgttctcataacgggaggattccttcttggtcatgtggtcgcccatgaagacggtacgctcaatgcggttgccgttctcgtcgttgcgataggcggtgcggccagtgagctggcgggcgcggttgtactcgttccaacccagagcatagccgtggacatcgaaatagtaggaataccaagtgtactccccatccttggtgcggtatttgtcctggaaattgccgcgcttgtcgaaggtgatggagtcgatgcagatgagctgacggccaccgttacggccaccgtggaggtcgtaggtgtattcaatcacgtatatggcattgccgttgatgcccatttcctgacgggacgatttgcggggtttattgccggcaaaggcggtgcccgcaaccagcagaaccaacgataaaacgatgtatttcttcatattacgcattattattcaatataaaatatgttgcaaagatacaaatttttctttacataaaacgtgcatggctataaattattgccctgccgaaccttttttctactttaaaaccgagcctcaatatcgaacacactccccgaatttcgcttcaagactacgtttccatgcatcttcgtctacaacaaagatatggttttttgctatgagttctctcttccagcgattggggttagccttgcctacaggaagcatcctactcagttccttccggaaaaaggagttcaaagcactgtcaaagttcgtaaaacatacgtacaccacagggaggtctatcttctcttcgcaataacgataaaggaaagtgtcacggaacttgtactttaagtagtccgtcaaccaagctgtattttctcgcttcacttgcttattcttatccagctcgtctttcatcttcaggattccctcatgtgaatactcctttatttcgatccagagctggaatgtagggaatacagcaagaacatcaacggctttcatgggtgctccatggaatgtgggtgacaacttttccttctcgtcaaatttatacaacgccaaggcgttgggaaagtccatacggactctttcctctgtcaaatccaacctcataagtcctccaagccttttttgatttcatcatccaaaatccttgcgaaggtctcgtcaattgcattggggtacaaagtccccatttcattcgtagcattgtgacgaatcacccccgcatcatccttatacaaagtgtgatacagcacactgtcttcctgagttgttgccagctcgaactctttcaacaaaacgtaatcatgcgttgcaatgaatatttgaacacccattcgttgaagttccagaaggatttggactacagtttgtgacaactgcggattgaggttggcttcgggttcatcccaaaaaagcattgttcccttggtcaaagtctcgttctgaatcagcctatatagaagtcctaatttcctaaacccctcggccagaagcgagaattccaactcgccagaggaatttctcatatagaatgtctcgttcttttcgattacccgacccaacatagctttgttcaaaatattgagaagtcggactcgctcagggctttgctttcctctgacgacggggagaaatgccttgtctataatatccaagtaaacctcttcgaaagccaatttcttttggctgaacagagaacggaagccaggcgcattggctaacatatcctttacagggataaaaatggattctgcctgattctcttctttccaaagactgtggctcaccgaagtcttattgagagtggtgatgtcgcaagtgatggacctttctttggtttcatcttcgttccgcctgtatacaactacgcggccagagcctctaccctgtgagcggtgaaccaatcggccaatgctgcgaggcatgaacacaccattcaatttttgagcaaaagatcggtcctccattttattcatcactgagcatgccgaatacagaaccttcatcaaatgagttttacccgtcccatttttgccaatgaaaatattaactcctgacgagaacgagacatccaactctgtaaacaccgtgaaatttgatgccttaaaacgagtaatcatagggccgcattattatttgaacacttaattctacgatatacataacgtattcaattggaaattattgttctcttcttcaaaacaaaaaaagaattgtcccacatctacagacttccatttgggatgaagttataacagaagagagccatatttcgatttcggtactgacggggctttattgtttcttttgcacggactttcttgaccagcggaagaagagtgccgtggccaagagggtgatgacggcgccgatggtgtagccgagccagcgggggatgacggagccaaagccttccttttcggcgacaaagaggaaacagcccgtcaccatggtcatgaagagggcggggatgagggtgacgatgtagggcttgcctttctggcagagacagacggtgagggtccagagggtgacggtggccagcacttggttgctccaggcaaagtagcgccagatgacgtcgaagcctttggcatcgatgagggagtagaccaatacgccggcggtgatggcgaagataggcagggctacgaaaaggcggtttttgacgggcttctgctcgtagtggaggaagtcggccacgatgagacgggcggagcgcagggcagtgtcgccggaggtgatggcagcggagatgacaccgagcacacagatgacggcgatgaccttggggaaccatgtattggcaatgacgcccaccatggcattgccgcccagggtggcaccggtctcaggattgacggtgagttgctggagcatggggtcgtgatagaagacggtggcggcagcagcccagatgagggcaacgacgccctcggtaatcatggcgccgtagaagacggggcgcgcctgtttctcgttggtcatgcagcgtgccatgaggggcgactgggtggcatggaaaccactgatggcaccacaggcaatgctgatgaacatcatggggaagatggggttatgggcagcgtctgggtgctggttctgaaggccgtcccacaactctggcagcgccggacgatagacgaagaaggcgacaacgatggccaaggccattcccaacaggaggaagccgaagatggggtatatcttgccgataagcttgtcaatgggcaggagggtggcgatgagatagtaggcaaaaatgatgccgacccagaggaagatgttccagtcaggcgtgaaattgttgttgagcagcacggccggcgtgttgacaaagacggctcccaccagaatcatcaggaagaccgtgaagaagcgcatgaactgcttggccccgttgccgaggtatgcaccgtggatttcgggcagcgaagcgccgtcgcggcggatggagatgtagccggctatgaagtcgtgtacggcaccggcaaagatgctgccgaagactatccacagaaaagaggctgagccgaactgggctcccatgatagcaccacagatgggacctacaccggcaatgttaaggaactggatgagatagatgcgccagggtttcatgggcacataatcgacaccgtcgggatgggccacggcgggagtgggacgcttggggtcgacctcgacaatgcgctctatcaccttggaataaagcagatacccaagcactaacaatacgattgcaagtaggaatgataccatgatatttatttttttgaacctgcaaagatacgcttttttcctgaaataatgatattatcaccgaaaattatcctcagtctataacaggattgtgggctctcgcaaattttttctttattaattgacattatttgcgtatctttgcagacaaataactaatagacacattgcctatgaaaaagtcattatcaattgtagccatgatggttatgctggcagccggagcaacggcccagaccagcaaaagtcaattcacaatcaacacacgctcctggtgcaccaactactggacgacaatcctctacaacctggcccacggcgcagtttcccactttgccttcaacggcaacaccaccgactcgctgataaccgaggctatcttgccggaagccgattgggtgttccccatcggcatgggcaaggccggtttcacaacccccttgaacgacatctacgggccctaccaccgtgccttcagcaacccctttaaacgcatcggcgactttggtctcggcctcgacgcgtcgtggaagccctctaccatcggcttctatgccggagcttactacaagagtcaggagatctgcttcatgcccaacgacgagagcctgcgcagcttctatttccagccgcgtgctggcttgatcattggcagcatgaagaatgccatcgaggctggtgtattctacgacaaagtggtgggctgcggcggcacatgggctcctcgcaaccaggacatgctgcagagcggctggggcttggacttcgcgctaagccactccgtcaacaaagggcacaacaagaccctcctgatgttctccatgcccctgcacaacttcttcaaccccaactatcccgatggcagcctgaagaacgtcaaccgccgcgtgggatacatcattctctcccaccgcgtgatactgtaaacggcccctcactcttgattaagatcagaggccaccgccctcatcaaacaactgcaagtccggaaccgccttggcggttccggacttgcccttttcaaggcaaaaacaaccccaaccaacgattgatatttaacacacaaaagggatagaacattcagaaaaaagttgtatctttgcaaattcaaaaacaaagaatcatatggcaaaaatcgttggacttgatttaggctcaaacagcattggctgggctgtcattgacaatgagaagcactgcattgaagctgctggctcacgcataatacccatggatgcaggacgtttgggggactttgaaaagggcaactcagtttcttttaccgaggagcgcacaagatatcgaggcatgcgcaggctaagagaaagatacctgttgcgccgtgaaagactgcttcgtgtattgagaattatgggttttttgccagaacattttgcctcacaactatccagatatgggcaactgccagtagacaaagagcctaaattggcctggaaagaagacaacgacgggaatcatgtattcctgttccaatcctcatttgaagagatggtatccgactttagaaaggcagggattgctgaaaaaataccctacgactggacgatatactatttgaggcaaaaagccctatccaaaccaattagtaaagaagaacttgcttggattctgatgcagttcaatcaaaaacgaggctactaccaactgcgcgggaaagttgatcaaagcatagtccctgacgaagagaagcaggaagagaagtcttaccttgaacttaaaataataaaagtagaggattctggagaaaaagacaaaaaagggaagtcatggttcaatattacgctcgaaaacggttgggtatacaagcgcccattactctccaaaccggactgggaagggaaaacgagaggattcatcgccaccttcaaattggacaaagatggaacacacaaagatgatactccaaaactcagttctccaagcgaagacgactgggggttgaggaaaatcaagacagaaaacgacatacggcaatctggaaaaactattggctcttttatttataatagtctgatataccatcctgaccgtaaaatcattggtgatttggttcagaccattgacagagaattatacaaagaggaactacgcaaaatccttgacacacaaagtcaatacatgcacgaactcaaagatatgaatctttacaaaaaatgtattgaagaaatatatccttccaacgaagcctaccgcaacagcatatcctcaagggggttcacatacttgctggtagaggacattttattctatcagagacccttgaagagcaaacgaagcctcattgccaactgtccatttgaacaacgtcatggcaaagccattaaatgcatagccaaatcgcatccaatataccaagaattccgcctctggcaatttctttccaatctcaaaatctataaagacgaagaggatatcactgcaactttactgccagacggtgacagctatgccaatctttatgattatctatcctccattaaagaagctgaccaacagatcctcctcagatacttcagaattggtaaaaaggacatgccccattataggtggaactatgctcaggagcgtaaataccccatgggcgagaccctgacggtactgctaggtggtttgcgcaaagctgggatagaaaccagttttctcacctccgagaatgagcttctgttatggcatcttctctattctgtcgatgaccagattcaatacagcaaagcactgaaaaaaatcgcccataagcaagggtggaacaatcaacggtccgatgctttctgtcaagcatttgacaaactaacagtgtataaagagaaagactacggcgcatattcagctaaagccttcaaacgtctattacccctgatgagaagaggccgctactggaaggaatcggcaattgacgtacaaaccctcagccgcatagaacatatcattacaggggaagaggatagcacactgacacccaaagtaagggaagtattcaagggattaagtagcatccaacaatttcaagggctccaaacctggcaggcatgttatctggtttataaccgccattcagaatccatagatgcacaaaagtggactaaaccggaagacattgacttgtaccttgccaaattccgtcataattcattgaacaatcctgttgtggaacaggtagtaacagaatcactccgcgtggttagagacatatggaaacaaatagggcacatcgacgaaatccatatagaactagggcgagaattgaagaagacaaaagcggaacgagaatacctttcccagtccatccttaaaggggaaaccacaaaccagcgcatccgactgcttctaacagagctcatgaatcccgaattagaggtagagaacgttcgaccccaatccccatctcagatggagattctgaaattatacgaggagggggcaatgcaaagtggagccgaaattcccgatgacattatggatatccaaaagcgcttcacagcagcaaaaaaccagcccacaactgccgaagtcaaaagataccgattgtggcttgaccaaaaatacatttctccttataccggtcgtcccatcccactggctaagctcttcactcaagcatacgaaattgagcacgtgataccccaaagcaggtggttcgacgactcgatgtctaacaaagtcatatgcgaggccgaagtaaacaaactcaaaaaccgagagttggggcacgagttcatcgctcatcaccaaggagaacgtgtttccctaaaccttggtggcactgttgaaattctttcacttgaagcatacgagaaactggtaaagaccacattcccaaatcctaaaaaacgcgaaaaactgatgctggacgacattccagaggacttcacctcacgccaaatgaatgatagtcgatacatcagccgattactgttgcatttactttccaacattgtgcgaaccgaggatgaagaaggccaccacgaagagtctgtcacctcgaaaaacgttattccttgcaatggaactattactgaccgtctgaaacgagaatggggaatcaacgacgtgtggaaccgcatcatacttcctcgctttgaacggatgaacagcatcaccaactcaaacgaatacactgcaaccactgaaaacgggcatatagtcccacaagtacctcttaatatgcgacaaggcttcaataaaaagaggattgatcaccgccaccatgccatggatgcaatcattatagcctgtgccactcgcaaccatatcaacctattgaataacgagaacgctaaaggcgccacacgttacgacctccagcgcacactccgcactacggactactatgttgacgaacatgggaacaaacacacttgcccaggcaactttataaagccctggcccacttttactgaggatgtgtatagagcactggagactatcatagtcagttttaaacagaatcagcgcatcatcaacaagacatctaactactataccatcattgaaaacggtaaacccactattcaaaaacaaaagaaaggtgatagttgggctatccgaaagcctctccataaagaaaccgtcttcggcgaagttaatcttcagttgaaaaagagaataaaaatcaaagatgctcttgccaaccccaaaagtattgttgatcgcgagctaaaggagaagatagaaaagtttttatcacttcatcattcgaacaagcagataatagactactttgacagacacaaagatatttggcccgaggcatctgatgggagaatcgaagtctactattacaccaaagatacagaagaccgttactttgcaacacgaaaagaccttatcagcattttcaaagacatcacaacaatgtctgccgcacagaaggcaattgacagcattacagatagtggaatccgtgccattctacaggctcatctctctttagaaggaaataaccctgccgaagctttttctcccgacggccttgaacgcatgaacaggaacatttacaatctgaacagagaacattgccacatgcccatcaaaaaagttcgagtatatgaacaagccaataagttcagtgtgggaagccatgggcaaaaagccacaaaatacgttgaagcagcaaaaggcaccaacctattttttgtcatttacaatgataagaatggttcacgtggatatgcaactgtccctcttaatgtggtcatcgaacttcagaaacaatacgaaaagtgctggaaagaacaccttacagataggcttcagcaaaaggatttagagttaatgccagttggtgcgcatctcctttatatactatctccaggggacttggtgtatgtacccactaatgaagagcgtaagaacggtattacatcgccaaatcccaacagaatctataaagttgtttctatgacaggtatccagtttatgtgcatctctcatagagttgctgctcccattgtaaacaaaatggaatttacaacatcgaacaaaatggaaaaggctctcacaggcgagatgatcaaagagaactgcattcctttgaaagttgaccatttaggaaatatcatcaaaataggatagtagccatgattaaacggacactctgcttctctaaccctgcctacctttctatgaagaacaagcagctggttgttaggctggaaagccgtgggaatgagcccggacaacagactaccatccccatcgaggacatcggaatggtggtattggacaacccacaaatcactctcacccatggactgatggcctccctattggacaacaacgcctctgtcatcacatgcgatgagcggcacatgcccgtgggattaatgctccctttggaaggtcacacggtgcaaagcgaacgtttccaagaacaactatccgcctccgttcccctacgcaagcaactatggcaacagaccgtacagcagaaaatccttaaccaagctgccttactgaacgacctctacaacgctgagaacgggaatatgctccaatgggctgccgaggtacgttccggcgacagcaccaacctcgaagggcgagccgccgcctactattggagccaaatgtttccagacattggcggcttcacccgtggacgtgaaggactttatcctaacaacttcctcaactatggctatgccatcctgcgtgccgtcatagctcgggcactggtcagcagcgggcttctcccaacattcggcatacatcaccacaatcgctacaacgcctactgcttggccgacgacatcatggagccttaccgcccatacatagaccgccttgtggtctcgaccatcaagcaatacccacgcaccgcagaagtcaccaccgacatcaagcgctccctcctcaccatacccacccttgaagtgcacatcggtggtcagcgcagtcccctcatggtggccgcatcacagaccacggcatcgcttgcacgctgctttgccggtgaaatacgcaaaatcacctaccccgaaatgtgatggaccgtttttcagaataccgcatcatgtggctgctcgtattcttcgacctccccaccgacactaaaaaggagcgcaaagccgcctcagactttcgcaaacgccttttgtctgatggtttcaccatgttccaattctccatctatgtacgccactgcgccactcgcgaaaacgccgaagtccacctcaaacgggtccggtcgttcttgccccaatatggacaagtgggatgtctgaccattaccgacaaacaatttgcagacattgagctttacatctgcaagaaggaagtgccgcccaatgcgccaggacaacaattggagttattttgacaatagaattagaaaaacacgcccagaaataaaaaatcccgcccatatggacgggattttttaatccattgacatgtatttggacattataattcagaaagatacacacatcgtggtgtttatcataagtgtcaatgtcctctttttaagcaattcacaacaaacctttaaacattcaagaatcatgaaagggtgtttatcataagtgtcaatgtcctctttttaagcaattcacaacatgtgtccgcagtatcttctggcagtgttcggtgtttatcataagtgtcaatgtcctctttttaagcaattcacaactgcaagcttatcaagggacccaggcccttaggtgtttatcataagtgtcaatgtcctctttttaagcaattcacaacccttgggcatagacggaccctgtggcaagggtgtttatcataagtgtcaatgtcctctttttaagcaattcacaacgcagtttgttttgtcgaaaatttccgttttggtgtttatcataagtgtcaatgtcctctttttaagcaattcacaacaaaagcagacctcatgccctaccgcatcatggtgtttatcataagtgtcaatgtcctctttttaagcaattcacaactgttcccagctccgttgatgctccgttgaggtgtttatcataagtgtcaatgtcctctttttaagcaattcacaacaggtcttcagttgtcactgcctgtttaatggtgtttatcataagtgtcaatgtcctctttttaagcaattcacaaccaacttctttgcgttctttgtcgaggcgtcggtgtttatcataagtgtcaatgtcctctttttaagcaattcacaacggtattgctggtcaaggcgttggcatcgcggtgtttatcataagtgtcaatgtcctctttttaagcaattcacaacgtggttatgatgtatcatgatgtatcatggtgtttatcataagtgtcaatgtcctctttttaagcaattcacaactcttgttttgctattctctactaagttgtaggtgtttatcataagtgtcaatgtcctctttttaagcaattcacaacgcatcatcaatactataacccaattcctgcggtgtttatcataagtgtcaatgtcctctttttaagcaattcacaacctgcgcaaagtcttacgcgctgccgacttggtgtttatcataagtgtcaatgtcctctttttaagcaattcacaacgagtttagaggttaatacttccgccaaggggtgtttatcataagtgtcaatgtcctctttttaagcaattcacaaccggataatcaacatatttttcttcaatctgggtgtttatcataagtgtcaatgtcctctttttaagcaattcacaacgactttggcgaatgggtttcgtcgctgtcgggtgtttatcataagtgtcaatgtcctctttttaagcaattcacaactgattgtggggttagaactcggattcggtgggtgtttatcataagtgtcaatgtcctctttttaagcaattcacaacacatagttgatatttatccaattacaacatggtgtttatcataagtgtcaatgtcctctttttaagcaattcacaacgtctcacttatgatgatgcccatttgcctgggtgtttatcataagtgtcaatgtcctctttttaagcaattcacaacaggtgaattatgactcggagttttgggagtattctgaataatcagcggtttgttgggttgtagactatgtcattggggtgaggtttatcaatttttcactacactccttataaaggcgacggagaaacaagttctccgcccccttggtagattttcacaacggaataatccttattgtgaattgcttaaaaagttttgcaaagatactacttttttttgaattgggaagatgttttttcgttggtcggtggtgggcaagttgaggaaatctgattattcggatgattctgagagggttggacttatcggttgtttcggtagtttacacggctttggtacatacgttcttttatgcctccctctttcacgaaacgggtttgcattgtgaccagcaacttgtgaagcatgtatatcgcctgatgtatgagcgtgatgcagaggttggctatttcttcatcgttcatgcgctgtatggtggcggcatactctttcttgatcccctcactacgtgcatattgtcgcatcctctcatagcgcggatgaagaggtccccactgctgcaaatttcgcaccctgaggtaatcctcgtagtcgtcgagcagttcttccagactggctttggccacattggtcagtttgatttccgtctcgcttgatgtagcagcggcttggttgccctctgcaatattctgtttgccgctgcgtgcggcttgaaccatctggtccacggtgcggtcgcctttggacaggtagtgttgtgtgaaatagtaggtgatgtcgtagaccatctcggtgacttgatagacacggaggtttcgataatggccatgcttggggaggaaggttactggggaggtctgagggctctgattattctgaggactctgactactctgactactctgagtactctgattactctgagtattctgagtaatcggagtattctgaatactctgagtattctgagtaatcttgggggttagagtgttctgattatcctggttcatgggggtgctttttctttacagctccacctcttggcggaagtcggcaatctccacttttttccagcccacctcattgagggtgtcgcggaagtgctcctgtgtggcggcttcgccgtgcactaagaatatctttttcagtttgcgcttgtcttggcaaccgatgtagttaatcatttcactgtagtcgccgtggccggaaagggattcgatgcggcgcagctcggcacgcacctcgtatttgtgcccaaagatggagacctccttgtcgccccgcataatgcgagcgccaagggtcttgggttcgcaatagcccacgcagaggatagttgtggaggggtcgtcgatgtggttggccagatggtgcttcacacggccagcctccatcatgccggaggcggagatgatgacgcagggcttgtgccgcacattgagagccttggaggcctcgacggactggatgtattgcaaacggtcaaatccgaacgggtcggggtccttcttcatatagttgagaatggactggccgaagcattcgctgtgcaaccgcatgatgttggtggcggagacgctgagtgggctgtcgacaaagacatcaatgtcaggcaggaggtcggctgtctccaaacggtccagggcatagatgatttcctgcgcacggccgacagcgaaggatgggatgataagcttacccttcttcttggtacaggtgtcgagaacggccatgagcaattccttttcggcatcctcgatggtggtgtggagacggtcgccgtaggtggattccattatcaaataatctacttgcgggaatggttcggggtccttcagtatccgtttgttgtagcggccaatatcgcccgtaaagcccagctttatgatgcggcgtccgtccttcacttgcaggtagatacagctgctgcccagaatatggccggcatcgaaaaactccacgataacctcgtcctcaatgacaaactgcttgtggtaggggacgctgatgaagcagctcatgcactcctgtgcatctttctctgtatagataggctccactgggggctcaccctgactctggcgctttttgttgaaggtgtggacgtcggcctcctgtatgcggccagcatcggccagcatgatggcgcaaaggtcgcgcgtggcgggtgtgcagagcaccgtgccgcggaatccctctttatagatgtagggtatcagtcccgaatggtcgatgtgggcgtgggagaggataaggtagtcaatctccgacgggataaaacccaaatcgcggttcatggcatcggtctccaatcccttgccctgatacatgccgcaatcgagcaaaattttcaatcccttcttagtaacgataaggtgtttgctgcctgtcacctctcgggtggcacccatgaatttcaacttcatatctataactgtttattaaagtcaaactacataataatcattctcatacgaccatccctcccatcgaataggaggtggcttagtctcagcaaagatacaactttttttccaattccccacttttctgaaataccgtgggtaatgtaaaaattgttcaatcaaaaaaaagaacgtatctttgtaagataatacacctgtttcgaatactgcacaacgatatatgaatcaataaataacatcataccatcatggcactaaaaagagtaatggtacttaccgggggcggcgactgccccggccttaatgccgtcatccgcggcatagtaaagagagcctctcaggagaaagactgggaggtcatcggctgcatcgagtccttcaacggggtgctacgcgaacccactgagattgtcgaactgaacgagaaagccgtcgaaggtctccagatacagggaggcaccatccttggcaccaccaataagggcggtccatttgcctggcccgtccgtaacagcgacggcacctggaccaccgtcgaccgcagcgacgagatgatacgcaaactgcgttacatgggtgtcgacgcagtcatcaacatcggtggcgacggctcccagcgcatctccttgggtctggcgcaaaaaggcctcaatatagtaggcgtgcccaagaccatcgacaacgacctctcctccaccgactacaccttcggtttccagaccgctgtgcagatatgcaccgaggccatcgacaagctggtgaccactgctgccagccataaccgcgtcttcatcatggaggtgatgggccgcgatgccggctggatagccctgcactgtgccatcgccggtggtgccgacgtctgcatcatacccgaaatcccctatgacatcaacaagataaaggagaagatagagcagcgctacaacaaacgccatggctactgcatcatcgtggtggccgaaggggccaaacccaaaggcggcaccgccgtaggcgctgaaagcagcgaagtgggctatcagcacatacgcttgggcggcataggccaccagttagctgccgacctcaaggccgccggagtggagcacgacatccgctgcaccatcctcggccacctgcagcgcggcggcacacccatcgccttcgaccgcatcctggcctcccagttcggtgtccgtgccatggaggaggtaatttgcggcaactacggccagatggtagcctaccgccaccccgacattgtagccgtgcccctcgaagaggccgtccgtatcatgaaaacaatgaaactcatcattgccgcggccatcgtggcactgaccgcagccagctgctgctcgaagagcaacgcccccaagacgctggtgctgtattattcactgacaggcaataccaaagccgtggccgaagagatagccaaccgcctcggtgccgacatagaggagattgtctgcgtcaacccttacgacaccaacttccaggcctgtatcctgcgctgtatgcaggagcgtgagcaaggagtaattcccgacatacaacccgtaaaagccgacctcagccaatatgatgtcgtcttcatcggctaccccgtctggttcggcacttacgcaccgcccatcgacaaataccttctcaccgaagacctcagcggcaagaagatagttcccttctgtaccttcggtagtggtggtctggaatcaagcattgccgacctcaaagccgaagagcccgctgccgaaatactgcccggctatggtgtccgcgccgcccgcttggaggccatgccacaggaggtggagcaattcctaattgccggaggcttcatcaagggcgaatacactccgcttgcggactttcccgaacaacatgaagtgaccgctgaagagtccgccatcttcgacgctgccgtcgacggctatcccatgattcacgcccaagccgtcaccgtagcctcccgtgccctgcccaacggcaccgaatacctcttcaccgccgaagaccttccccgcgaagacaagcccgacatgcctcctgccggtaagatgcaggtctatgtcaccgtcgccaatggccaagcacccgtcttcaccaaagtaatccgataaaagacatccatatcatccctttcgcgggctgccgacaacaaaaaacagtcgataattattaacctgtcaacttaatccagtcgaagggaacaaaagtgacaacctaaaatagcaaaccacaataatccatacaaaaatataattacaaaaaaaatgaacagaaacaagaaaagggagtacacctctcccgaaatggaaatcctgaacgcccgcgttgagcgcggcttcgaagcaagtacagtaaccgacaacacgcccagaggcgacggcaacgagacggtcggtgacagccacaacaattacaataacgctattttcagttgattaaatcacaagaaaaatgaagagaatagtagtatcgtttttgtctcttttgaccattgcaggaattgtgagctcctgccagaaagatcaacatgccggtaacggcagcaagtttaccgccaccatggaggcctgcacttctatccagggaaagaccgtattagacggcagcatgcttaattgggttgacggagaccaaatcaaagtgttcggttccaggaatgccgaaggtgtctatgccgctgttgccggtaccgatgacgccaccaccgccacattcgagaatgtagaaggcgatgccggttcacccgtgttccacgccatctatcccgcttctgtggccatgaccgccaccagtgtaaccctgccctccgagcaggtgactgtcgatggttcattgaccgatttccccatgtacgccacctcggagaacaactctctccaattccagaacctgtgcggtattctgaaattccgcctcaccaagagcgatgtaagcatcagcagcatcagtgtcaccaccaccgacgccaccaacggcaacttcactgtgtcatacgacacagaaaacaagcccgtcctgaccagcaccggctcggcgaccaaatacaccacaacgctgacctgcaccacacctcaggacattaccgacggtgccgacttctatatgtatctgccccaaggcaactactacggcatggagattgtcttcaccacgtccaccggactgacttgcactaagacggtgtcggccgaaaaccacatcgacatagtgcgtagccaatacagcaccctcaccctttcgggaaccaacctcgactttgtgccagacggtacactgagcggactcttcaccattaacagcaacggcgacaaagtccgctttgccaagggaaacctgcagtaccagcccagcaccgatacctggcgctttgctgaacaccagtatgattacattgcgcaatgcaaccagtctgtcgaccccaccacctacaccggttggctcgacatgttcctctgtggtacgggcgacgacatgagtgccacctccgcaacagccacaagcgcagattttaccgattggggttcctatcccatcagtaacggcggggaaacaggcggactgtggcgcaccctgacatacaatgaatggtactatatttttgtgaacagccgtggtaattcagtgggatcttccggatttccttttggtcctggaaaagtgaatggaattaaagggattattcttttgcccgattcatttgtgacacccgatggcatagatttcacagcattcacgataagtaatagtgaaggctggaaaacaaatgattatacctctgaagaatggacagccatggaggatgccggagcagtgttccttcctgcagcagggtgctacctctccaccaccctcaccaacgagcaagtgaaaggatattattggtctaaatctcgagcaatgtccagaattcctcaattcgctttcttttccgaccatgatggtttcttttttcctatcgactggaaaagaaaatatccaaacaccctccactatacctgctcagtccgattggtttgcgtacagcaataggcagaataatcattcaacctcaaaaggagtccttgccaatatgcagggactcctttttctttgctgccggtcattattgccccataaaccatatatcccttctgaaaaaagcacatttccgacacattaccacaagttcaccaacgatatattcataaaaaatcgtgttattatttcacgtatctgtgtataattcaagaattatatgtatatttgcattttgcatgaaattgtgcaatatatcacccaagtgatatattgtcaatatgttgtatagataaagagtacacaaaaacagtaacaatggaactgaaaaaaataaaatcagccctcatctccgtctactacaaagacggtcttgaagacatcgtcaaagccctcgaccgccaaggcgtcaccatttattccaccggcggcacacagaaattcatccaagaactcggcatcgaacccgtagccgtcgaatccctgaccggctatccctccatcctcggaggccgtgtcaagaccctccaccccaaagtcttcggcggcatcctcagccgtcgcaacatgtactccgacggtgaacagttggcacaatacgaaattccggaaatcgacctcgtc

SEQ ID NO: 1170 - DNA, 24464 bp, synthetic construct
  source 1..24464: mol_type = other DNA
  misc_feature 1..24464: note = Synthetic
tgccgaaatcgttgaacacctcctgcggattgttcttcagcaggtacatcacaggcttgcgctggtacaggtattctgttgtaaaaccacccgaatcgtgaatcatggcatccgagccaatgaacaaatcaacatattctccctcttccagctggcaattgggcatctctctccagcgacgatagtattcctccgtgcgttcagcaccccacatctctatcagcttgaacttcaagaactgatgcggtttgaaggcaaactgcaccctgtcggcgtatttctccgccacctcaaccatcgtgtcgcatacatccaagaacgtggatacgctgaaagttccctcgatggtgtgatgcggcgcccagataatgcgcttcttcgccaccccctgcttccgccacacctctcttgcctggtagtcgtcgcgcatatatacctcacaccctgcatatcctgtgacataggtgttttgtccgcgcgcatggctgtatctctccgaaaacgacttatgcatcgtggtctcaacaaagtatgcgccacatgtgtttagcgccaacttgtcgtagttgttcttgtagagcttcatcgtcgtaaaggcatatgtcacatagcaagtcaacttgtcgacaaaatggtgggcatgatacatcggtgccatgtccttgtatgggcaagtgaagaatacaatatctggattcagtgttttcttgatatccacccacttgccactagcttcatcgtatgggataatatattcgtaccctctcgacttgacgaaagcctccgtccgcttcagcgttcttattgtttcttcgtcggagtagctcttgtatactgtataagggattatgaccacatatgggtgataatttccactctcaagcattgccttgaacacataatccagcttccacattcctggcacagcgagaataaatgccacatccagcctctctttatcctgcaacgctctaattcctctcattgtacgatgtctgctactctttatccaccatctgtacagaaacggcacatgcgtacgtatcacatcgtgatacgccatcagaattctcaattcatatactagcggcgactcagcattcctcttgcggagggtttctatcagcgacatctgttcagtatttgatgttcctccatgcaaacggcacctcaaaatcggcatagcggctctcggcgtcaaaaaaatgttcccgtctctcgccgttgaggaatacaggattcattcggtaatcttccttcatctgacctataaagtactctagatacttcaccttctcaggattgatacccatgtaacgtactgcggcaatatcggcaaggaggaagtcaaagccccctatcaggacattggaatgcttcgatgtcgggcagaatgggccctgtccttctccacccataataccgtctatgacggtgaaatacagtctctctttcgtcaaaaggctcttgtacaggtccaccaccattcgccatatggtgtcgttccccgggtgcgacccacgatgtgttaccttcgcatgctgcgctcgttcccaactggcccggtctggatattcgtcgcctccagtctcaggactgcctactctccaatgaaccaactggttcttcctagtcatcgctcccacctgtcctttcaagttcaacgtggcacccaccttctggtgagtcttaagcttcggtatagaaatatacacgtcggcatcatacaggctcttcgacatggtgtacagctgggtctcacccgtatgtgccgccacagtctcttcgcgctcgtcaaacacccccctgaatagcgaggaatccacgccatacagcaaactgttctttccgagattaagttccacctcaccgttagggtcccctggttgcggagccattttgtctttcttaccgtagtccttcagatccttgcacaccaaaggccgcaagtcatatatgtggcacgggacatcgtacttgctctccagccgccgaatacccgtaaactccatcagttcctcgaagtcagcgtctattgatgggttgtcggcaatgataatctctccctctccgtgcaaagccatagccaccctgtctgccactgcctctatcaccgccgggtgcgtaatcacgcaatacaggctgtccgtatggtcacacgacttgcgccaccgcgacgccacccagttcggctttataaacaccctcattccaggcttgatatatccctcgaaaggattctctgcattcatccccagcgaccggaatatctcgtccagtgcgtggtttactttcatcgggcggtaactgtccgcggctgctatggccaccgctctcttatctgttgtagtccccattgtcaatcatgtttaagaatctctccaacacatatacataccatttctggtctcctgtcataacatcggtgcagtgcggccagaactcgtccctctgcgggccttcccaccctttcatccattcgttcagcggtctcggcattggtgtcttcacaggcatttcccagcctgggtatagccgctcgaatatctctctcaccaggtatttgttctccccacgcctaatcctttcatagtctatcggcaccccaagcacagtcttagagtatggcatatgcagtcttatccctgctgtcgcgcaggcatctgaatacgagtttatcgcctcctcatacatcgtctcgttcaaaaaagcatgagcatccgtatatccgttccgtgtccatttctcatatggttcagtgatcatctgcgcctcgcgcagcaccttgtatggtaacacgtatgaatacctatccacaaactcaccgaaggtccagtctttcgacatcaaaccgctcattcccccgtacactatgtccgcactttccccgaacacaatctcctccatgccctcttctagcgccttgcatgaggccttgtatatctgcacctctatagaatggcacggcgcccccttgtgcctcattagcaccggcgctagcctttccatgtcttcccagtatacctctaccacacggtgctccagtccacactctgcagcatacttcgcagcctgctctgtctcgtcagtcacctccactccaggcaccacacatttgaacgtatatgccacactacccttcggcatcatcttcgccaatattgccgagtctattcctccgctcagcgctaatgccgtccggcctcctgccgtcgtcctcgccatctcttcccgcaaagcagcctccagttcctcgctgttcgaaacagcacggcgatcctttggcgggaaaacatgataatccttaattccatcaacgaaacaacggctcctgtcaacaacagtcctaaacatcagccagctgctcatgcagtagcccttgtccgcaatcctctccccactcacttcacgtcctccagattatccacgcgcaacgtatctagcgcacgccgtatctgggtcgacgacacaccctgtgtatacgggaaatacactattttgataccctctttggcaaattctttctcgtatgcctgccatttctctgttgcataccaatcgtcacccacaaaaagatacgttgctcccagtttcttgcaagccgtcagcttgtccatgtcatactgcggaacagcggcgtcgacatacttgcaactgcgcaccacctcgattctgtcctcaaaaggtatcagcgccttcttgcctttataagccaccaactcatcaacagtcacccccaccacaagcttgtcgcacatcccctttgcgttcttcaacaaattcaggtgacctatatgaaacaagtcatacacacctgttgtatatccaataaccatagtatctttattttaatttcttatttcactttccactattctattcctcaagtcctccttgtaggtaatctttctgttttcctcttcgccttccaccactgcaatcttcacgcctggcatatagcgacgaaccactccgcagtcatccgttgccatgaactgaggatcctgtagagcacgttggtatgcgtcgcggagcagcggcaggcggaacgcctgcggcgtctgcgcacgccacatcaagcgtcgttctggaatcctcgccacaagacgcggaatttccgagttctgagctcctacctctgcattcaagtccggatgcacctcccacaccgtgtccgtgctcggcaccgccacacccacagcttcgttcctctgaagggcggcgaccactcggtctattatatccaccgacacaaagggccgcgccgcatcatgcaataacaggttcgtgtcgtcagactcgtcaatatatgccatcaccgcattcagcgttgacaaatagcgttcgtttcctccgtcaatcacctttgtcaacttcctccaattcctccgctccgcaatattctggaactcttgtttccagtcaggatgcatcactacagccacctcgtcgatagccgtatgggcattgaacaagtctatcgaatattctatcacagcccggccggcgagctccataaattgctttggcacggacgaacccattcgtttacccgtcccaccagccagaacaactgcgatattcttcatttcattcttttatatagcgctgcaaacaaccctccccacaacaccacggcacccagctgcatccaccaggcggtgccaatgagcacagcgggggcaatcaccacggccttcagggcataatagacaaccttggcggccattaccgacaccagcacggcaggcaataccgcccaacggcgcgacagcaggtggaacaagcccgccacagtggccaactcagccatcatgcacaccatcttggcggctgtaggcatacctaccacaaggcagctcaccgccggcatcagcaccgccagcacaagcgcattgcgccagtctttgccgagcagcatacccgccagcaccagcgccagcatcgggttcagcatatacagcggtagcgccgtcaggtgcgacacagcaggtatcagacacgccgctgctatcagcgcggcatccataatggcatatcggccaatggcccttgttttcaccatagtattcatcttctgtatttattaaaaaacaattgcaaaaatacatctttttttccacatactaaaataaattatataaaacctcgttactcaaacaaataatagcacgttttcttgcattcaagcattcaaacatccaagcaatgaaaagaactcttttcctcctcgccgccaccttgttgctgacctctgtcggcgctgtggcacagaacaaaatcgacaagcagggccgccgccagggccactgggtgcgcaccgacaaggacggctccaagatctacgagggcaacttcgtcgacggcctcgagaccggcaccttcacctactactactccgacggcaccgtccgcatccgcaacacctacaccacccccggccgcatctgcaaccacgaagcctacgacgagcagggccacctcctggcccgcggcatctacaaccagcgcaaccgcgacggccagtgggagttcttcgccgaagacggccgcctcgtgaaaaaggccgaatataagatgggcgtcaagcacggcacccacgtcatcttcacctccaagggcgacaccgccgaggtggccacctgggccaacaaccaccgccacggccgctggtggaaacgcatcggcgaaaaaggctacatcaccggcacctatgtcaatggcggcctcgaaggacgcctcgtcgaatacgacgacaacggactccttgtccgcgacggccactacaccgacggcttcaagaacggctcctaccagtacttcgaagaccgtaaactcaccatcgacgagacctggaaccacggcaccctcgccgaccgccgcatacgcctcctcactcccaacgaggagttcgtctccatcttcgacatcgcctgcctcgccccgcagggcaaggccaaagtggtcatcttcctcaaggacggcaccaagaaggtcaccaacgagaactccgaggtcgtctacgaccgcctcggcaacgagctcttcgactatgccaaccgcaaaggccgcgtcctcgtgtcgcgccactgcgtgcagggcatcggaaaagaccgcgaaggccgcgagatactgctcctcgagccccagcccgacttcgccatctaccccgacgaggacggcatcaagatggtccgcagccgcaagttcgaagacgactccccgctcgacaagatgttaggcgactgacctatgaccatcgccgcccacaccctcgggtgcaaactcaacttcgctgaaacctccgaccttctgcggcgtctcgccgcagaaggcaataccattgtcgactggaaccagcaggccgacctctacatcgtcaacacctgcaccgtcaccgccgtcgccgagaagaaatgccgcacggccatccaccaggcccaccgcaagaaccccgacgcacagatagcagtcataggctgcttcgcacaagtcgccgccaaggaaatcgaagccatccccggcgtcaccctcgtcctcggcaacgaccgcaagcacctgctccccgacattgtccacaacggcttccgccccgatttcaacgttcaacctccaactttcaacttacaatactcctcctccggcgaccgaacccgcaccttcttcaagatacaggacggctgcgactacttctgcacctactgcgccatccccttcgcccgcggccgttcgcgttccgccaccatcgaggagaccctctgcgccgcccgccgcatcgccaactcgggttccaaggaggtgatactcaccggcgtcaacacaggcaccttcggccagcaccacggcgagtcgttcctcgacctgctgcgcggtctcgaccaggtcgagggcatcctgcgctaccgcatctccagcatcgagcccaacctgctcaccgacgagataatagacttcgtggcccacagccgcgccttcctcccccacttccacatacccctgcaggctggctccgaccatgtgctgcagctcatgcaccgccgctacgacaccgccctctaccgcgccaaactcgagcgcatcaagtccgtcatgcccgacgcctgcatcgccgccgacgtcatggcaggcttcaacggcgagaacgaggatgaattcgccaaggtgctctccttcatcgactcgctgcccatctcctacctccacgtcttcacctacagcgaccgccccggcaccgcagctctccgcctcggcgagaagatccccgtcgccgtacgccgcgagcacaccgcccgcctactcgaactcagcgagcgcaagcataaagaattcatatcctcccagctcggcaagacccgccccgtcctctgggaatccaccccccactcaagcaatcaagcattgtcggccgagccgacggcacaccacaagcaatcaagcaatcaaaccatgcaaggctggaccgacaactacatccgtctctgccgtccctacgacgaaaccctcgtcaacaccatcgaagagataaccctcacccccgacaacatcgtcaaagagacagccgacgtgtaaactaaaaactaaaaactaaaaactaaaaactaaaactaaaaccaaaaccaaaactaaaactaaaaactaaaaactaaagaggccgcctcgtatcgagacggcctctttcactcttcactcttcattcttcacttttcactcttcacttttcactcttcacttctgtcagtctttcttgcacttcttgcagcagcagtcgccacagacgcacttgtagaacagaccggccacagcggcacccacgagcggggcgacgatgaagagccacagctggctgcaggcgctccaggtggcgcagtcgctgaagatggcctggctgatggagcgggcggggttgacgctggtgttggtcagcgggatgctgacgaggtggatgagcgtcagcgtgaggccgatggcaaggccggcggccttggtgttgctgcgctcgtcggtggcgccgaggatcaccatcaggaagatgaaggtcagcacagcttcgatggcgaaggcaccccacatcgagacattgaggtaaccctcaccggcggcagcctggaaggcctcgccatagccgttggcggcgaagacacccgtggcgccgagaccggcggccttatagatgccgaacaggacagcgccggcgatgatggcgccgacaatctggctcacccagtagaggagcatgtctttcaagctcatgcggccgttgacccacacgccgaacgagacagcggggttcaagtgggcgccgctcacgtggccgatgccgtaggccatggcgatcaccgtgaggccgaaggcgatggcaacgccgaggaagcccacatggccgaacagtgcggtaccgcagccgcccagcacgagtacgaaggtgccgaagcactcagcaagcattttgtttgtaatcttcatagttttatagtttttggttaaacattttccatcgcccttttaacgaatatttagaaatattattgtcctggaaaaaagaaaaaaggaaattaattcgtacttttgccgccattatgaaacacaactttatacatttcgcagcagccatagcgctcaccatcagtcttttgacagcctgtgcccagaagggcgccaaccccgtcccctacgagcccaccatgggcgacgacggcgcggtggtctatttcaccgacgagataagccccgaggcgctggtgcgcatctacgaggccctgggcgtcgaagccacaggccgcgtggccgtgaagataagcaccggcgagtcgagccacagcaaccacctcgaccccgccctcatcatgcccctggtgcagcgcgtcgacggcacccttgtcgagtgcaacaccgcctatcccctctcgcgccgtgccaagaccaagagccacagcaaggccatcgccaagcgcggctacggcaacgtggatattatggactccgaaggcaccatgcgcctgcccgtgcaggacaccacctatattaaatacgacgaggtgggcagccacctggccaactacgacttcatgatcgacctctcgcacttcaaaggccacgccatgggcggcttcggcggcgcgctgaagaacctctccatcggcgttgcctcgcgcagcggcaagttctacatccactccgccggcgagaccgacagccgctggaaacccgccgagcaggacgccttcctcgaatgcatggccactgccgccgacgccgtgcagcgccacttccgtcaggagggacgcaacatcgtctacatcaatgtcatgaacaacctctcggtcgactgcgactgcatgggctaccccgcttcgcccaagatgaaagacgttggcatcctggcctccaccgaccccgtggccctcgacaaagcctgtctcgacctcgtcttcacccacagcgacaccgagggcgacgatgccgcccccttgcaggagcgcgtcaacaagaaacacggcacccacatcatcacccatgccgagcgcctcggcaccggcaccacccgctaccgcctggtcaagctgtagccccgcgcaacctgcgcaaccagggtgcgaccagacgtcgtgaaaacgccgtctgattttcagtcacttcccgctatttcttcagtgtttcttcagtcatccactgaagaaacactgaagaaatactgaagaaataccgtcgaaataggccacctgtatgggtgtttaccctatggccaaaccatctggattgaaatattaaggaaaaatgggttaatattaccgccaaacctcccaagcattcttttcaatcaaaacagacgacgggagcattgctgctcccgccctcttgatagttttcacaacggaataatccttattgtgaattgcttaaaaagtgatgcaaaaatacaacttttatacaatatggcaaaaaaaattttgctatctattgaaaaacacgtatctttgcaccattgaaaacatttacaactatggctaaaatattaggattagaccttggaacaaatagcatcggatgggctattgtggacaatgaaaaaaaatgtattgaaggcgctggatctcgcatcataccaatggacgcaggactaatgggtgacttcgagaaaggcaattccatatcttttaccgccgaacgaaccaaataccgaggtacaagacgactgcacgaacgttttttactgcgtcgggaaagacttttacgcgcactaaacatcatggggttcttaccaactcattacgccgagcaacttgaccgctacggaaaactgcctgcaaataaagagcccaaacttgcatggcgcgaaggcaaagatggcaaacaagtgtttcttttcaaatcatcttttgaagagatgctgaatgatttccacaatgctggcatatcacaaaacatcccctacgactggaccatctactatctgcgcaagaaagctcttacacaacctctctccaaagaggagttggcatgggtacttatgcaattcaaccagaaacgcggctataatcaactgcgtggaaaggacgatgacgacacacaggattcatccaacgcaatggaataccacgagcttcaggtcatcaacgtggaagacagcggcgagaaggacaaaaaaggcggctcttggttcaatatcacactagagaatggatggatataccgacgcgctttccgaattgcacccgactggaaggggaaaacaagaccattcattgccacatataaacttgacaaagatggcaaccggaaagacgggcagccttctctgcgctcacctgaagaaaaagactggggattgcgcaaaattcgcacacagcatagcatagaccaatcaggacatacggtcggagaatacatatacaatattctcatttcaaatcctaaccaaaagataattggagaagcggtccgcaccattgaccgcaactactatctagacgaactgcacagaattttaaacaaacaacgcgagttcattcccgaactaaacgaccgtaacctttatgccaaatgtatcgaggacctctacccaagcaacgatgcctaccgcaatagcattgcaaaacgtgatttcacctatcttctggccgatgatattctcttttaccaacgcccgttaaaaagcaaactttcacttatcgacgactgcccgtatgaacaacgaaacggcaaaccgatcaagtgcatcgccaaatcacacccactctaccaagagtttcgcctatggcaattcatatccaacttacggatatatcgagaggatatcgacattacctataccctgcttcccaacgatgaagcctattcaagtctatacacttctctggcagcgatgaaagacatagacgaatccggaatacttcgatactttaaaattggcaagaaagaagccacacaataccgatggaactacgtcagagacaaaaaataccctatgggcgaaactcgtacagttcttttggaaggtttgcataaagcgggcattcccgacagtttcctcgttgccgacaaagaactgcacctgtggcacatcctatattctgtcgacgatacaagggaatacgagaaagccctgtacacctttgccatcaagcaaggttgggacaaagagcaatgtgaatcctttgttcaagcattcaagcgactgacggtatataaagagaaagaatatggtgcttattcggccaaagcaataagccgactgcttccgctgatgcggcgtggtcaatactggaatgctgaatcgatcgacgacgctactctcatccgcatcgaacacctcattaccggtgaggacgacgccactctatccaactccattcgggaacgattcagaggtttgctcaacatccagcagtgccaagggttcaacacatggcaagcatgctatctcgtttatggacgccattccgaggcagcagaagccaagaaatggaataatccgtcagatatcgatcaatatctgaatgaattccgccacaactcgctcaataatcccatagtggaacaggtggttaccgaaagcctgcgcgtcgtacgcgatatatggaaacaatatggaaaacctgatgaaatacacatcgaactgggccgcgaactcaagaaaacaaaagaagaacgagagcgcatgtcgcagtcgatttccgaaggtgaagccactaatcaacgcatccggctgctactcgccgaactgatgaatcccgactgtaatgttgaaaacgtccgcccacaatcaccctcgcagcacgagttactgaaactctacgaagaaggcataatgcaaagcggaatagaaatacccgacgacatccgcgatattcaaaaacgattcaacaacgcaaaaaatcagcccacccattcagagatactacgctacaagctgtggctcgaccaaaaatacatctctccatatactggtcgccctattccgctggcgaaactcttcacctctgcctatcagatagagcatgtgattccccaaagccgatggtttgacgactcactttctaacaaagtaatctgcgaagccgaagtcaaccaactgaaaagtcgcgaactcggtcacgaattcattgtcaatcaccaaggagagaaggttcctttaaacatgggtggcaatgtagaaatactctctgtcgaggcctacgaaaaactggtgaaagaactcttcgccaacaaccgacgcaaacgtgagaagttgatgcttgacgacatcccagaagaattcacctcgcgacaaatgaacgacagtcgttatatcagtcgactgatgttgcatctaatgtccaacattgtgcgcaccgaagacgaagatggcaagtgcgaagaagccgccacctcaaaaaatgttatcccctgtaatggtaatataacggaccgtctaaaacgcgactggggtgtaggcgacgtgtggaaccgcattatcctgccacgtttcgagcgcttgaacgcaatcaccgacaccaccctctatactgccaccaccgctgaagggcacaccataccgcaagtgcctcttgatatgcgacaaggctttaacaaaaaacgcatagaccatcgacaccatgcaatggatgccgttgttatagcctgctgcacacgcgaccatgtaaaccttctcaacaacgaagccgcaaagtccgataagaaacgcttcgacctgcaacataaactccgcaacaagggattctaccttgacgagaagggtcataaacacgaacgcttcacagaattcataaaaccttggcccactttcaatgaagatcttttcaactgcctgcaaaacatcatagtaagcttcaagcaaaatctgcgcgtcatcaacaagaccaccaaccactacactatgcttcgcgatggcaaacgcgtcagcgtcaaacagagtaaaggcgacagttgtgccatacgaaaaccactacacaaagagactgtcttcggcgaagtaaatcttcaactgaaaaagaaagtttcaatcaaaaaagcgcttgccgacatcaatagcatcgttaaccgcgaactgaaagaaaagataaaagaaaagaagtctctcggttattcagatatgcaaatagaggaatttctcgacaaaaacaaagatgtgtggagcgaggccgctaacggcaaaatcgaagtttactactataccaaagaaaccaacgaccgctattttgccacacgaaaagatttattgtcattcatgtccgactgcacaaccattgctgcagcagaaaaagccatcgatagtatcaccgacagcggcataagatctatccttcgtgcacacctgtcagccgaaggcaacaatccagtcgaagctttctccgccgatgggttggaacgaatgaacttcaacctcaaaaacctcaatggtggacacaatcacatgcccattaagaaagtacgcgtctacgaacaggcaaacaagttcagcgtgggaacctctggccagaaagccacaaagttcgttgaagcagccaaaggcaccaatcttttcttcgtcatctacaccaacagcaatggttctcgtggatatgccaccgtgcctcttaatattgttatcgctcttcaaaaacaatacgaaaaacactggaaagatcaccttgtcgagcgactctgtcatgatgacctatccctaatacctaagaacgcctctctgctttatgtgctttcaccaggagatttggtgtatgtgccgatagaggaagtagttcccacatcaaacaccatgatagacagcgatagactttataaggttgtatctatgacaggcgttcaatttatgtgcattcatcacaaagtagcagcaccaattgtcaacaaactagaatacacaacttcaaacaaaatggagcgtgctcttaccggtgaaatgattaaagaagtttgtattcccattcaggtcgacaggctggggaatattaccaaaattggataactcatgatcaagcgcaccatctgtttttctcacccagcttatctgtcgctgcgcaatgggcagttggtagtcaaactggagaagcacgacgatgagccggagaaacaggcaacaattccaatagaagacatcggcgttgtggtgctcgaccacaggcaaataacgctcacccacggcgttatggccgcattgctcgacaataacgcggcagtcgtcacctgcgacaattcacacatgccagtaggtctcatgctgcctttggaaggacatacggtgcagcaggagcgcttccaagaccagctttgttcctcgctaccactgcgcaagcaattatggcaacagacggtgcagcaaaagattctaaaccaagcagccttgctgaaggaactgcacgacatagagacaggcaacatgcgccaatgggccaaagaagtactctccggcgacagcaccaatcttgaaggacgtgccgctgccttctattggagcaaaatgttccccaccatccctgatttcacccgcagccgcgacggtgcttaccccaacgccctgctgaactacggctacgcaattctacgtgccgtcatagcccgcgcccttgtcggtagcggactactccctaccctcggcatccatcaccacaaccgctacaatgcctattgcctagccgacgatatcatggagccctaccgcccttatgtcgaccgcctcgtggtggagacaatggctgtatgctgcgacgtagaagtcacaacagcaatcaaaagccatctgctcaccatccccactctcgaagtgcacatcggcggacaacgtagcccgctgatggtcgctgccagccagacaacagcctcgttggctcgttgcttctctggcgaaggccgccgggtcgtttacccagaaatgtaagatggaccgtttcagcgaataccgcatcatgtggcttcttgtgttcttcgacctgcctaccgacaccaagaaagagcgcaaggctgctgccgacttccgcaagaagcttatcggcgacggattcacgatgttccaattctcgatatatgtgcgtcattgcgccagccgtgagaatgccgacgtacaccttaaatgtgtaaaggccagcctgccagaatacggacaggttggatgccttactatcaccgacaaacagttttcggagatcgagttgtatgtctgcaagaaagaggtcgagcccaacgccccgggacaacaactggaattgttttagaattgaaaaaacagttaccataaacaaaaaatcccgcctatatggcgggatttttttagtctttgacagctaatagtacattgtatatcactcgattattgacatcgtgatgtcaaagatctattatcaatgtttacttttcaagcaattcacaactgatgcgttgttgttgtctgacatattcgagatgtcaaagatctattatcaatgtttacttttcaagcaattcacaaccgggacgcggagcattctttacagcatgtcgatgtcaaagatctattatcaatgtttacttttcaagcaattcacaacgaaaatcaaaccgatattatagttactaagatgtcaaagatctattatcaatgtttacttttcaagcaattcacaacagcctcttatgattgatggtgttcctgaatgatgtcaaagatctattatcaatgtttacttttcaagcaattcacaacagaatatgctggcgatggaaaaggagaaacgatgtcaaagatctattatcaatgtttacttttcaagcaattcacaactgcagtggaagcgtgacaatgagtctctcggatgtcaaagatctattatcaatgtttacttttcaagcaattcacaacgcacaaggtggtgatgtttgacagcatcgaggatgtcaaagatctattatcaatgtttacttttcaagcaattcacaactaatgctaaaaccggacgtattgaggctaagatgtcaaagatctattatcaatgtttacttttcaagcaattatccttgttctatctctctgtttcttttctgttttattcgttttttgtcattccgatttcacggtgcaaagatacgaattattttccaaatcgggcaaaagaaaaaagtggagcccggaaagactccactttaaatagtatctacttaactcctgtctccttaactactgcaattagtagctgcgggcgaagacgacgcggcggtggctgggcttgccgctgtagatgcaacggccttcttcctcgggggcgtcgaaggggatgcagcggatggtggccttggtttcttccttgatgcgctcctcggtctcgacggtgccgtcccagtggcagagcaggaagccgttcttctcgatttcgactttgaagtcgtcccaggtgtcgaccttgcgggtcatgctggcgcggaagtcggcggctttcttgtagaggttctgctggatctgctccatgaggtcggcgacgtggtcggcgatgccttcgatgggcatggtgatcttctcgagggtgtcgcgacggcagacctcgcaggtgccgttctcaaggtcgcggggaccgatggcgagacgcacagggacgcccttgaactcgtactcgttgaacttccagccgggtttgtactcgggacggttgtcgtacttcaccaccagacctttggcttcgagggcgcggatgatgggctcgatatgcgagtcgatctgcgccatctgctcgtcgctcttggcgatggggacgatggccacatggatgggggcgaggtgcggcggcaggacaaggccgttgtcgtcggagtgggtcatgatgagggcgcccatgagacgggtgctgacgccccacgaggtggcccagacgtattcgagctggttctgcttgttgaggaactgtacctcgaaggctttggcgaagttctgtcccaggaagtgggaggtgccggcctgcagggccttgccgtcctgcatcatggcttcgatgcagagggtgtcgagggcaccggcgaagcgttcgttgggactcttgtggcctttgaggacgggcatggccatgtacttctcggcgaactcggcgtagacctcgagcatgcggcgtgtctcggcctcggcctcctcgcgggtggcgtgggcggtgtggccttcctgccagaggaactcggcggtgcggaggaacatgcgggtgcgcatctcccaacgcacgacgttggcccactggttgcagaggatgggcaggtcgcggtaggacttgatccagttcttataggtactccagataatggtctcggaggtgggacgcacgatgagctcttcctcgagtttggcggcggggtcgacgacgacgccgttgccgttggggtcgttcataaggcggtggtgggtgaccacggcgcactccttggcgaagccctcgacatgctcggcctcacgggagaggaagctcttggggatgaagagggggaagtaggcgttctggtggccggtctgcttgaacatgcggtcgagctggtcgtgcatcttctcccagatggcgtagccatagggttttatcaccatgcatccgcggacggcgctctgttcggcgaggtcggcacgtacgacgagctcgttgtaccattcggagtagttctcactgcgtttgggaaagtcttttgccatattttttgactattgaatacaataattaataataagtttcgttaaaaatggagtgcaaaagtacacaaaatatttcacttggtgaaatgattttagacacgaaatgagcaaacgactgataatcacagcatcactgatatgctgggcactatgttccaatgcccaggtgaagctcacggccgacaccttggagtgccacgtgataggtttctcggcgggaatactgatgcctggcggcggcagcgccagcgagggtgcccttggcggcgggatgaaagacctgtacggaagtccgtggctggacttcgcactcaactgcgactacaaatacaagagtaactggctggtgactctggacgccgacctgtggttcggcctcaacagcgacaacctgcaggagcgcagcgaacgtatgcccaacgtatatctgcccaacggcatcgcctattcgtggggcggcacagacggatatgtcaccgcctacaaccgcggcttggcagcccgtatcggcggcgggaagataatcccggtgttgaaaggcaaccccaattcgggcctgctgctgaaagtgagcggcggctggttcatgcagcagacggtgttccaccaggagtttaccgaagccccagtgccgcaggtggtggacgaatacggcaagctgtacgaccacctgcgcaacggcgccatactgaccgagagcataggcttcgtattcatgagcaactactccacctacgtcaacgtgcgtatcagcttcgacatcagccagtgcttcagctggtcgagccgcccatatatcatagacaacaggatggggctgaacggcaaagacaacaaccgctacttcgacctgctctacggcgtgaagctgacctggatgttcccgctgatgggcaagacgacgtatgattactattattattaagtctaagagtctaagagtctaaaagtctgaaagtctaaaagactaaaagctatgcgtctgatttacaccattgggatttggttctacacgctgggggtgcgtgtggcggcgctgttcggccacaccaaggcgtgccagatggttgaggggtggaagcactggcccgaaatggtgaccaagctgaaccacgaacgtccagtggcatggttccatgccgccagcctaggtgagttcgagcaggcgaggccggtgctggaagcctacatcgagaggcaccccgagcaccaagtgctcgtaactttcttctcgccctcgggctacgaggtgcggaagaactacgcaaaggcacaggctgtgtgctatctgccgatggacacgccgcacaacgtgcgacgtttcctcgatgccgtgaagcccacggtgacgttcttcgtaaagtacgagttctggtacaactacctcggcgagctgcgccgcaggggtatccccacatatatcttctcggccatattccgcccggggcagtatttcttcaagccgtggggcagatggtacctacgacaactgaaagagtgcttccgccacctcttcgtgcagaacgaggagagcctgcaactgctgaaagcccatggcatagagcattgcaccatcgccggcgacacgcgctacgaccgtgtgcaccagatagccaccgccgccgagggggacacggtggtggaagaattcctgcaaggctatgaagggaaggtgctcgtgtgtggaagtacctggccgcccgacgagcagctgctggcacgactgaacgacggcaaggagtggttccccggacggctcatcatcgccccgcaccagatacacgaagagcacctgcagcaaatagagagactgttccccgacagcgtccgctactcccaactcaagcaatcaagcattgtcggccgagccgacggcacaccacaaacaatcaagcaatctcaggctctcatcatcgacaacataggcctgctgtcgaagctctacagatatgccgacgtggcgtatatcggcgggggcttcggggtgggcatacacaacatactggaagccgtaaccttcggcaagcctgtggtcttcggtcccaactggcacaagttccaggaggcacacgacataatagaactcggaggcggcatgaccgtcgaggagcaccccgatgtatcgctcctgcggaaatggttcaccgacgaggaggtctaccgtgccgcctcggacgcctgtctgaaacttatgcggcgcaacctcggcagcaccgacatcatactcaacacccttgaagcgtagactgccatatataatcatcctgttgctggctgtcgttgcagcaagctgcacgaacacgcgctaccttgccgacgacgagtacgccctctatcggcaggtggtggatatcagcatggccgacagcagcgatgtgacgcccgaggtgtcggcggcgctgaagaagtcgaagagttacatgctgcagaagcccaacagcaaaatactctttctgggccgcgtaggcatgtatatctacaactgggcatcgcccagcgacagcaccttctggggcaactactggcgccgcacaggacaggccacggtggtgtacgacgaggacaaagcctaccgctcggcgcagcagctgcagcaactgctcgagagcaaaggctgtttcggttccaaggtaagtttcgacaccctggacacgaagatcacgcgacgcaaacgcgacataacgattggctatcacgtggcagccacccagcgctatgtgattgacgaggtgctctatcgcaccgacaacagcacgatagcgaagatgctcgacgagtggcgcagcgactcgcccatccgcgtcggcgactactacgaccaagagaacctcgccgccgaacgagcccgcctagcctcaaacctgcgtgaatcgggattcttccacgcgtcgggagagaacatctcgttcctggtcgacaccacctatctgagcggacacctgagcatagatgttgtcgtcgacggttcggcgctgaagatataccacatcaacaacatcgacatattccccaacagcaccgccaacctcagagaggcgccgcggcagttcgacaccctaatctacaactaccctggagcccgccgccgcatcgacctgcactacatatacgaccgtccgatgagcatcaggccgcagaccatcagccgttcgctctccatcttccccggcatgacgtaccgaccgcgctatatcaccgacacctacaactcgctgctgggactgcgcaccttcaaatacatcaacattgagttcaccgagtcgccctcgtcgaccgacacgctgccccttgtcgacgcgcacatacgactcatcaacagcacgatgcagcggctgtcgctgtcgtttgagttgaccaacgcctcgccgctcggttcgtcggacagcagttcgttcctcctcggcggcaacctgggtctgcagacatcgctggaataccagcacaagaacctgttcggcggtgccgagctgctgcgagtgaagaattccatgctgctggaacttccgaaactcatcttccgccagagcggccaaggattctatgacaacttcagtgccttcgaggccgacttggagttgtcgctcgacatgccaatcttcctgctgcctttcgccaacggcatccgtttctaccgcaccaagccgcacacactgctgaccctcggaggcagctaccaataccgttactactacgagcggatactggcaaacacatcgttcggttacaactggcgctggaacaagaatgtctcgcaccagctgctgcccatagagatgacctttgtgcggatactgaacctcgacgccaacttcctggcgcgcctgaaccagctgtctgaccttaggctgaaataccagtacagttcgcactttatcctcgacggccgctacgactacacctacagcaaccaggtgtacggctcgcggagcaacttctcaatactccacctctcgtttgagacggcgggcaacctgctggcgtgcatcggcgccatagcaggcatagaggccgacagcaacggtgtgcgccaagtgctcggcgtgccctacgcgcagtatgtacgtcttggcggggaatggacacgctaccactacatagacgacaagagttcgcttgttgcccgcatacttcttggcataggcatcccctatggcaactctatctcgatgccatatgagaagagtttcttcggcggcggtcccacgacgatgcgcgcctggcagctgcgccacctggggcctggctcgtactatggcagcgaagacatgctcgaacgtgtgggcgacctgcagctggtgctgaacctggaagggcgtttcccgatagcaggcgtgtttgaaggggcagtcttcgcagatatgggcaatgtatggctcctcaactcgtcggagcaataccccggtggcgagataaagttgaagagtctgccttcggaggtggctgtaggcttaggtcttggccttcgcgtctctgtctcgatagccaccctgcgactcgacttcggcataccgttatacgaccccggctatgccctctcgcaccgcttccgtccgccgcactggcatttcaaccagatagtaacgaacttcggtatcaactacccgttctaattagtgatgagtgaattgtgatgagtgaattgtgataagtaaagcggttagcgcgattagcaaaatagtaaaaaaacaaacgatcaaacaacaacttgatgaattccaagctgataacatatattctcataacgttctctgtcattttctggggcatcagtttcatcatgaccaaggagctgttcctgacggaagagcacatgactgtcacggtgctgattaccatacgactggcgatagcgtcgctcgtaatgctgccggcgctggcacttacacgccgactgcaacggatacggaagcaggacatcaaatggtttttgctgcttgccctctgcgagccgttcatctaccacctgtgcgaaacgtcgggtgtgcagctcgtcagcggctcgctggcctcggtggttattgccaccatacctctctttgttcccttcgggatgtggattgcctaccgccagcgcatacgccttccgctgattatcggtgtggtgctgtcgctgacgggtgtcttcatcatgctgatgggcggcgaaggactcactggcaacctgaaagggctgctcttcctttcgggggcagtgattatagccgttgtatataccatactgcttgtgaaggtggttgacaaataccacccgcttgtggtcaccacctggcagaacatcataggcctcgcctatttcctgccgctgatgttcgccttcgacagttcggcattgccgctgctgtcgtggagccccaagatgctgctgttgctgctcgtactgggtctcttctgctcgacgctggcctatgcgggctacaactacggcgtgcgtaacctgggagcctcggaggcctgcatcttcaacaacgccatacccatcttctcgctgatagccgccctgcttatagggcaggaaagtttctcgtggggcaaactggcgggcatgtgcatagtaatcgccggtgtcgtcatctcgcagataccagcaaaaaacaataaataacattattattaacccaaaaaacaacaattatgaaatggttcattaaatgtttcaagcagtacgccgatttcagcggccgtgcacgtcgcaaggaattctggtggttcactctgattaacttcatcattgggatgatactggtcagctgttggatatggcctatcatttcggtcagtattaaagccggcattgaaggcgcagatgccccggacatagaggcgctcaccctcatgctgctgaagagcccgttcttatacatctacatcatctactatctggccatactcattccgaccattgccgtcagcgtgcgccgtctgcacgacatcggcaagtcgggcttctggtatttcctgcccgttggcggaagcgtactgagcatgttcgcaagcctggcatcgcagtccaacacggcactctatttagtgcttgctttgatatcattggctatcgccatcgttttcctggtatggatgtttatggactccaactacggtcccaacaagtacggcctcaaccccaaaggcgagggcaaccccgcagaagagaccgtcgcccctgccgaataaacaatagcagaattaagggataaagaagaagagccgcgaccaagcaggttgcggctcttttattattttgggaaatccattatttcgaggtctttgggggtgccgtcgatggtgaatcgcaccagggtgccgaccttgtggaagccctgatgcccgcaggcaccgg

SEQ ID NO: 1171 - DNA, 24464 bp, synthetic construct
  source 1..24464: mol_type = other DNA
  misc_feature 1..24464: note = Synthetic
agtagtttcaatcctcttttcagatgcgtcttaaaagaattaatgctgatacccatttcctcggctgcttcctgatatcgttttccctggatgtataccatttgaatggccatctttttctggccggaaatattattgagggaagtgtgcaattgtttataataatccggcgcaacatcaggcagtgcctggcaggtttcatcctgaaggtttgaaaatgcttcctggtgttcgtaacggagtttttgttttttaatatagttgaggcaacggttcttcacggcggtatgcagataacctttcacatctccgtcaaactggagatacaatttcttatcccatatgtccatgaagaaagtctggatcaggtcttttgcttcctgttcattctgaaggaaccagtaggcgttcacacaaagcattttataatactttacgaataaagcatcaaatgcagtcaggtctccctcttttaactgttctaccaatagtgtgtctggagaatgattcattctatcctatttccctggttgatacttgcttatcgtggcgaattatgctggttgatcgaagagtaagatagaaaatactttttatttccaaggggaattaaaattaaacaccgggccacaaataggctattttttgcgttaaaaagactacggctgtataatttaacgtttctttgataagtgtagaattgacgtgaagccttgagatacaacagttaaacttatgctatttatttacactataacgtttttacgtatatcaaactaacctattatcaggagtcaatggaatgttgggttattaatggtaattttgcaccatgaatatttcaactatttcaagaccgaggattcactttacacaggaacatgaatggattgattttaatggaaccgtgggctttgtaggcttatccatgttcagactcgcaggaataaagaaaatagacaacatcgaatgggtcaataataaaggcacaatcgaaaaaaacacgctcatcgcaaatatccactcgggcagtaccgttatcccattgcactctccgttgcgttgcaagttcctgggcattaatgcaaagttaaagaacaacctgaaccttatactcgagagtccgcaggaccagggttggatcttctttgtgacgcctatgaagttccagaataaagagaaagaagagttactgcaaccggcagattatcaaaaactcattcgcggcattaaagtatcctgatacagcgtatgcaaaatccaaatctagtagttaagcctgccagatatgtgaccgactctgcttttgactggttgtatcctgaaaggatccagcaattgtcaaagcggcattggacgcccatgagcgttgcgagaaaatcagcacaattcctggctaacagtccgggtaaaaaagtgctggatattggcagcggcgtgggtaagttttgcattcttggcggcatcagcttcccacaggtgaatttttacggggtggagcaaagagaggaattataccatctttcgctggaagcgaaggaagtggccaatgtgcagaacgtggatttcattcatgccaatttcacaaagattgacctggatgcatatgataattactatttctacaattccttctttgagaatattgatgacggggacaagattgacaacgccgtagaatgttctgccaacctgtacgtttactactcccgttttctttatagagcgctggagaaaaaatgcagcggtacacggctggttactttccacagcctggaaaatgaagtaccgcccagttaccaggtggtggatgtttctcccgacttccagctaaaaatgtggatcaagcgctaatagatctccggatttaccacaaacggtaaccgttctccttttaatcctgcaataatattttgcgctgccatggtagccatagcatttcttgcttctactgtggcagagccgatatgcggtaataccgctacattgggcatatctaatagtggattatctgctgccataggttccgggttagtcacatcaagaccggcaccccatattactttttcattcagggcattgatgaggtctgtttcattatgaatagatcccctggcggcgttcacaaaaatggcggtgggtttcattctatcgaaagcggctttgttgaacatgccctgggtttccggtgttagtgcagtgtgtacggataatacatcactttgtgcgagcagctcttcgaatgatactttttctgcttttaatatttcttctgcttctttatttgtgtggcggttgtggtagatcactttcataccgtatgcgccgatgcaacgtttggccatttcgaaaccgatctttcctaaacccgcaatacctaatgttttaccggtgagttccatacccaggttagcggttggttcaaaaaagccccactctcctttaccgatctgtttatgcatgtagaatgctttgcgtgaaacggcgagcattaatagaaaagcggtatccgctgtggcgttacttaatacgccgggggtgtttccgatagggatctttaattccgtagcagcttttacatctacattatcaaaccctactgcatgtaaagcaattactttcaggtgactgcattcctgcaaaaaactactgttaattttattagggcctacgcttaataaagcatcatgttgtttacaatatgctatcagttctgctggtgtgaggtctcgcttttccgtccactgtgtaatatggagacctgcgtcctgtaacagttgtagtcctttttcgggaataacccttgtaataaaaaccttcatgttctaaaaatacagctttctgccttaggttagtgttaaggttgttttagcataaattattatctatatttatcccaattccacagtatatgaaacacgtaaagcgcgccttacttgccggcattgttatgcttgccctgtacggcttcattacacaacatgctcctgccaaatttaaatggtccggcgcctggcagcctacccgcaaaagtgcgggggatggggttaccaaacttgatatcaaaataggtgcctttatcaatctcccggatcctgctgcgctggcaaaagttattttccatgtcaataaaaagttccctggttctgcgcccctggctacctgggcggtaggtgatctatctaaactcacacctgcacacaaaggtttatctgcggaagagcatgagttatatttatcccatatggataaagcaggggtgactgttttcctggaagtgtttccttttaagggagatgatgttcctgcgatgatcgatcaatggttgaagaaattttcacaccatacctgcattgcagggctgggtgtagaactggaatactatgggaaagccacagattctctcgctaaagtatgggatgaaaaaataaaatcgcataaccctgcttatcgtttattccttcgtcattatagtccttcttttatgccgcctgtttatcgcggcaaaggggatctgctgtttattgatgatgcatcagaaggtacgattactgaattaaataaagggtttgctgactgggcgaatcatttttatcctgctgcctgtgcatttcaactgggttatcctgctgatgaagatggcatgaatggcagtaaggaatcaggatggtggaaactgaaagaccctatccgcgattggggaaatgatatactgccgctgatcaaacatccggatcaggaattaggactgatatgggtgacggctaaatccggcaagccttataatgctacatgggatctgactaaataaattttcaaatgaaattctctttcttttttctggtggtgctgttcgcacttggtgtaaatgcacaaactgtttcgcttacacctgcacatggccctgagccaaagatcaatgggccgaaagtatttggtgtaaggccggggcatccgatcgttttcactattcctgcttccggcaaacggccgatgaccttctctgcttctaatgttcccgatggagtaaaagtagatgctaacacgggtaagataaccggcagcatttccaaaacgggtgcgtatgttatttcgttacaggcgaaaaatgaagccggtaccgttcggcgggattttaaaatagtagtgggagaagatattgccctcacgcctcctatgggttggaaccactataatatttatggtacccgcatcacgcaggaagatgtattggcacaggctaaggccatggcatccagcggactgatcaatcacggatggtcttatatgaatatagatgatggctggcagggtgaacgtggcggaccgctacatgctatacagccagatacttcccgtttctcagatatgaagcaactgagtgatgagatccatgccctgggacttaaattcggcatatactctacgccatgggtagaatcttatggtcatcgtataggcggtactgctatgaatgcagaaggaaaatttgaaaagaccaaagaacaggtaccgcggaataaaaaacaactcccttatgctataggtacttattccttcgtggatgcggatgtaaaacagtgggcattgtgggatgtggattatatgaagtatgactggaatcctgcagagttgccggaaaccaaaatgatgtatgatgcattaaggaatagtggcagagatattgtttacagtttatctaacagtattccgtttgctacgatcgctgatctatctgctgtatctaatgcatggcgtaccggtggtgatatcaaagacaactggaaaagtctgaaaagccgcatccctacgcaggataaatgggcgccctttgcccgtccgggtcattggaacgatccggatatgatgatcgttggtgtagtgggatggaatgcaaaagataaatggccttctaaacttacaccagatgagcaatatgcccatatgagtgcatggtgtttaatgtctgtccccctgttattgggtaacgatatgacaaagctggatgactttaccttaggattattaacgaatgatgaagtgattgctattaaccaggatgctttaggtaaacaggctacggttatatccaaacagggagacctggtagtcatggcaaaagatattgaagacggatgcaaagctgcgggcttgtttaatctcgcagacagtggcacacaacagcttacattgaaatgggcagaccttggcataaaagggaaatatgttgtgcgggacctctggcggcaaaaagacctcggcgtttttgaaggggagtttaaaactcctgtggcagaacacggcgtggtgatggtacgattggaaccagttcctcctccaacattaagatcggccatgaaacctgctgtgaaaaatggtggatttaaaatgccggggtatattctctggtgcccttctgtgatcaaagtgggtaacacgtatcatatgtttgcttcccgctggccggagcaatatggattaggcggctggacgaaatattcagaagtagtacgtgctacttcaaataatttatatggcccttatactttccaggaagtggttttgcaaaagagagaaggttattgggacaatgaccgtgcacataatcccaagatcgttaaagcggggaatacctttgtactgtattatatttcttccgctaacgaaacgggatatgctactgctgataagatcacagggccctggaagagaatggatagcctggcgatgccgttttccaatcccgcgccgcttattagaaaagatggcagtgtgtatgtattcgggaggaaagcggtgaaggatatccggattgcacaaggttatacggctccttcttttaaaggtccttatacgcgcctggaagcagagaatctcctgcctggtttgaatcaactggaagatcctactatctggtgggcctccggtcagtacaatgtgatcctgagcgattttcggggagatgccaccggggtgaataaagatggtgcgcagtattactctaaggatggtattcattttgcgctgctttcgaaggaatccatctactctaaaaaagtaacatatgatgatggcagctctttcaccttccggcggagggagcgtccttttgtatttaccaatgaaaaaggtgaagtaacggccttcttcacgtcctgcctcacggataaagaacaatcctggatagaagtgcagccggtggacaagtacattccctaacaataaaatcatgttgcacagcccaacataatttataatttagtggttgatacggaaccatttattagaaaatatcacgtttacaatggataacagaagagaatttctgaagaaatctatgttattatccggggctgccggtgtttcttctattttgccagcgtccatacaaagggccatggcaatagatccccggccgggtagtactttcctggatgcagaacatgtggtgatcctcatgcaggagaaccgttcctttgaccactgctttggtacgttaaaaggggttcggggttttaatgatccccgtgctgtgaccttgccagacggcaaaccggtatggctgcaaaccaatgcaaaggatgaaacctactcccctttccggctggatatcaaggataccaaagtaacctggatgggtgccctgccccattcaagggccagccaggtggatgctcataatgaaggtaaatatgataaatggctgatcgctaaaaaaccgggtaacaagcaatttgagcatatccccttaaccatgggatattatacccgggaagatattccgttcaactttgccatggcagacgctttcacggtatgtgaccagaatttctgctctgccatgaccagcactacgcccaaccgttctttcttctggacaggtcagatcaacagtaaagaagatgggcttactaaggcgaacatccgcaatacggactacagctatggtaaactgaaatggaaaacctttcccgaattgctgtctgaaaacgatgtcaaatggaaattctatcagaatgatctcagcacaggtggtggttatacgggagatgaacgttcctggttagccaacttcggttgcaacctgctggaattcttcgcggcttataatgtgcagttctctgaaagatatgtgaaaagtctgcagaagcagattgaaacactgccagacgagatcaataaattacaggaagttacaccttccacagaagctgctgctacaaagaataaagcggatgtgattaaaaagcaggcagtactggataatgctgtatccgaaatgtcgaagtggaataaagaaagcttcgaaaaactaacggataaacagaaagaactttactatagcgctttcgtgatcaactctgaagatccaggttaccgttccattactactttaaaatatgatgataacggaacatcccgtgaaatgacagtaccggccggagatgtactgtatcaattacgcaaagacgttaaagaaaataaactacccactgtatcctggatagcaggaccacagaaattctctgatcaccccagcgctccatggtatggtgcattgtatgtatctgagatcatggacatcctcaccagtaatcctgaagtatggaaaaaaactatcttcattgttacttatgatgagaacgatggttacttcgaccacttcgttccattctccatcccggatgaaaacaaacctggtacaggaaaagtttctcctggcatagatacagaagtagaacatgtaagattagcgaatgaactggcacaaggcattgagaagaaacaagcccgcgaggcccctatcggactgggtttcagggtacctttattaattgcttctccctggagccgtggtggtaaagtaaactcacaggtttttgatcatacttccacccttcagttcctggaagaattcgtgaataaaaaattctccaagaaaattcacctcgataatatcagtcagtggagacgtacgatctgcggtaaccttacctctgcgttcacgcccttcgacggtacaaaaaacgacttaccttttcttaataaagagaaattcgtagagacgattcataatgcgcaatttaaacctgaacctaccggatataaacaattctcttcgcgtgaaattgcagcgctgaagacgccaaacccattggcgaaacaggaaccggggcttcgtgcttcctgtgcattaccttatgagttatatgcggatggtaagtggaatgcagctaccaagagtttcgatctcacgatggctgcaggtaatcaactattcggtgcaacatcagcaggttctcctttcagagtttatgctcctgtttcatttgccggtcaaagtttcaggaactgggattttgcagtgaaggcaggggagaatctggggtatagctggccggtagcgcagtttgcagacagtaaatatcatcttcgcttacatgggccaaatggtttctaccgggaatttaccggtaatgatcatgatccttctatggaagttagttgtgaatatgtgcgtgataaaagtggtagtctggttattaagatccgtaatacttcatcctcagatgcgctaaagatcacggtgaaggacaatagctataagcaggcagatgtgcagcacatcatcggtaagggcagttccaaggatattttcctggagctgggtaagaaccataactggtacgactttagcataaaggtgaatgggtttgctgcttttgagaaacgttatgcaggaagagtggagaacggggtggaagggtttagtgatccgttgctttcttaaagttttgtttgagggctgctctttgaagcggcccttttttttgatctcgttttcttgtgatttgctttcaatttcaatcttcgtttcataaatgatgaatcggattcatcatttcctgcttggatgcaagtttagaatccctttatctttgcaccatcatgaaacaaactacgtcatattgcctttcactgagttgctatctgagcaaccgggaggtcgtgtgattacttgaataaaggaatttcgaacgcctcttggtttatactgagaggcgtttttgttttttatacacccctgtgggcaaacgggaaagtcgcctgacttaggatcaggagttttgtgggttcgactcccaccaggggtacttatgggtgatcggctacgatggtggagtagcaccggactgtaaatccggtacatcagaaacgtaataggttcgaatcctatatcacccacgaatggaggataggcaaatgatggtttgttgcggcaccctgctaaggtgttccggtcttttccggtgatggttcgattccattgtcctccgcatatgatcatgtacccaatgttgctataggggttagtctgcaaaactaacttaacgcaggtttaattcctgtcatgatctcttatttggaagattgccagagttggtaatggcgcagtcttgaaaactgacggcggtgaaaaccggcaaaggttcgaatcctttatcttcttctgttggtattcttgtgtgattttcttttagaattatcggtatcttagattattcacaacgaagattctgaaatgaattcaggagttgctatttgctttcaaattatctgtactcgaatctttcaaaacgccaacccatggtcatcctgagcggagtcggttgtgatttgctttcaatcttctaaacataccaaccgttttgtctattcaaactcgtttgtcgtcaaccgttaaaattcaccagcactacaccttaacctccagttaacaatcatacataaatatttcgtttaaaattggggcctaacctatctattaaatagcatgcacaccaaaacaaccatcctctatttaacagcatcccatccttccataaaacaacaatcccgccattagcgggactcctgtaaaagttttcactacggaataatccttattgtgatttgctttcaaactgaaattaataaattccaacatacaaactacgctatgaaaataaatcttggcctcgatataggcacaaactcaattggctgggcaatagtagaaaccactgatgctggtaagcctatcaggaatatcgcagcaggctcccggatcattcctatgtcacaagatatcctgggaaatttcgacagtggccaatcacattcgcaaacagctgaaagaacaaacttccgcagtatacgcaaggtcagggaaagatcacttctccgtagagagcgattgcacagggtattgaatatcctgggatttcttcctgaacattattctaaccaaattgatttcgaaaaaaaattaggtcaatttataccgggatcagaacctaaactctcctatcacacacaattcattttcgcaaactcgtatgcggaaatgctactggatttttccaggcaccaacctgcattactggcagaaggaagaatagtcccgcatgcatggaccatctattatctccgcaagaaagcattaactgaaaaaatagaaaaagaagaactggcctggctcctgctcaacttcaatcaaaaaagaggttactaccagttacgaggagaagaggaagacgaaaccccaaacaagttggtggaatttcacacatttaatattgtagacgtacaggcagcagaacgaaaaaaaaatgaggaggacacctggtacaacatccaacttgaaaatggctgggtctacaggagaaccagtagggctccattagactggattggtaagagaaaagaattcattgttactactgaactgaacagcgacggtacaataaaactcgacaaggatggaaaagaaaaacgctcattccgtgctcctgatgaaaacgactggacacttctaaaaaagaaggcggaatatgacctgagtcatagtagtaaaacagtaggcgcctacatctatgatacccttcttcaaaatcccaatcaaaaaataaaagggaaactcatccgtacaatagaaagggaattttataaaaccgaactccaacaaatactccatacgcaaaaaaaattccatccagcactaaatggcagaaaagcctattctctttgcattgaagaattataccggcaaaacgagttacacaagcataatatccggcaaaaagacttttcctatctatttgtggatgacatcattttttaccaaaggccactaaagagcaaaaaatcgcttatcagcaattgtaaccatgaaagcaaactgtctcccaaaggggaagtgatccctgtaaaatgcatcccaaagtcccatcctctattccaggaattccggttatggcagttcattcagaacctaaggatatatgagaaagatactgatgtaaacatcacagatgaactgctcaaatcagaacaggactgggaaagaatattcgaatggttgaacgacagaaaagatatcgaacagaaaatactattgaaacaattcttcaagctaaaaaaaccggatgaatatcgatggaattatgtggaagataaggcatacccctgcaacgaaacaagatctcagatactagccaggttgtccaaggtagaaagtgtgcctgtcgccttcctgacaaaagaaaatgaagaagctttatggcatatcctttattctgttgaggacagggtcgaaattcagaaagcattgaagacgttcgcccaaaagaaggaactgggggatgactttgcagagacgtttaaaaagttccctccatatgtgaaggattatggtgcattttcagccaaagcaattgggaaactgttgtcattaatgcgtatcgggaaatactggcagccaggtaacattcaccctcacacattacagcggatcgataaaatcacaaccggtgaatatgacgaatcgattaaggacagggtgagagataaagcgatatcacttaagagtgcatcggattttaaaggattgccgctttggctggcctcttacattgtttacgatcgtcattcagaagataaagaagccttacaatggagaaggccctcagacatttccctcctgccacaacacagcctgcgtaatcccatcgtagagaaggtgatcaatgaaacactcctcgtagtaaaggatatctggaatggatatggccatggtaaagaaggtttcttccatgaaatccatgtagaacttggccgggaaatgaaaaatcctgcgaagaagcgtgagcaaatgacaaaacaggtaattggaaatgagaacaccaacctccggataaaagcattactagcggagttaatgaatgatcctaatgttgagaatgttcgcccctattctcccatgcagcaggaaatcctgaagatctatgaagaaggggtgctgcatgctgaaaatgatatacccgaagatatttctaaaatagccagacagtctcagctaacaacagctgaactatcccgttataagatctggcttcagcagaaatataggtctccttacacagggaagataattccgctgaataaattgtttacaagggcttatgatattgaacacatcattccgcagtcgagatactttgatgattctttcagcaataaggttatttgtgaagtggaggtgaacaaggataaagataaaaacaccgcctatgaatacataaagaacaatggtggcaaaataatggaggccagttatggagagaaaataaatatccttaccgttgagcagtatgaacaccttgttaaaaacagtttttctaaaaacagatcgaaattaaaaaaactcctgtcggaagacattccggaagtcttcattgaaagacagcttaatgataccaggtatatcagtaaagttgtaaagaacctgttatctaatatcgtcagagaagataatgagcaggaaacggtttcaaagaacgttattagcagtaatggtaacattacggcagcacttaaacaagattgggggctaaatgatgtgtggaatgatatcatcaccccgagattcgaaagattaaacgaaatgacgcaaagcagccgatttggtaagtgggtaaataaagaagggaagctggtattccaaacagaattgccgcttgaacatcaaaaagggtttaacagaaaaaggatcgatcaccggcatcatgctttggatgcaatagtggtagcctgtacatccaggaatcatatcaactatctgaacaatgaaagtgccattggtaaagggcgttcaaaagcggaaaaggaaaagaaacgttatgacctgaaacataccttatgctttaagaaatataatgacgatactaactacaaatgggcatttcataaaccctgggagagcttcacccaggatacgggatcactcatcaatgatataattgtcagctttaagcaaaacgtccgggtgatcaataaaactaataaccgttatcaaggctggatcaaaaatgaaaacggagaactaaagaaaggctttgtcaggcagacaaaaggtgacaactgggcaatcaggaaaccccttcacaaagataccattcaggggctgattcaattacaactgaagaaaatcgtttcaacatctgcggcattgaagaattgggaaatgatcgtggataaggacctgaagtctaaaatcaaggaatggaaggcgcttggtcagaacccttcggtgctgctaaaggagcagggaatctccagaatagagatatactattgggacaaggaaattgtggcaacccgggtgaaaatagatgagagttttgattctaattatattgactgtataacggatacagggatccgtaaaattcttcgtgctcatctggcggtatttaatgaaattcaaaacggaaagatcattgagcatcctgagttggcgttttctcctgatggactggatgctttaaataaagaaatccttgctctcaatgatggaaagcctcaccaacccattctgaaagtgaggacttttgagcctaaagggaataagttcaatgttgggcagacgggtaataagaaggataagtatgtggaggcggctaaaggaaccaatctcttctttggcgtttaccaggatgaaaagggcaaacgggttacggaaacaattccacttcatgtagtcattgagaggcaaaagcatggattgaagtcagttccggaaataaatgagtcgggggatcggttgttatttcatctttcacctaatgatcttgtttattttcctacggaggaggagctggcgaactggaatgggattggagagatttcggtggacagggtgtataaggtggtcagcttttcgggtagcaggctttcgtgtttacctaatgcagttgccaagtccattatcgataagtttgagtttacaaaaaggaataagatagaaggggtggacaaggtaatgattaagaatgtttgttttaagctggtggcggatcggttggggaaggtgaagctgtgttcggcttttagtggggaggggcagttgctggagggaagttaacaggctgggaaagttgaaggcaaatcacaacgggcaagacactggtaatgatctttgtgtcgttgtgaaagattgaagatacctagaaatttgaaagaaaatcacaacacaaacaatggatgaaaaaaccccttgtctttgttgaggaagtattaagatactgagaaatttgaaagtaaatcacaaccgttcgtggcgggccttcctttaccctgctgttgtcaaaggtctaagatactgagaaattgaaagcaaattacaacaggagttggtttagggcaatcgggcacagaggttgtaaaaggcctaagataccgagaaaacacaactacttaaaagcacaaattagggttatgctgtgaaagatataagatactgaggattttgaaagcaaatcacaacataaatcagaaagggtacgttttagttttgttgtgaaaggcctaagatactgagaaaattgaaagaaaatcacaactcctgttagtgagttatggaatttgctaatgctgtgaaaggtctaaggtactgagaaaattgaaagtaaatcacaacgcttagaacgatgtttccataagcataatagttgtaaaaggtctaaaatgctgcgaaatttgaaagcaaatcacaacaagctatgctattgttaaggggtttattttgttgtgaaaggtccaagatacagagaaaataaaaaaatcgccttccccacttaaaaaaagaaaacccaataaatttgccccctcctcccctgaaaacatcaaaccaattttctaaatagctccctctgtcgcaaaaagccctttagaggtgcgaggttatctgaataccttattttaagcctatgtcaaccctatgtaaagataatcccttaccttagccgtattatggcaatgctcacagataacctactccttaaaggagccagcggaacatttggcaaacaattcgttttcaggcaacggaacggcaaaaccgtgatctgcaaaatgccaaagccttatgagaagccccctacagacaaacaattggccaaccgggaaaggttttccagggctaatacatacgcaaaagctgccatcgcagatccggttaaaaagcaatattacctggcaatggccaaaccggggcattcggcttacaatgtagctttccgggaagccttccatggtccggagatcacaaaagtgagtgtggaagcgggaatcgttactatacaggtaaaagacagctatatagtggataatgtaaaggtggaatcttcagggcaaatccggccggcaactccaggcaagaaccgccgtgaatgggagtataagctccgaagtagtgagaagatcatcaggatactggcttacgacaggaccggaaacgtcaatacaaaggatattttatgttaggactgctgatgatttattaaaaagcactatattcagtttaaacattaatagccatattttaaaatcgccctttccaatgaaaacggatcaacattatggggaggaaatccatatccaaaaagccttacaacttgctccaataggcgcttttttgacagacattgaaggaaactgcttctttgtgaacgaggaatgggagaagatgacaagccttagctttgacaaatcacaaggtaagggctggttaaagatcatcgtggaagaggaccttcctgctgtggagagtgtcattaacagatctgttgaaacgccgcataccagcctcgtgttttattaccgggtgaaacatcccaaaacaggattgctctattgcaaagccaatattcgctctgttaccgacgaagaggataacagccgctacctggttggttatgtacaggatattacggaagaaaagatgagcgagaacaggcagatggaactaagtacccatctccaggcgctgatcacctccatggaagatattgtatttgaaattgacgggcacctcaccttcaagaatgtatgggtacatgatgaagctatcctgttcatgcccaaaaaagagttcctgggtaaaaagatagccgatgtactgggaccacaagcatccatgttcgttgaagtaataaaggaagtaattgaagtgggagaagtacgcgatattacttacaaacactttgatgattccaaagaccaatggtttaaagcaaggatcaaacctgttattaaaagccctgacctctcgaattatttattggtactgagcatacaggatgtaacagctgaaaaacaggcggaactggcgctgcaggatataagagggcgccttgagcttactaaccagttattagatgttagccaggaattgagcagaacagggggctgggaagtgaacctgcaaacccaggaaatcttctggaccaaacatacctatttaatttacgatctggatgaaacatttactcctgctcttgatgtggtgaatacttatgttgcggaagaagatcgtgtaatgatggccgagcattttgccgcagctatgtttcagggtaaatcatatgatattgagttaaggatcattaccgcgaaggggaataaaaaatggatccgggctattggtacacctgttttttcagaccacaataaggtgatcatgctccggggggctttgatggatatcacccgtaaaaaagaagatgaactggaattgatccaggccagggattctgcggaagatgcggcaagagctaaatcagatttcttatccatcatgagccatgagatccggacgccattgaatggtatcatcggcattgccaatctgctcaaactaaattatatccctgaacaggaagaatatatccataacctcctgttctccgctgatcatcttttgcaattgatcaacgatatccttgatctcaataaaatagaccgggaacaattcgaactgaattattctgttctgaacctccacgaacagatcaaaaacatccaaaaccagtttaaatccctggcggacattaaaggtctttcactggtaagcacagtagatgataacatccccaggaagatcatagcagatgttacacggttgaatcagatcctgaataacctgctcagcaatgctattaaatatacagataaaggacagataagcatcaatgtggaactggtgaaaaaacaaacggaaaaggtgacggttcatttctctgtgaaagacaccggcattggtattccaaaagaacatctggaaacggtatttgaaagcttccggcaagtgcagcaatctaccgttagaaaacaagcgggtacggggcttgggctggccatcacgcagaaactgatcactttacacaacagccagatattcctggaaagcgaacctggtgtaggaacagagtttcacttcgacattgtatttgatctgcccaccaaaaagaacaggccggccaaacgggaagaactcttaccggaaatttcaggttatgccaggaaatttaaagacatccgcttaatatttgtggaagacaatcccatcaatgtactggtggccaaaaggcaactggaatactttggtatacaaccggattgcgcactgagcggaccagaagcactggaacttttgcagaagaacaagtatgacattgccctgctggaccttcatatgcctgaaatggatggctatgccctgtcagagatcatccggaatgaatataaggatgtgcatatcgttattttcacggcagatattatgccggaagtaagaaggaaatttgcgcagaaaggggtgtttgatatacttaataaacctttcttcccacgggaaatgttagctacccttttgaagattgcgcaggtgatgaagctgaagatctaatttaaagggttccaatcgttcaagatattcttaatggtatatttcttagcttctgctgcgcttaattgctttgaccaggaaacacgatcctttgtagaagccccggggccagtatttccgtattcagcatagtaagttgttttctctttgtccgggaatctcgcatcgccggaccatgggtcccagcctgcggctacaatgtgagcacctaattcacaatgtataaaaacagtacgggcataagggcgccagggccttccgaggtatactctttttgcagcggtgtccgtttccagtttgcaattcatgagtacgaaaccgaatggttgtcttggtgaagtagcggccgcggtgatgaaggaattcactaagctcttgatagtgcacctttgaaatacaacggttgcttcgccaaaaatgaaatcagtagtgccttcaatatagcaatcctcgtaatactgccggctgttctctttgccggcgtataaagtatcctggttgcccagcagtttgcaattctttataacagcacgatctgcttctacatgtaatgcaacaccctgccctactctgccggctgtgttccggatggtgatgttctctgcgctgaaatcattgccttgaacaagaacggtgtaggaggtgaaagtgctgaatttcccttctggttttaatttaccggaatagtcatcattggtgataatggtgctgtctttattctctcctacgaatgcaatattggttttccaggaaggtaccacgatcttttcatggtagacaccgttcttaatatagatcttaaccttttgctgtgaaaggtcacggatggaattaatcgcttcctgtattgttttgaaatctcctgtgccgtttgcatccactgttacctgttgagccttcaggcattgcgctgcgaatataagaatgattaaaaagggtttcatgttttaagggttatttcaaatttaagcaatttattatatatcttaggtactgtatgaagtttgtctttttactgtttatcagtctatccggcttttgccaggatacgacaaaagtggcctgtatcggcgccagcattacttatggcgcaacgatcaaagaccgtgagcatttttcttttcctgcacagttgcaaacattactgggggctacttataaagtaagcaactttggggtaagcgggactaccctattgcgcaatggcaattcaccctatcataaaacgggcgcatatcaacaagcgctggccattgaaccggatatcgttattatagaccttggcgggaatgatagtaaactggtgaaccggcctcgttatggggagtttgttgcagattatgatacgctgatcaaatcgtttgctgcgttaccttctcatccaaggatcctattacttttgccggctgtttcttttgtaacggatagtaccgggatctgggaccctgtgattgtgcgggatattattccgcttattcgccaggtgggtttgaatacacagcgggaggtagtggatatgcatagcctgctggtggataaacctgagctggtgcctgataagatacatcctaatgcggaagggtctggaattatggctaagcggttgtatgagcagattataaaacatcaaatcctatcatttgaaacatttatccctcctgttaattctgacagttactcttataagttgcgctcataacacagagccggagaaaaaagtattggccgataccattggactaatggcagcattggaaaaaatggttcctgaagatacgttagcaacgtctgctgaactattatcggaaatcagttttagtgtaaaagaaggaaacgattttagtccttatattgaaatagcaaatcccaaagaagcccttgtcaaccttatcgataaaaataaaaaggtgattgatgaggataccatcacggtaattattgattatccgctaacaaagtcttatacattcgagttggtttcccctggcgggtttaccaaacaaacactcattcaggagatctgtaaacactatcatttaatatacgctgaagaagaaaagaccacgacaactaaggtaattccccttgaagaaagaaaagggctgatcaatagaaatgaaacgaatggaaaacacgggatctgggggcacgatatcatagatctggtattgtccgaaatattagtttacaggacggctaaaggacaaatagttcttaccttagggatcgaatcatgatttatgttttatggaagaggtatacgaggtagaaaaaacgttcgagaaaattgattttacccagcggcctttgcccaaaggtgaatacgaattatgcagctttattaactgcgatctttcaaatgctgatctatccggtattaatttttcaggctgcagtttttcaggctgcaatttaaatatggcgaacctggcaaagacggccttcagggatattaaattttcagacagcaaaatgttggggttggatttcgggaactgcaatccatttggctttgccgttaaatttgataactgcatcctcaaccattcttctttttatcataccaaacctaagaagacaacctttaaagactgcaaccttcgggaggtggattttactgcctgtgatctgagtggttctacttttgataactgtgatctggcattggctaaatttgacagcacaattcttgagaaggttaattttctgactgcgtataattattctattgatccggagttgaataagataaaaaaagcccgcttttcccagatggggatagcaggccttttagatagatatgatattgagattgagccttaatatttcaacaattctccaatcttcgctcctaccttttccgcattcggcaacatctccttctccaatgccatattcaaaggcacggcaggcagatccattgcacccattgtcatcacaggagcatccagccaacggaagcattccaaagaaatcctccccgctaaactttctgcgaatgaattattcaactgctcttctgttaataccagacacttaccgtgtttacgtactgtggcaaagatcaactcttcatccaggggatataacgtccgcagatctattacttctactttcccggggtataatgcagctgcggcttttgcccaatacacgcccattccgtaagtgatgatgcacatgccctctccttccaggactacacgccctttgcccaatggcaggatgtaatctgcagcaggttcgatggtcatggcctccagggttccgggtactttactccagtacaatcctttatgttccagcattatgacggggttgggatccaggaaggctgctttcatcaaacctttgaggtccgctgcgttggaaggataagcgatcttgatccctttaatgctcagcaaggtggattcgatacttccggagtgataaggtcctcctcctccataagcaccaatcggtacacggatgagcgtttgcacggggaacttgccggcgctgaggtaacagcttttggatatttcactcaccagctgattaaaaccgggatagatgtaatctgcaaactgtacttctacgataggctttacgccaacggcagaaagtccaacggtgctgccaataatataggcttcctggatggcggtattatatacacggtggtctccgaatttctctgcaagtgtagctgcttctctgaatacacctcccaaacgacggccgacatcctggccgaaaagtattgcttccggataagcatgcatgatctcttcaatagcatgcagcgcggcatctaccatcactactttacttccgtttgcaggtgttctttcacccaattcttctgtaatgggtgtgggtgcaaatatgtgatcggcaacggtggtgatatcaggttccgggctattgcaggcggcttcgaactcttcatcgatgcgccgctttgcttcctcttctatttttatggcttgttcaggctcaagtaattgtttgaggcggggtaatggatcacggctcagatgtttgttaagatcttctgtggtacggtaccattcttttcttacacctgatgtatgatgacctaataaaggcgtggtggcatgtaccagtaccggttttctttctgtccgcacatacagcagggcggattccatggcgtggtaactggcttcaaaatcacttccgtccacacggatcctttccaggcctttgaaaccggcagcatattcaaaggcatccatggcccttgcttctgctgaacttacggaaatgccccattcgttatcctgcacgaggtagatcactggcaaacctttcaatacggcaaactggaaggcttcactcacttctccttctgttacacttccatcgccaagggagcaaagcactaccgggctttctggtgtatccatcaggccaacgctttccaggtattgaattccctgggctatgcctgtagtaggaatcacctgcataccggtggcactgctttgatgcgggatcactggtttgccgggttggcggctgctgggatgacaataataagaacggccggcactgaaagtatcctctccttttgccagtaattgcagcatgagcgtgtagggagaaaaacccatggccagcatcatgctatcgtcccggtaataggggcttacgtaatcccagggcttcaggagcatacctgctgctatctggatggcttcatggcctgaagaggtggaatgtacatatttgcagatgggccggttggcttcgtacttatctgccatgctcctggccaggcacattgtgcggtatgctttcagcagcaatgtctggaatgctgcatcctgctcgcggtgagtaatggtggcttccaaagtcggattgcttatactatctttaaccacagtaagactgttttggtgatatgacatggcgaattagcattattagttgctacaacaactattgctaatgcaaattaaataatatgcacgatacttttgttagtaatccatctttttttaagctggatgcaaccctgaaaaaaatacgtaactactggcagaagagctttgatgctctccgtaaggatataacagtagaccagtggctgctgattgagaacctctataagcataagcgcatcacacacaatgagttagcccgattaacctcaaaggacatcacaacggtttcccggatcattgaattattggtaaaaaaggaactggtggaaaggcagggatctacagacgaccgcaggaaggtatttgttcagcttacaccggctggtgtgaacaaatacaaagacgtgaggcctttggtactggacatgcgtaaaacggggtggaagaatctctcggaggcagattattcagagttaacgaggatccttgatgtgatctacagcaacataccggaagaaagtaaaaaaggaaaaaattaataagaaaaagactaaaaaaaatcgtttaagctaagctgggacgtatcctttttactttataattttttctttttactccttacctacttcacctggaattccagcaggctatcatcttcaatgaaagcctccaggccatcaccgatctgaacaggccctacgccttcaggtgttccggtaaacacaaggtctccgatattcagtgtaaagaatctcgagatatacgcaatcaatttgtcgaaagagaataacaggtccttcgtgttgccttgctgtacaatttccttgttcttgtaaagacaaaagttgatgtctttcaaatctgtgtcctctttcaatggaatgaactttccgacaacagcagaattatcgaacgatttggcgatttcccagggcagtcctttggacttttgcttttcctgcaaatccctcgccgtgaagtcgatccctacagaaatactatcgtagtatttcgaggcgaaccgctcctgaatgtgtttcccgttcttcgaaatccgcaacaccagttcacattcataatgaaggttatccgtaaattccggataatagaaaggatggttgttttgcagcagggcattctttggtttcatgaaaatcacgggatcggagggcacttcgttcttcaattcttctgcatgtttggcatagtttcttccaacgcagataattttcataatgcgtgtattttgtaaggttaataaagcctatggtttgacccat

SEQ ID NO: 1172 - DNA, 24461 bp, synthetic construct
  variation 15830..17910: note = n is a, c, g, or t
  misc_feature 1..24461: note = Synthetic
  source 1..24461: mol_type = other DNA
gcaatcatctccagcaggagcaggtacgtggactgatttagatgtagcgtcttcaacaatcaatatcgactctggaattgacacagcaacagactatcgttaccacgtagagtgtatcaacggagatacagatgattctgctataatttcggtaagtataaatccagatgcaaccgcatgttattgtatacctgaaggaacaaattcagcgcgtttcatcgataactttgctaccactgatggaattcaaaatatttccaaccttggcagtggattttctactggaggatatggggattttacagctatgactcttgaagcaaatgctggtgatgaacttaactttacctctggcattgttggaggaagtgctggatttagaatctgggttgactggaaccaagatggtgcatttgatactatagaagaagtagcctaccagagttcaggttataatactgctcatgtaggtagttttaccatcccgtttgatgcagctacaggacaaacacgaatgcgaatagtgagtcattggctttctctctcaggggatgttgatccttgtgaaactggtttctcgtatggtgaatttgaagattacacagtaatcatcaatgcagttccaggctttgtatacaataacggcgcttggtcacctagtgatccaaacaccaatgcaactgccactgatgacattacggtagtggatggtgtaacaagctttactgcagatatagaagttaacaatatcactgttatgagtggcgctactttaaatgtagaaagcgtgttgacttttaatggcgaccttactattgatggtgaccttgtattcgtaagcacagctactggaaacggagagcttgccgcagtaaacggtacttcaaccattacaggtaacgcaacagtacagcgttatgcacaaaacaaacgttcatacagaatggtaagtagtgcagttactacaacaacttctatccacgataactggcaagaaggtgctgcaaacagtacagataacccaagcccaggctttggaacgcacattactggtagcacaactggtcaaaatggtttcgatgctacagcaacaggtaacgcgtctatgtttacagtagatgtatcaacacaacagttccaagcaattgctaatactgatgtaaatacacttactgccggtgatgcttatttattatttgttcgaggcgatagaagtattgatttaaccgatcctactgacaacgtatctagcgaaactgtgcttcgtgctacaggtgcattggtaacaggaaccaacactcagaattttgcttcagcaactgcaggtaactttgtgatgtttggtaacccttaccagagtgccgtggatgtaaacagtgtgtttgctagttcaactaacgtgaacagcaacttcctatatgtttatgacccaagcttaggaacctacggatcttatgttactgtagacttaccaagcggaactagcggatctactgcaaaccaatacttgcagccaggacaggcagctcaagttcaggtaactggtcctgcgactatcattttcaacgaaagcgataaagcgccaggtaactttacttcgaccaatgctagcccgatgatggagaacgatatgttgactgttcagttatttacaactgaaaacttcaacaatcacggtgcagaacatgacagctttagaatcttgtttggagaaggtaacgataaccgtctaacgcttgcagacgctgttaagcctatgaacttctacgaaaacctaggaagggatcttaacggaactttcttaagtattgaaagaagagcgctgccagaatcagctgaggtatatccgctatacagtgcaggatatcaagcaaatgactatactttgaaattgactgttgatggtttggagggtagcttcctttacctagatgatcacttcacaggtacaagtatgttgttagaagctggagaaaacacgtacagctttagggttgacgctaacgatgcgttgagcattgctaccgaccgtttctcaattagaacagagcaacgtttaggtgttgatgacaacagcctacttgcaggtatacgcctattccctaacccattgaatggagatacattctacatcaatgcaccaaaattaaacggggagcaattagcagttagcattagcgacctgacaggaagaaacatctttgaacaaacaattgattgtcgtgcaaacacggtaactataccaatgggcgacaatgtagcttctggtgtttaccttgtaactcttaaacacggtggggattctaacacctacagattgattaaagagtaagaattagaataccttgttttagactaacaacacagtctttacaagacagtaattttaaaagagcggttccgaaaggagccgctcttcttttttagagaactttcttacctatatttaattactaacggcataccgtctaccgaaacggacacaatcccggcaagtaaaaaaacaattgaggaaacgcctcgtagggacataatctgataataaaccgaacaatattttaaacatccctattaaattggtacaacttcttgataagttgagtaaattaatagggagattcatgaaaaacatgtacaacttttgaataaaagttgtacatgttttttataaaggttgtacatgtttttaggaaaagttggctactttttaaatgtgtagaaatcagcagtaaaaacaagccattatgtgaagttacaaaattttaataaaagataatagtcccaataacttttctggtgacatcttttgggttcactagtctaaacactaattctcataaccacaattattgtgatacatacaatatagtagtcatttagtggataactggaaataagttaaattaaaaaggatagttcatcaagaaaaactaagctatttttatttcctcatcgtctcgaagcctatccaaatcatttaacaaatgtctaaaaaagcattcattataagctccaaccgatacacaacccgaaagggtttcttctagatcagtataatttacgttttgtaagatcgcgccttcaaaatcgccaatttctaacgattttgaatttgaaggttttgaatttcgcactgaaattattttatcctcgtaattcaactctacactcaaggcatcaaaagaaaatcttagtaaagcacgatgaaacttttgaaattccaagctaggcactttatcaaaagcacaactctccttaattagtttttggatctccttcctaatcttatcctctctttcttccatactcataaaattaaattacaagcaaagatagtgtgagaaccgaagttaagatacaaagtataaagcttttagctatactttaacctagaaacaaataaatagttaatgattttgggaaaattattgtacagtttcaaaatcctgacgctcccaattaagataaccaccctccatgtcgtaaatttctttaaagcctaaatcttttaacattttggcagcacgagcacttcttttaccacttcgacagtataaatagattggtttatccttatccaattttaaaatattctcttcaaaatcggcatcggtaacacaaatattttgggcattattaaggtgaccctctctaaactcttctatggttcgtacgtcgaccaattgtctttctccgttatcataaacagcttctttcacttcttggggcgaaataacttcaattccctgagcagaactaacatctttacaagccgtgaagaatagtaaaaccgaaattgcaattacagaaaataaacttctcttaaacataatttttatttttttatttctccgttccaagtcatcatccctccaatcaaattataagaatttttaatccctagagaatcgaatagcatacacgcttgaccacttcttcctccagaccggcaataaacgtaataattttttgaaggatccagtttttgtgcttttgcatagaattcagatgtattctgaatatccattacaactgcacctgggataataccttctgcaacttctccttgtgtgcgcacgtcaagaataaccgcattgtcatctttttccaataattcacgccatttctcttgggttatattttccatctaaattgttgattttaggtgcaaaaataggaaatcatactgaagtttcaagtatcttaaacccagtaatgataaaagcgtacttataacaatatagttttgcgatacttaaagcatttaaactaagtttacatttagcgctagcgcgtcgatgttgctcggaatagagcacaggtgaaatactcagtgcacaagaaagttattattaaacttacttatactacatagcactgttgtttgattaaaacatattgtcttatcaaagccagaccaataaagacttaaggttatttagcttactaatggccttactttttcatcttatttagaaacaaatccataatattaatatgcaatctgatttataatctaaaaatcttcttttacaataatttactttttaagtcttggctcccgactcgacgactggcaggcttggtactagcagaacagcgggccgcccaaacgggcctttcctgcgcgaatgaatacgtaaaggcgggcggtacgggcgggacttgtttctctcctcggacgctaatgctcaaataaacgaaagatgttgcacgataggcaaattttaaaaaaagaacttaagaataacaaataccaagtatatttgaacacataaacaatctgcttcattttaaatagaattagaaaaacaacaaccatcagctaagcaaacggatgctagagaacaatcccaaacaaatcaaaatagtggtcattgataattatgacagttttgtgtacaatctggtgcattatttagaagaaatagattgtaaggttacagtattgcgaaacgatcaatttgaattagaagacataaagtattttgataaaattgtactctcccctggcccaggaattccagatgacgctggattattgaaacaagtaattaaagaatatgcagccactaaacctattctaggagtatgtttaggtcatcaagccattgccgaagtctttggtggaaaaatagaaaatttaagcactgtttatcacggtgttgcaacgaacgctataataatttctccaaatgaacctctttttaatggattgcaaaaacaaataacaattggtagataccatagttggattgtatctaaaaatacattgccaactgatttagatattacttcggtagatgaggaaggtcacatcatgtcgcttcggcacaaagtttttaatatttgtggcgtacagtttcatccagaaagtgtgcttaccccaaacggaaaagaaatcatcaaaaactggataaaaagctgacaataaaaattttagctctacttttacgtagtgcctgtaaactcactttaaccaatatttaggaagaatttaatatattttctagattcatttacctactttggtaatacaaattattaaaaagaggaaatcatggaaaagaaatttgaacgaaaagtagaacaaaaaaatcctactaatccaactggtaacaccagccagaagacaaataagtttgatattgatgagaaaacaattaaaaagcaacaaaataaaaaataatgggaaaaggagataaaaaaacgaagcgcggtaaaataagcataagtagttacggcaagcttagaccacgcagaaagaaatttactgtgcgtccctccccgacaaaaggcgcacagaaacccgaggcgtaaagagaagttcgagctcggttactgttttaaaaacagtaattcaaatagagacttcctttaaccctcatttaaaaggcaactgaatacccatttagggttttagttgccttttctttttacaaatgacttctaagaaaccctcccgaaatcctatatttgcatttcatatttaaatacttccatgaatcgagctgtttctggattttccaaaaaatctaaaactgaaaaaattgaatggctggcggcaaactttctgcaaaatagtccagactccattaaaattctagagagttactggaatgaagatgcttcattacagcaacttcacgacgactttattgaaaacacacttagcaattattacctaccctttggtatagcacccaattttctaataaatggcgaaatgcgcgtactgccaatggttactgaagaaagttcggtggtggcggcggctagcaatgctgctaaattctggatggaacgtggcggttttaaagccgaagtggtttccactgaaaaaaacggacagatacatttcaatttcttcggaaaagaaaaagatattgaagatttttttgaagcaataaaacccaaacttcgcactagcatacagtcgattgaaaaaaatatgaaagcgcgtggcggcggacttttagagctttcattagttgacaaatcaaatattttggacgggtatttctatatacatgccacgtttgaaacactggatgccatgggtgccaattttattaatagctgtttagagcaaatagcccaaacttttgaggaagaagcaaaaaacttcgaaccctttaaacaagcggcaacctatcctgaggttgtaatgagcattctctccaactacgtacccgaatgcttggttcgtgcaacagtgagctgtaaggtagacgagctaaccacgaaacagcacgaaggaaggtattttgcagaaaaatttgtacgcgccattgaaatagcaaaaacggaaacgcgacgtgccgtaacccacaacaaaggaataatgaacggcgttgatgctgtggtattagctactggtaatgatttccgcgccgttgaagctggtgttcacgcctatgcttcaagaaacagttattacggaagtcttacgcacgcaaaaatagagaacgatgtttttactttttggattgaactgcctttagcaataggcacagttggcggtttaacgtcacttcaccccttgacaaaactcgcttttgaaattctgcaaaaaccaaatgcaaaacaactgatgcaaattatagccgttgctggactggctcaaaactttgctgcaatccgatcattagtaactactggaattcaaaaagggcatatgaaaatgcatttaatgaacatcttaaaccaattaaatgctacaaaagctgaaaaagagaaggcaatagaacactttaaagaaaatgcggtgtcgttcagtgcggtggtggggtttttggagaaaattagagattagagattagagattagagattagagattagagattagagaaaaataaaaatgcacgttttaattgtggatgggtaagaataaagtaataagaattggcgtgattttataaacattgatgcgaagacgattaacgaaatttaaaaattatagtggcattgcgagcactttcttttaaataatatttgactccactccttgtgccctctgtgccgctgtggtaaatagatagcctatacaaaatgaacaaatccttccacagtaacggaaaactattactcacgggcgaatacgttgtgcttgatggggcgattgcgcttgcaattcctacaaaatatggacaatcgcttcatattgaagttttggaacaggatgaactgcaatggacaagcctcgatgaactaggattggcttggtttgaagaatctttcactttagaggactttacaccatcaaacccagataataaatatgcaattaccttatcgaaaattcttcgtgaagctagaaatttgaatcccgattttctaaaaaccaacagagggctaaaagttaaaactacattagacttccctcgaaactggggtcttggcacctcctctaccctaattaataacattgcgcaatgggcaaaagtggacgggtttacactgctcaataagagttttggaggtagcggatacgacattgccgccgcgcaaaacaactccccaattttataccaaattaaagatagcactccaaaaaccgagcaaacaaaactctcgtggaagtttaaagactccttgcattttgtacatttaaacaagaagcaagacagtaaacaaggcatttcacattaccgaaatactgaagtttccaacactacaattcaaaaaatatctgttattagcaatcagcttgtacaatgcgcttcacttaccgaatttgaaaaactgataaacctacacgagaaaatcatttccaaaaccattcaaatacccaccattaagtcacaactttttcacgattatccaaatgctgttaaaagtcttggcgcttggggaggcgattttgtattagttacaggaaccgctcaagatatggcgtattttaagaataagggttttaatacggttgtcccgtttgaggagatgagctggtaaattaaaaataatagtctaagttgatacagggcatgccctgcatcaactgcccttaatcaactgcccttaatcatcctgaagcgtcgtctaggaattgaccagaatattaggaaatatcggcagggtaatttgggttcatcattcaccagaacctaaatccataccataacttttattgctagatctttttcagtataaatcttcctaaaagccaaagaaatctgagtgttcattcttcgttggttttgggaaactcaggggcatttttaaattttaacggaattgcatcttcagagccgtagattttaatttccttaatatctgctggcaggttgaatcctttatccaacaacacctctttcacttccctaattacgaggcctcgcaagactcttgaagccctgcggtaatctttggtatccacccaaaaaaacactttcagattcaccgtgctcgccgccaattcatcttcaataacaaaattttcgtggtcgatatcgcgaactatttcagtattcctatcaaggatttcctgaattactttttttgcttccgaaatattgtcttcataaccgatccctactataaaatcgactctaaagaaaccatctgctgtgtaattttcaactggcttggtaagaacatcgctatttgggatataaatatcgcgaccgtcaaaagttttaatgtgtgaatatcgaaaactaagctctttaacctttccaaatatatcgtcaatctttatggtatcgttgatgctaaacggtctgttgaaggcgagaattattcctgctaaaaaattcttaccaatatcttgaaaggcaaaaccaagaataattgcacctccaccaacggctgttaaaagtcccgtggcaataccatccaagccagccacctgtaaagcgaccatgatagccataattatcaaaataattttaatggcctgtgccaaaaacttagccattaacgggtcttcagatttttgttggaatctgcgcttgtaaatatttgtaagcaattgagcaagtagtacccctaaaataataactaaaaccgccaaagcaatacgcggtagtatttgtaaaaacctatggtaatacaagttgagtgactgttcaataatctcggttgttgattgcatttgtggtagtctgttatttcctttaaagatagataatctaaaataagcaaaagcacattaatggaggttcaactattttttaaatggtgcagctctatgggttactatttttggctgatgttttactcatagagataattgcttgaagtcaataccatcaaatatttaagcctacgcctttatatattatgttttggaggtcgtgaaacataaaaaaaatgccccacattagaaggtgaggcggcttaaatgttttcacaacggaataatccttattgtgaattactttagaattgtaaaacaaatataagcataatgtttttaacacacaatgtggtttcccgtaaagaattcttaaaaatatttaatatgtttagcttttgttaacattacaattattattatgaaaagagttttaggattggatttgggtaccaactcgattgggtgggctttaataaagcacaacttcggaacaaaagaaggtgaaattaacgatatgggcgttcgtattataccaatgagtgcggatattttagggaaatttgatgcagggcagtcacattcgaaaacagctgaaagaactggttatcgtggtgttaggcgtttataccaacgtgataatttacgtagagaacgtttgcatcgcgtattgaatatacttggttttttacctgaacattatgctgaacacatcgattttaaaaaacgtttgggacaatttaaggatggtaaagaaataaatctcaactataaacctaatgcgaatgggaagtacgagtttatttttaaatcttcatatcatgaaatgcttgttgagtttaaaaattcacaacccgatttattctatataaagtccaatggaaaggaaacgaaaataccttatgattggacactttattatttacgcaaaaaagctctttcacaaccattgactaaacaagagttggcctggattattctaaattttaaccaaaagcgagggtattatcagttgcgtggagaagaaattgacgacgataaaaccaaacaatttgttcagcttaaagtaagagaagttattgattctggcgaattcgtaaaaggaaagccattgtttgatgtgatttttgaaaatggctggaagtatgataaacaagtggtcaaaaccgaagattggatagatagaacaaaagaatttatagtaactacaaaaacactaaaaaacggagatataaaaagaacttataaagcagttgattctgaaaaagattgggctgccataaaagcaaaaactgaacaagatattgagcgctctaacaaaacagttggtgaatttatttatgaagctttaattgataatcctacccagaaaataagagggaaacttgtaaaaaccatcgaacgtaaattttacaaagaagaattagaaaaaatattgaccaagcaaattgaacttcaacctcaactttttactaccaatttatatgaagcttgcattaaggaattatacccgagaaatgaagctcaccaaaacgccataaaaaaccgcgattttctttatttgttgatggacgatattattttttatcaacgtccgcttaaaagtcaaaaatcaaacatttctggatgtcaatttgagcatcagatttatttaaaaaccaataaggagaccggaaaaaaagaaaaagttaaccaagctgtaaaagcaataccgaagtcacatcctctatttcaagagtttagaacttggcagtggttgcaaaatttaaaagtctataataaagtagatacagataaaggcgagcttaccgatgctactaagcaattattacctaacgaagaaagctgggtagatttatacgactttttacaacataagaaagaactagaccagagtcagtttataaaatattttatagagaagaaactaatcaataaaactgaaaaagattattaccgatggaattatgttgaagataaaaagtatccttttgctgaaaccaaagcgcaatttatttcccgcttaacaaaggttgaaggcattgacgacattaatacgtttttagataaaaaaacacagctaggcaataaagacaacagcccttttgtatctagaattgaacaattgtggcatattatttattcggtatcagatattaacgaatacaaatctgctttagaaaagttcgccttaaaacacaatataaataaagaatcatttgtagataatttcatcaaattcccaccttttaaaagcgaatatggcagctactctaaaaaagcattaaacaaattattgcctttaatgcgtagaggtaaatattggaacgaaaatgatatttcagatatcgtaaaaaaacgtgtttctgaaattatggaacgggttaatgcgattaacttaaaagaaggttacagcgctaaggagttggcagaagctttggtagatgttagtgatgatgatgtaaaaaaacaacttataaaaagtttcattccgtttaaatataaaaacccattaaaggggctaaacacctaccaagctacttatttggtttatggtaggcactcggaggttggcgatatccaaaactggaaatcacccgaagatatagatacatatcttaaaaactttaaacaacattcccttcgcaatcctatagtagagcaagtggttaccgaaacattgcgggttgtacgcgatatatggaaacaccacggtaaaagcaaacctaattttttcaatgaaatacacgttgaattaggtcgtgaaatgaaaaatccagcaggaaaacgagaacaaatttcaaaacgaaataccgaaaatgaaaataccaaccatcgcattagagaagttttaaaagaattaatgaatgatgcttctattcagggagatgttagagattattcgcctagtcaacaggatttattaaaaatatatgaagaaggtgtttatcaaaacccaaaagtagattattcaaaagttagcgaagatgaaattgctaaaattagacgaagcaatagtccaacgcaaaaggaaattcagcgttatcgcttgtggctagagcaaggctatatttcgccatatacaggtaaacctattccattatccaaactgtttacacacgaatatcaaatagaacatattataccgcagtcgcgctattttgacaactcattgagtaataaaattatttgtgaaagtgccgtaaatgaagacaaagacaacaaaacagcatttgaatatttaaaagacaaaagtggtagtgttatcaatggtcataaattattaagtcttgcggaatacgaagcccacgttgcccaatatttcaaaaacaaccgccaaaagcttaaaaatctattgagtgaagatatcccggaagggtttatcaatagacaattgaacgacagtcgttatattagtaaattgataaaaggtttattgagcaatattgttcgcgatgaaggcgagcaagaagccacttcaaaaaacttgattcctgtaacgggttctgtatcctctaaacttaaaaacgattggggcttaaacgataaatggaacgaacttattttacctcggtttgaacgtttaaatcagttgacacaaaccaatgattttacaacaaccaacaccaacggcaataccatacctactgtacctgacgacttgctaaaaggctttagcaaaaaacgtatagaccatcgccatcacgttttagacgccttggtggtggcgtgttgtacgcgaaatcatggtcattatctaagtgctttaaacgctgaaaaagaaaattatagtttgcgtaataaattacttatcgtaaacgaacaaggagattacacaaaagccttccaaatgccgtggcaaggatttacaactgaggctaaaaatcagttggagaaaacagtcgttagttttaagcaaaacttgcgtgttattaataaagccaacaataaattttggtcttataaagatgaaaatggcaaactcaacttggataaaagcggtaaaccagttaagaaacttcgcaaacaaactaaaggtgataattgggcaattcgcaaagcaatgcacaaagaaacggtctcaggcaaatacaatattgaaacgcctaaaggcaaaatagcaactgcggtaagaggttctttggcagatattaaaaacgaaaagcatttggcgaaaataaccgacccgcaaataagggaagttattttacctaaccacctaaaaaaatatgtagacgaaaaaggaaaaattaattttgatatcgcctttagcgatgaaggaatcgaagatttaaacaaaaatattgtcgctttaaattatggtaaaaatcaccaacccatacgtaaaattaagttttttgaagtaggaagtaagttttctatatccgaaaatgaaaattcagcgaagaacaagaaatacgtagaagctgcaaagggcaccaacctcttttttgctgtgtattgggatggtaaaaagcaaaaaagaaattacgaaaccataccgctaaatgaagttattgctcaccaaaagcaagtggcacatttaccaaaaagtgaacgtttaccaatacagcctaataacaaaaagggtgagtttttatttaccctcacacctaatgacttagtttacgtgccaacagatgaagagctcacaaacataaatgcaatcgattttaataacttaaatcaagaacaggttaataggatttataaagtcgtaagttttacaaatactagactgtatgttgtgccattttattcagccaaaccaatttataataaagttgaatttacacaacttaacaaagtggagtttacagacgaaaagatttttatgtttaagcttcaggtagacagactcggtaatatatccaaagcatagcataatgatcaaacgtactttattttttggtaatcctgcctacttaagcacccgaaacgaacaattggtggtaaaatttcctgcggaagagaaggcggaagtgacgatccccatagaggatttagggtatattgttttggaggatccacagattacaatcaccaacggactattgatgaagttggttcaaaataaaactgccgtgattacttgcgacaagcaacaccttccctgctcacttttacaaccacttgtgggacatacagagcaaaccgagcgcattcgctaccaactggacgccagtctgccactcaaaaagaacttatggcagcagactgtacaagccaaaattgaaaaccaagcggcgcatttaaaaggacgaagtaaaagcgaattaaaactaaagcgctgggcgagcgaagtaaaaagtggcgatagcgaaaatcatgaagcctttgcagcagcatactattttcaaaatatttacacggatttagtgccagagttttcccgcaaccagaaaggtatcgcgccaaacaacttattgaattatgggtatgcaattctaagagctgtggtggcacgagcactggtaagtagtggtatgttgccgtcagttggtatttttcaccgaaataagtataacgccttttgtttagccgatgatattatggagccttaccgaatttatgtagatgcggtagtgtatgagattttggagacgggtgcaaatgttgaagagcttactacagctataaaatcacagctgttaaccattcccgcacttgatgtatttatagacgataaatggagtccgttgatgactgcggtaagcagaaccaccaacagtttacacgattgctttaaaggaggtagtcgcaaaattctatatccgcaatttttgataaatacttcgtaaatgattgaccaaagcaatttttcaagattaaaccaatatcgcagtatgtgggtacttgtattttttgacttaccaaccgaaacaaaaacagaacgcaaagtggcttcccgttttcggaaaaacttgttggatgatgggtttgctatgtttcaattcagtatttatatgcgtttttgtgccagtagagagaatagtagtgtacacatcaggcgaacaaaaaacaatcttcccaaaaaaggcaaggtgtgtattatgcagataacggacaaacaatttggcatgatggaactttttcatggccaaaaggaagttgaaaccgaagccccttcgcaacagttggaattgttttagggtagaaattaaaatctgggaggaaacgagaggtttcgactgcgctcaacctgatatttagaattctagcaacctcattaaaaaacaggataccaactnnnnnnnnnnnnnnnnnnnnnnnnnnnnnnnnnnnnnnnnnnnnnnnnnnnnnnnnnnnnnnnnnnnnnnnnnnnnnnnnnnnnnnnnnnnnnnnnnnnnnnnnnnnnnnnnnnnnnnnnnnnnnnnnnnnnnnnnnnnnnnnnnnnnnnnnnnnnnnnnnnnnnnnnnnnnnnnnnnnnnnnnnnnnnnnnnnnnnnnnnnnnnnnnnnnnnnnnnnnnnnnnnnnnnnnnnnnnnnnnnnnnnnnnnnnnnnnnnnnnnnnnnnnnnnnnnnnnnnnnnnnnnnnnnnnnnnnnnnnnnnnnnnnnnnnnnnnnnnnnnnnnnnnnnnnnnnnnnnnnnnnnnnnnnnnnnnnnnnnnnnnnnnnnnnnnnnnnnnnnnnnnnnnnnnnnnnnnnnnnnnnnnnnnnnnnnnnnnnnnnnnnnnnnnnnnnnnnnnnnnnnnnnnnnnnnnnnnnnnnnnnnnnnnnnnnnnnnnnnnnnnnnnnnnnnnnnnnnnnnnnnnnnnnnnnnnnnnnnnnnnnnnnnnnnnnnnnnnnnnnnnnnnnnnnnnnnnnnnnnnnnnnnnnnnnnnnnnnnnnnnnnnnnnnnnnnnnnnnnnnnnnnnnnnnnnnnnnnnnnnnnnnnnnnnnnnnnnnnnnnnnnnnnnnnnnnnnnnnnnnnnnnnnnnnnnnnnnnnnnnnnnnnnnnnnnnnnnnnnnnnnnnnnnnnnnnnnnnnnnnnnnnnnnnnnnnnnnnnnnnnnnnnnnnnnnnnnnnnnnnnnnnnnnnnnnnnnnnnnnnnnnnnnnnnnnnnnnnnnnnnnnnnnnnnnnnnnnnnnnnnnnnnnnnnnnnnnnnnnnnnnnnnnnnnnnnnnnnnnnnnnnnnnnnnnnnnnnnnnnnnnnnnnnnnnnnnnnnnnnnnnnnnnnnnnnnnnnnnnnnnnnnnnnnnnnnnnnnnnnnnnnnnnnnnnnnnnnnnnnnnnnnnnnnnnnnnnnnnnnnnnnnnnnnnnnnnnnnnnnnnnnnnnnnnnnnnnnnnnnnnnnnnnnnnnnnnnnnnnnnnnnnnnnnnnnnnnnnnnnnnnnnnnnnnnnnnnnnnnnnnnnnnnnnnnnnnnnnnnnnnnnnnnnnnnnnnnnnnnnnnnnnnnnnnnnnnnnnnnnnnnnnnnnnnnnnnnnnnnnnnnnnnnnnnnnnnnnnnnnnnnnnnnnnnnnnnnnnnnnnnnnnnnnnnnnnnnnnnnnnnnnnnnnnnnnnnnnnnnnnnnnnnnnnnnnnnnnnnnnnnnnnnnnnnnnnnnnnnnnnnnnnnnnnnnnnnnnnnnnnnnnnnnnnnnnnnnnnnnnnnnnnnnnnnnnnnnnnnnnnnnnnnnnnnnnnnnnnnnnnnnnnnnnnnnnnnnnnnnnnnnnnnnnnnnnnnnnnnnnnnnnnnnnnnnnnnnnnnnnnnnnnnnnnnnnnnnnnnnnnnnnnnnnnnnnnnnnnnnnnnnnnnnnnnnnnnnnnnnnnnnnnnnnnnnnnnnnnnnnnnnnnnnnnnnnnnnnnnnnnnnnnnnnnnnnnnnnnnnnnnnnnnnnnnnnnnnnnnnnnnnnnnnnnnnnnnnnnnnnnnnnnnnnnnnnnnnnnnnnnnnnnnnnnnnnnnnnnnnnnnnnnnnnnnnnnnnnnnnnnnnnnnnnnnnnnnnnnnnnnnnnnnnnnnnnnnnnnnnnnnnnnnnnnnnnnnnnnnnnnnnnnnnnnnnnnnnnnnnnnnnnnnnnnnnnnnnnnnnnnnnnnnnnnnnnnnnnnnnnnnnnnnnnnnnnnnnnnnnnnnnnnnnnnnnnnnnnnnnnnnnnnnnnnnnnnnnnnnnnnnnnnnnnnnnnnnnnnnnnnnnnnnnnnnnnnnnnnnnnnnnnnnnnnnnnnnnnnnnnnnnnnnnnnnnnnnnnnnnnnnnnnnnnnnnnnnnnnnnnnnnnnnnnnnnnnnnnnnnnnnnnnnnnnnnnnnnnnnnnnnnnnnnnnnnnnnnnnnnnnnnnnnnnnnnnnnnnnnnnnnnnnnnnnnnnnnnnnnnnnnnnnnnnnnnnnnnnnnnnnnnnnnnnnnnnnnnnnnnnnnnnnnnnnnnnnnnnnnnnntgcgatttctcccgctggtcgaaatgacaaattaaaaactataaaactatacgtcaatgaactttccttttgtcattccgacgaaggaggaatcccatccacctaagtcctcaacctccattcaaaactcaaaaactcactcttttgcgatttctcccgctggtcgaaatgacaaattaaaaactataaaactatacgtcaatgaatcccctttttgtcattccgacgaaggaggaatcgcatactcctaagacccaagcttcaattaaaaaccccaaaactcactcttatgcgatttctcccgctggtcgaaatgacaaactgaaaacgcaaaaactaaatgtcaacgaatcccctttttgtcattccgacgaaggaggaatcccatccacctaagtccccaagcttcaattaaacaccccaaaactcgctcttatagggtttctcccgctggtcgaaatgacaaatcaaacaactcactccaccaaaaaccgatcttccaaaaattcaaaagaagcattaaacgaacgaatcaaagccaacttcttatccctccgccaaccctttaactccttttctctcgcaatagccagctgaatccaagaaaactcttcataataaaccaaatgttgtatctgatacctagacgcaaacgtcttaatccctttttcaatattttcacgatgctgccgtagtcttctcccaagattattggtcaccccaatataataagtagatcgatacttgttcgtaatgatatcaacgtaatacgtatggctgccttcgttaaattcaatcataattattagtttactcttatgcgatttctccgctatcggaatgacaaagtgattcttattttgtcattccaacaaaaaagaatcttatccacttgcgccgcaatggctgcctatgttaaattcaattactactactctattatttactcattaaatagtagtgaatgcaacgcatttctgaaatcggtaaagaagattcggtaactttataaaattataaaaaaggagccaactcaattcatagttactataaaattaagcaacttcaattctctatgtactggttatgtaattttatcggcctaaaaacctaacagatctcccaaacatgtcagttttaattttcaaaacaactttgtgcaattgaataattgttataattttactccttcattgaacaagacatacatgttattacagaataaaacatattggtggcacaactttaaactttcaatcctaaggacttagagctgctatattattttgtaaactatataaattttaaaagccgtaagcgatccttacggctttttgttgttttaaacttaaatattaataaaatgaaaagcctatttaacctacaactatggcagggcttctgccaatttaaaaacattcaacaccagacaaacacgcacacaaatgtgcatcgctattactattataataacattaaaaaaatagattatgaatacttataacgcatcccaaatagatacacaaatcaacgttcaacccgtaaaagaaatgctagaaacggctggcatgtatggtaactacggtggcgcctatgtgcctgaagttttggcttctcaattgaccaaacttgctgccttttttgattctgaagttcaaaaatcagagttccaacggcaatttattcactacttaaaaaccttcgtaggaagaccttccccactatttaaagctgaaaacttaagcgaagccatcggggcgactatttacctcaagcgtgaagacttaaatcatactgggtcgcataaaatcaataacgcgattggtcagatacttttagcaaaacaaatgggcgctaaagaagttattgcagaaacgggtgcagggcaacacggagtcgcaacagcaacagccgcagcgttactaaaaattccttgtaaagtatttatgggtgctgtagatgctgaacgacaattgcttaacgtaaagcgaatggagttattgggaacaaaggttgttataacaaacgaagggcgagcaaccttgaaagacgctgttgatgcggctttgggttattatatagagaacccagaatcattttatttactaggctcccaggtgggaccacacccctatcctaaaatggtgggctattttcaaagtgtaattggcaatgaggctattcaacaaatagtacgagccgaaaaaagactgcccgatgcagtatttgcttgccttggtggtggttctaacgcgattggtgcttttagcgcatttttacccgagacagaagttaaattatacggcgctgaaggtggcggtaaaaacgtgtttaaccatacagcggcaacgcttacctatggcaaaccttcggtgtttcaaggaacgtattcatattgtttggtagatgaagaaaacaacccgatggcttcagaatctatcgcggctggtttagactatcctggaattagtccgcaacacgcaagcttgaaagattcgggacgtgcaacatacgagccaatcaccgatgaggaagcccaagaagcttatagattattggcgaaattggaaggaattatcccggctattgaatctagtcacgcagtggcattggcaataaagaaatttaaaaacacgggaaaattggcgattgttaacctatcgggaagaggcgataaggatattacacgtgatatttaaggataattgaggcatcagactttagaggcgagatttgcttttgatagcttgataaatataggtagactaattaatcatgttttttgttatcattgaacaacatcggtaaacttcaattttaaaacctaacagatctttgtatctgttaggtttattttagaaatccgtaccttgcgcatcgattaataaatgcaatttagttacttcatattactggtaaatgaatctagcgcatacgaaaatcaacaccaaaaaacgcttcacataaatcaagaaacagcaatgaatcaagggtattctgaagacgaaacatttcgcaaggtagatttcaataaaacgccactaacaagaggagaatatgaaggctgtagctttgtagattgcgacttttcgaacagtagtctgttcaattttagctttaccgattgtgagtttttgggatgtaatttaagcctagctaaacttgatggtacagcatttagggactcaatattcaaagattgtaagcttctcggtcttcgttttgatacgtgtaatgacttcggaattggctttagttttgacaattgtaacctaaaccacgcctcgttttataagctaaaaattaaaaaaactcattttatagactctcagcttcaggaagtagattttgtggattgcgacttaacgagtgccatatttacaaactgtgaccttaacggagctaccttcaacaatacaatcattgaaaaagcagacttcagaagttcaattaattacactatcgatccagaattgaatcggatcaagaaagcgaaattctctctcgctggcatttcagggttattaacaaaatatgatattcaaattaataattgaaactgaaatctagctcttcaatagtattcaattaaaacagttacagccaccatccgccttcattttaacgaaagaagttataagcttgtttgtattgagtctaaataaacttatctttgcaaactccttgaaaaccgaagtttaaattcgtgaaaaaggaattgttaaaaagcgtatataattcataaaaaaaaatcaacaatgaataagtttttgaaatttggcttaatggcctttgctgtaagcttttttatatcttgcggaaacacttcaaatgaagatgttgtaaacgtatacacccaccgccactataaagcagatgatcaactttttgccaagttcacaaaagaaacaggtataaaagtaaacattgtaaacgcgagcgcagacgaattaattcagcgtttagaaacggaaggaaaagattctaaagccgatgtgttaataaccgtagatgctggtaggctataccgcgcaaaatctaaagacttgttacaacctattagctcgaaagttttagaaaccaacattcctgtcaattttagagatcgagaaggctattggttcggaatgacgtatagagcgagaatcatcgcttatgcaaaagatcgagtgaatcctgataccctaaaaaattacgaagacttaattaaacccgaatggaacgggaaagtgctaattcgttcttcggaaaatatttacaaccaatctcttttagcttcaattatcgatgccgatggttcagaaaaggcaaaagaatgggctagcggaatggtagcaaatatggcaagaaacccaaaaggaagtgatcgcgaccaagtgaaagctgtggcttcgggcgaaggtgatattgctattgtaaacacttattacattggtttattactaaatgatggaaatgacgaggagcgcaaagcgggtgaatctgtgggcattattttccctaaccaagacaatcgtggaacgcacattaacgtaagtggtgctggggtaaccaaatatgcgccacacaaagaaaatgcaattaagcttatcgaatttttatcaggtattgaatcgcaacaaacgttggcaaatttaaactacgaatatcctatcaatccagatgctaaaaaagcctctattttaaaaacctggggcgactttaaagcggatacaattaatttaaacaaactcggagaacttaatagcgaagcagttacgatttttgataaagctggctggaagtaatattgcgtattgatttggtagacggtagacgaaaaaaagtagtttaaatggcaaaaaagaccacctattggtggaataagtggacagcgggagcaatcgtgatactattattagtattaacgcccatattcactatcttaataaagcttttcgacagtccaggagagcattggggacatatcgttaccaacctactcccttcgtacttttcaaattccttgattttacttttaggcgtgggcttgggaacatttattctaggcgtgagtatggcttggtttgtctcggtttatgaattccctggccgtaattattttgaatggctacttattttaccgctcgccttcccttcctacatgatggcgtatagctatgtcggaattttagaatacacagggcccgttcaagcattttttagaaataatttggacgtttattttacaggacccattgtagatattatgaatatgcctggtgcaattttcatactctctataagcctgttcccgtatgtttacgtgatttgccgcgcttcgtttatgaagcaatcgagcgagcttcaagaagcagcactcatattgggaagtaacagattgcgcgtatttaccaaaatcgcacttccaatggcgcgtccagccgttgcaggaggaattgcactggtgggaatggaggttttaaacgactacggaaccgtaaaatactttggcgtagatacctttacttctggaattttcagggcttggttttcatttggagatattaataccgccattcacctttcggctatattgactttgattgtgttatttttaatatggctggaaaactttcaacgcggtagccgaaattggacaagccaaagaagtagtgccagacctacgctacggatagttcctaaacacagaagcacacaatggctatacactggcctttgtgctgtggtgctaatgattagttttattatgccgttatcccaacttttttattgggtttcaatgacctggcaaaatgtaatagattccgaattcggcattcttatttttagaagtttttcattagcaatcggttcgtctgtggcaattgcaatgctgtctatctttttactttatgctgttagattaagcccgttgcgatggacacgccatattgcccgaacagcttctatgggatacgcaattcctggtgctgttattgcggtaggtgtaatgattccgatgatggaactagacagatttataagttggctttcggcagatagtataggaatgatattgtctggctccctttttatccttgtaattgcgtatattgtaaggtttatggctgtgggctataatgcaatagacgcaggattccaaaagaccggagcatcagtaaatgaagtcgcaagatccttaggagcgtcacccataaggacattatggaaaatagacttacctttgatacgaaacagtatagctgcagcaattctacttgcctttgtagatattttgaaagaattaccgctaacgttaattttgcgtcctttcaacttcaatacactggcaacaaaagcctttgatatggctacgaatgaaatgattgcagaatcggccaacgcatcgctggtggtagtgcttacgggaattattccgattatcctgttgaatagcgtgattcgagggaagtatgattgaagattggaaatgaataacgaataaccaattttgaataacgaatgatgaagttggaaaatcattgaagatttacgattggggatatacg

SEQ ID NO: 1173 - DNA, 24461 bp, synthetic construct
  source 1..24461: mol_type = other DNA
  misc_feature 1..24461: note = Synthetic
atggattttgtgaaatcgaagagttatgggagcacttacagtagttacaacagtaatgctatctccagggttacattctacagtgtatatgtgtataaaacgtactattttgcaatcgtatgctttaaaagaaaatattagtggtgcgaattgaaaatccatatggcctttagcgttggcttttcgttcttttcattatcaaacttccaattaatccaatcccgacaatgacgtctacgatgttccaaatttctcttccaagtgctattttaaaaaatgcttgaaagagtagggcaagtccaccgtaaataatcatttctgttttctgattctgttcatttgctttgtatgctaaaattccgaaaccaattagggcaacaaaacggacaaattgataaaatccgtagggcatatccaacaggcacaaaaacatcagaattgataaagcaatttttatcaaaacttcactattcttcatttctgtctttaaggttatcaaaaatgtcatcatcaatttcacttatcaactcaaattcatttgatatatgagtgtcaaaaaagtcgtcttgtaaccttgataagtatgaatcagtaataatatcttgttccaaatagtcttcaaaatctggatgtttttcaagaattggctcgttgtcaattttcagctttgaacgaataactttaaaaaacttgatttcgctgtattcaactttatcgtctgctttaattgtgtcaattgcaacttcgataagtttcagttcatttgcttctgttaattcagtagttgtaagctcattgaaataatcttttaaaaattgttgaccgtctttattgatagcaagtaacaaagtgtctaattcggcattgatgtcaatttctccaaaggttttacgttccttttgtaattgcttaataagtttgacctcacgtttgtcaatatcgccatcacaagccatacacgaaaaagcagtctttagcaatagtttattgaaatgtaatgtttccatatctaattgtttttaaaaccgattcttggtcggtcattattattttctgataatccttccattttcgctcttatagcgatatagctgtgcaattcatctagtttaattgaaggcttattgttgtttatggtatcaagtaaaatttccttggaaattcttgatttcattttaagtgcttttctcgaagcttcatcacaaaggaattttatatcacttgaaacgtagttttctgttgcttttgcaagttcagaatagtttaaaccaacttctcttggtcttttttccaagtaaagtttaaacattaactcacgagcttcaaggtcaggtggtggcaaataaattactttgtccaatcttcctgctctcaaaatagctgggtcaattgaattaggtctgttggttgctccgataataaaaatgccatcatctccgcaattattcatttgtgctaaaaactcatttacagcacttgtattcatatgatttaaattcgagttgtcacgattaggaacaactgcatctaattcatcaatgaaaatgatacttggtgcattttcacgagcttcatcaaaaaggttcttgattttttcctgtgattcgtttacatacttactctgaatatcagatggctttaactgatagaaattaaaacctatttcttctgccattcgttctgcaaaaaacgttttaccacaacctggtgggccataaagcaaaattccgtttggaatggtcaagccatactctgcataatgttccttttcgtttaaagcatcaattacatcaagttggatagtgtctttcagttcttgcattcctgcaattgctgtaaatccttttcctttctttatttccttaagtttcggtttagatacttcttgcggtgatgaaagctgttgcacttccatttctccgtttattgcttttatgaagcttttgacactattaaaacgaccttcagcatttggctgtaaggctttggtgattatgttttgggtttgttggtctgtaactgtcgaaaactttaaaggctttttcctttcttcgataacggcatcctctaactttattgaatctgctttgtattttgaaatttcaacaaaccaaggtggtaatccttccaacaagtgataatataatgcgccaaccgaaaacacatcactttgaactgaaaatactttgttgaacgcttcattggcttggtaaaatggatttaaaccttcctttaaaaagtccttgtttgattggcttaaaaaacgagcatatccaaagtcaatgattttaggaatcgtaacactgcctgataaatccaacattacattcaagtttgtaatgtcgttgtggataattggattttgaagagaatgtaaatagttcaatccgtttaaaacgcctgaaatgatgtttttagcttcataaggcttaatggtttgttctctttttaatttgtctgccaaggtttcaccactgatgaaatcaagaattgcgtaagtgtatttttgaccatctaaaagaagttcacctctatcacagtatttaaccaaatttggatgcttgatgctttttaaaacctgaatctctaaaacatcaccatttgcatcaaattgagttctgtctaattttgaatacgcaaacagcttcaataatttggtctttccttcttggtcttttacacgataagtttcggcatagcttcctgttttaagaaagaaagtcactttgaactgctcgttaattgattgccctttggataatatgggactatgcttactcatttagaacgcttcatttgggttactaggtcgagtgctgaaatttccattttcttgtaaaatcagctcatattctaaaatattattgctcaaagattgagggtcatcctttccaaaactttcgttggtaataaaaccacctttcatttcaccgcctttcatttctttttcaggattccaacccttaccgtagtaaaaaaatgtttggtaagtaccatttggaaatgagaacgtaaaactgctccctgaattaatgtaggcatgtctaacaactttatcattcttttttatggtaacaattacatcagagttactcgttcttacttttatttgtgaacagccgtaatcattacaagttgaatttccaccataataacgggaatatggcgtagctcctgtactcaaagaattgttgatatacttatcatagatggctttttctttcctttccttttcaagacgttcttctctggcaatacgctcttcttcctcacgcttttcttgctcaatgcgttcttgctctaattgaaatgcacgttcagcttcttctgcttttcgcttttcttccaattcaattctttgctgttcttcacttgctaaacgctgttttctttctgcatcactttcacaagaataaataattatagttaaagaaaagagcggtagaagtaatatagttcttaatctcatatccttatctttttaaccaaccaatacagcatcatcgccacttggtcgttcatcatttggtaataagtcaattagtgaaatgacaactggatgtagttcatctacagttgggttctctccaataacttgtaatcctttgtttaaaagtgttcttgccctaccgctatctttccaatggaatgagccgaaattctcgttatggcttcttataaatcctattaactgataaatgaatgtcagtttaataaagaaaccttcgatttcctctaatagaacatttccaagttttacatctttagcacgaattacttcatccaattgtgaacggaactgattgacaacttgcgtagttttttcgttacctaaatcattatttactttttctaggtgataaaactcttcttttaaagtttcttctaattttggccattcggtggtgtcgttgagttcatcaattgtttttaaagactttctcaaattggttaagacttccagtttgccgtcaacatcatttttgttattctcaaacgacttttctatttgctccaattctgcttcaactttggctaattgatcattatcagaattaccatcttctttcaattctgcaatgcttccttttgcttttctaatttcatttgccaaccaagttgtctcaatggatgaaactgttctttcgactgttgcttcataggtaaaatctaaataaggaaagaaggctgtaacagtgattttttctgatctatccacattgacagtcaaatcaacatcactattttcaggcaaaagcgaaggtaaatcagctccactgatgattatatcagtaacgtgttcgttgtaaatcgctcttgtgccttctgctttatgctcgccttcgtaaactgggattttaatgaagtcggaatccattcctggacgaatttgtttttgggtcttcaatccattttttgttccaactgcgggtatagattgatttttctctaaatttttgatggtagtaaagatgatcttccctgttgacttactttttatctcaatcccaatattgtatgctagtgttgcacttccaattttagaaccctgaatcacactgaaacttgatggctcactttctaaaatatttcctttgtcgtcaaacagaaccacttcaaaaaggttagtttttccttcattgagttgaatttctacaacttcaccaatcgtattaatttcaacttttccgcttgaccaagctttgtcccctctggtaacttctgcaaatactttttcaggaatctctccttctgttttgtcagccaaaatcttgatagggacaaattcttcggtttccaccgttgatgattcattggctatttccaattgaatctttgttttgtctctggtttgctctcttacttcttctgaaacatccaccgttgatgcatacaaggctgcaccttttgaaaccaccgtcattggatcggcacttgtgtctggtttgcagatttgttcttccaacatttttctcaaaactggtgaaaacgttgggccaccaacaagaattaaagaatctaatgaagaacctttaaggttgtttctttccaatagacttaaactaacatcaattgctttttggaaaacgggcgaaaccgctctggcaatgtcattttgagttacggtaatgtctaattcaaattcttcgccttcatcgtcttctccgggaatatctcccaaatcagacaagatattatgagtatcattgaatgaaagcttgattttagtttcttctgcataaaatttcattgcattacgcagaatttgcttttttgtatcatccgccaaaatggaatcaatcacaaaggtttcttgaatgtaaggcaagataatttcatcgacaattgcgaagtctaagtttttaccaccaagataattatcgccttcggtgtcaatcactttcattattccttcttcaacttttaaaagtgctgcatcaaaagttcctcctccgaaatcgaatactaaccaaaaaccgtcttttttattggaatctaaaccgtaagccattgaagctgcaacaggctcttgcaacaattcaatatgattgaaccctgctaattttgcagcttctctcgttgcttctttttggttgtttttaaaggctgctggaacagtgataacaatggaattgacattttcatctttcacgaaagacttcagggttttcaaaacttctgctgacaattcttctgaagtcaaatccttttcaaaattagaactcgggtactttttatcagttcccatagtccttttgaattcaatgaaagcattatcatcttctgaatcccaactcttcattgcattcagcttctgtcttttcagagcattataagcagtttgcccaatttggattgcttttttcttgttgatataaacacaagagggcattgtgtctgcttgcatatccgtttttttaatggttgcttctccattttccattcttgaaatagcggaattcgttgttcctaaatcaattccgtagtcaattttagttcttgccattgtttaatgttttttgttctcctacgctaacttcaatttgagcagcttgtatcattgctcctttaaagttcacttgtggttttatgattcgtgtaataatttgttttcccgtttctaaatcttcgcttgggacgaagtttgcggatactttcataccgtcattgtattcttttcctagcatatctactagttcatagccattggatgcaaaattgtcttgaatccgttgtacagaagaatttaactgtttaagacccttggtgctttcattcattctgcccaaattcttttgaattctaataatctcatctgccacttttaaagccaaggagtggtcggctttttcgttggaagcaactggctgtgatttagccgcttcttgttgaagttttagttgtgtttccaaaacttctaccaatttgttatccaatttcacactttcttcttcaagtgaagctttggtatttctgatttgggtttcgacatctgtcttgcttgacttaatgcgcttgcctaataaccaataaaccaaaccacctaaaagaagcgttaacaaggtggcaataatccaatacaagcggtttttctctacactactatccaactgggctatttgagtgtccgctttttgtcctgtttcttggattttagttccaagctctttcgaattggttacaatgttttggctgttggtttggattagttggcttaaactatctatggatgcattgagattggtattttgctcctgcaaagctgagatagtctggctctgctttccaattgtataattttgatcgtttagctttttagtcaaagcatctatctcttgccgttgctgaaatacattgtcttttatggttggtatttcttgaaccaaagttgaatcttgttgctgttgagcaaaaagattagtggctccaaaaaagagcgatataaataaaattttcttcatagttaatattttgctgctgaaagctccatttttagtttgtaaattttttcttcctgagtttggatatgttttttcttctcgtcttttgatcgctgagttagcttgtcaattttagtctgttgtgcttgaatttgactttgcttttcagagcttcctctaaacaatttaaatttttgaatttcgctcatttcgtttttggcagacctgatttcggattcgtagtaatcagtttgatttatctcccttagtttcttttctgcactagctatttctttctctaacctttcagatggtgctaaatcgattgtgtactttttagtgtgtatcaaatattcatctacataaacctcaatgcggtgttctcctaattcgtaagtgcatttttctgaatttccccaccctgggagatttagagtttttgtttgaatattaagagttgtgtcggtttgaatagtatagtttaagggagttaaattcttattcagctttgtttttccgcttggattaacatatttaacgtataaagaaatggacgaactttctgttacctctatatctaattttaaacctatatatcttataaatttggtatatagtggtttatcaattaagacattctttgaatctgttatttgaacctttgaagaaactattttaaaagagagtttaggtggtattcctttgtaattttcaataactctgtttatcaatgagttactttgagagtactctttaagccaataagctaattctacaaattcagatttaagttcgttattggaacttgctttaattctttctaaactctcatcgggtaaaatttcttttagtaaatcatttactttatcccaatcaatagaattcttgatgttatcttcaacagcagactggttaatagttctgtgaccaagtcttatcaaagggtcactttctttaagctctttaacttgttctcttattttttgctcattagtttcataagcatctttcacggattgtaataaggcaattgcttgtgcaacctctcggtctttcatttcttcaagagtggcaagactgtcttttgccctatcccttgttaactttccaactgcaattgacaacgctgtctcatttaattcctgggcttgttttaagaaatcttcactcgaatcattttcttgactttcattgaaatagtcaataccacattgcattatttcatttcccaattggtctgcaattgccatgtatattaagtcgctagtgcctagtaatgatttgagaagtgataaatcgtcttttgtgtttgtaaatagtcttgaaccgaattcataagccttgcccttgtctgcctttcttttctttttacaactctcaatttgtctttcgattttatgtaatggttcttctgtaaactttttggaaagatacttttgagtagttccgttgcatccgctaaacaattgcaatgtttccgaacttgaaaactgattttttaattgcgtcagcaattcatcaatcaatttttcagattgtttttgattgtcaattgtataagtttcatctgcaacagaatgtacgaagctttcaaaatagtccgattcaatcagtttgattttagcttcaatgcctgtcttaatatctgattttttcctgctcaaaagtttgtaggttcccaaattgttgaaggcagagaaatttttggaattaacatccttgtcggttgttaccttttcccaaatttcaagtgctttatcttcatcaccatttttcagatattcaattgcggtgttgtcaaatggactggcatttaaaaaccaaaacagggcatagtttactttgtcttggttttgctcaacatttgaaaatgctttgataacagaatcttccgttctgtcaattctcccgagaatttgaaagtcaaaatcagttttgatttctttaccaacctttgtgtaggctttgatttttcctttttgcttttcaagttcctttgtcgttgcgtttgagagaatacccgcaatccgataagggttattttttattaactccatattttttcggttggctttaagtttctaaaaataattctcattctatttcttctattacggttttacgtattctgatcaatttttggtcgagtgttggctttgaacactcaattaattgagaagagaaaagagttggaaaactaatggcaaatattagcagacctctcaaagacattgatattccattccgacaggggttttcaatacgcctgtcatgattttgtcgacctgttggaaagagctataagggtgtagagaagagtatgagccgaaagggagactgttgggacaatgtcgttgcggaatcctttttttaaggccataaaggaatttgaatacttatataatcttaaaaatgtagcttaatctattgtccaattttttattgcaaatccattggttagtccatcaaataatggaaattatcgtagattaagtctagtgatatcgatggttgtagattcattaaaaaaaaacgggttcattgccacaccacgctgtctttatcagccgtccgtgcccccatcacccgcaaggtgctggcccattcttgaccgcggtgtggcaactatatagtaaatatatggaaaatgtagaacctatctaagctaaggttttgggttgtacaattccctcttacgctatctatggcaacggcctaaaggggaaattaagactgtgctactcaaagaatcttaataaaatttaaattcctaaatttaaaaaatcaccggtgtaagagatatggccaatgtgataaattcccacccccagtaaaaacaagcagagagtacttcggaaatacccttgtgtaacattcaagcaaaaaaaagcgacataagattaaactaatgccgctttaaatgttttcacaacggaataatccttattgtgaattgctttcagttttgctaaaatagtaaaatttaataatggattttacagaaaaacgtaataaatagaaagaaaatcattttaaattgtttatataaaaacttaaccatgaaaaaaattttgggactggacttaggaacaaactccattgggtgggcacttattaaaaataactttaataagaaagaaggggaaatcgaggatttaggagttcggattattccaatgagtgcagatgttttggggaaatttgatgcaggtcaatcaatatcacaaacagctgaaagaacaggttatcgtggagtaagacgcttgtatcaacgagataatttacgaagagaacgtttacatcgcgtgttgaatatacttggctttttaccagaacattatgcacaacaaatcgattttgaaaaacgcttaggtcaatttaaagaagggaaagaagtaaaactaaattatagacccaatgcggatggtaaatacgagtttatttttaaaccttcctttaatgaaatgcttgagcagtttaaagtagctcaacccgacttgttttatgtaaagtctaacggaaatgaaacaaaggttccttacgattggacactctattatttacgtaaaaaagcactatcacaacctttaacaaaacaagaattagcttgggtaattttaaatttcaaccaaaaacgagggtattatcagttaagaggcgaagaaattgatgatgaaaaggacaagcaatttgttcaactaaaagtaaaagaagttattgactccggggaagctgttaaaggaaaaccattatttgatgtgatttttgaaaatggttggaagtatgacaaacaaatagtaaaaaccgaagactggattagtaggacaaaagaatttattgttactactaaaatgttgaaaaatggggatattaaaagaacttataaagccgtagattctgaaaaagattgggccgccataaaagctaaaacggaacaagacatagaacgctcaaacaaaacggttggtgaattcatttatgaaaccttacttgaaaaaccaacacaaaaaataagaggtaagcttgtaaaaactattgagcgtaagtattataaagatgaattaaaaaaaatactaagcaaacaaatagaacttcagcctgaactgttttcaaataagctttataatgcttgtattaaagaattgtacccacgaaatgaagcacaccaaaatgctataaaaaaccgtgactttctgtatttattgattgacgatattattttttaccagcgtcctctcaaaagtcaaaaatccaatatttcgggctgtcaattagaacagcgtgtgtacaataaaacgaataaagaaaccggtaaaaaagaaatagttaggcaagcgataaaaggcattccaaaatcacatccattatttcaagaatttagaatttggcaatggttgcaaaacttaaaaatatatgataaagtagataccaataaaggtgaattgatagatgtaaccaaacaactattgaaaaatgatggtgattgggtagccttattcgactttttacaaagcaaaagagaacttgaacaaaagcagcttataaagtattttattgataaaaaacgtatcgaaaagtcaaaaaaagaccattaccgatggaattatgtggaagataaaaaatatccttttgcagaaaccagagcgcaatttatttctcgtttaacaaaagtggaaggaattgatgatgtcgacacctttttagacgaaaaaacacaactcggcactaagagtaatagctcttttgtaaccagaattgagcaattatggcatattatttattcagtttcagatatcaatgaatataaatctgctttagtaaaatttgctctaaaacaccatttggatgaaggatcttttgtcaatagttttatcaaattcccaccatttaaaagcgattatggcggctactctaaaaaagccttaaacaaattgctgcctttaatgcgtaaaggtaaatattggaacgaaaatgacatttcagataaagtaaaacaacgtgtttcggaaattatggaacgtgttaatgcgcttcacttaaaagacgattacaacgctaaacaattggcagaagctttagcgaatgttagtgatgatgatgtaaaaaaacaagttataaaaagttttgttccatttaaagataaaaatcctttaataggtttgaatacataccaagcgacttatttggtttatggtagacattcggaaattggagatatccaaaattggaaaacacctgaggatattgatacctatctagataatttcaagcaacattcgctacgcaatcctattgtagagcaagcggttaccgaaaccttgcgtgttgtaagagacatttggaaacactacggcaaaagccaacctggttttttcaatgaaattcacgttgagctaggtcgtgaaatgaaaaacccggcaagtaaaagggaacaaatttcaaaacgaaataccgaaaacgaaaataccaatcttcggatcagagaagtattaaaggacctgatgaatgacgattctattgaagctgatgtacgagattattcaccaagtcaacaagatttattaaaaatctatgaagaaggtatatatcaaaacccaaaagcagattattcaaaagttagcgaagatgaaatagccaaaattagacgcagcaacagtccaacactaaaggaaatacagcgttatcgtttatggctggagcaagggtatatttcaccttatacaggcaagcccattcctttgtcaaaattattttcacacgaatatcaaatagaacatattattccacaatctcgctattttgataactcattgagtaataaaattatttgtgaaagtgctgtaaatgaagataaagacaataaaacggcatttgaatatttaagcgcaaagggcggaaacgttatcaatgggcataaattattaggtcttgcagaatatgaagcccacgttaaccaatactttaaaaataaccgccaaaaactgaaaaaccttttgagtgaagatatcccagaaggttttatcaacaggcaaatgaacgatagtcgatatatcagtaaactagttaaggctttgttgagcaatattgtacgtgaagaaggagagcaagaagcaacttctaaaaatttaattcccgtaacaggttcagtaacctcaaaactgaaaaacgattgggggttaaatgataaatggaacgaactcatcttaccgcgatttgaacgtttgaaccaattaacacaaaccaacgattttaccgcaatcaataccagcggtaatatcataccaactgtacccgatgaattgctaaaaggctttagtaaaaagcgtatagaccatcgtcaccacgcattagacgctttggttgtggcctgttgtacgcgtaatcatagtcattacttgagtgctttaaatacagaaaagaaaaattatggattaagagataagttattgattaaaaacgaacaaggcgattataccaaagcttttcaaatgccctggcaaggctttacaggcgaagctaaaaatcaactagaaaaaacagtgattagttataagcaaaacttacgtgttatcaataaagccaacaacaaattttggtcctacaaagatgaaaatggcaatttgaatttagacaaaagtggtaaacctattaaaaagttacgcaagcaaacaaaaggtgataattgggcaatacgtaaggcaatgcataaagaaaccgtttctggaaaatataatattgaaacgcctaaaggaaaaatagcgacagctgtaagaggctctttggcagacattaaaaatgaaaaacacttagctaaaataactgacccacaaataagagaagtgatattgcctaatcatttaaaaaactatgtagatgaaaagggcaaaattaaatatgatgtagcctttagtgatgaaggaatcgaaggtttaaacagaaatattgtcgctttgaacaatggtaaaaagcaccaacctatttataaagtcaaattttttgaagtggggagtaaattttccatatctgaaaatgaaaactccgctaagaacaagaaatatgtagaagccgcaaaaggcaccaacctcttttttgcggtttactgggatgaaaaaaaacaaaaaagaaattacgaaaccgtaccgttaaatgaagtgattgaacaccaaaaacaagtagcacatttaccaaaaaatgaacgtttacctattcagcctaaacccaaaaaaggtaaatttttatttgtactatctcccaatgacttggtgtatgtacctacagatgaagagttagaaaacttggatgctatcgattttaagtatttaactactgaacaaaataatagaatttataaagttgtaagttttactaagaccagattatatgttattccatttagtgtagcaaaagcaatctataataaagttgaatatacacaacttaacaaaatcgaatttactgaagagaaaaatgtagtagtaaaactaaaagtaaatcgactaggaaatattaccatagcatagaagtatgataaaacgtacgctcttttttagcaatcctgcttatttaagtaccaaaaacgaacagttggtggtcaactttcctgatgaaggtaaaaaggaagcgaccattcccattgaagatttgggatatatagttttggaagacccccaaatcacaatcacaaatggattgttaatgaaattggtgcaaaacaaaacagctgttatcacctgtgacaaacaacacctgccttgttcttttttccagcctttggtaggtcatagcgagcagacagagcgtatgcgccaccaacttaatgccagtctacccttaaaaaaacaattatggcagcaaacggttaccgccaaaatagagaaccaggccaatcattttttggcaaggggaaaaaatgcacttcggttaaagcggtatgcaaaggatgtgaaaacaggggactggaataatcaggaagcattagcggcagccttttattttcaaaacctgttcgaactggaaggttttagccgtaaccaaaaaggtgtgccacccaataatttgttgaactatggttatgccatcttaagggctgttgcggcaagggcattggtaagcagtggtctattgccctcattgggaatctttcatcacaacaagtacaatgccttttgtttggcggacgatgttatggagccctatcgtccttttgtggataccttggtctatgatattgtccaaacaggatgttcacttgaagatttaaaccaaaatataaaggcccacctgctaactattcctgccatggatgttctcatcgatgaaaagcaaagtccgttaatgaatgccatgagccgaaccacagccagtctagtcgaatgttttgaagggagtaggcgaaagatactttatccagagtttaaaacctctttggaaacattagtcaattaaagttaaatggagaatcatggaatcatatttgactcgtcttaaccaataccgttgtatgtgggtaattgtattttttgatttgccaactgaaacgttcacggaacgcaagcatgcgaccaaattccgtaaagaccttttgaacgatggttttggcatgttccaatttagcatttatagtagattctgccccagcagggaaaatgccgcagttcatataaagcgcacaaaaagggcattgccaaaaaaagggaaggtgtgcattatgcagataacggacaaacagtttggcatgatggaactgtttcatgggcaaaaagaggtaccaccagagccacctagccaacaacttgagttgttttagcaatcaaattgcatagttgagcgcattcgacacccagcaaagtattaataaaaacacacttctaatacttgtgtaaaaaacaggataccagcctattacggaaagtatcctgtgaatcatccttaaaattaaagaactgaaagcaattcacaaccaaaacgggcgtcaagtatatgcgccgtttcctgtgaatcatccttaaaattaaagaactgaaagcaattcacaacaattagggttacataaaaatctaaatcctacctgtgaatcatccttaaaattaaagaactgaaagcaattcacaactgatatttactttgatgtggatgagaattgcctgtgaatcatccttaaaattaaagaactgaaagcaattcacaactcaacttatcaaggtttgggcaactattgacctgtgaatcatccttaaaattaaagaactgaaagcaattcacaactggttttgtggcccgttgggccggttaaaccctgtgaatcatccttaaaattaaagaactgaaagcaattcacaacatgggatacgtttattttatcaaacacaaacctgtgaatcatccttaaaattaaagaactgaaagcaattcacaacaattctgatgattttgcaatttcaatggcccctgtgaatcatccttaaaattaaagaactgaaagcaattcacaactacctttcttaaatcgcttggttatcttttcctgtgaatcatccttaaaattaaagaactgaaagcaattcacaacatagatttggttgatgaaatcgcccgttgccctgtgaatcatccttaaaattaaagaactgaaagcaattcacaacacttgtaatttcattgttctagtatttttacctgtgaatcatccttaaaattaaagaactgaaagcaattcacaactatttgaacaatataccggcctaaaggacacctgtgaatcatccttaaaattaaagaactgaaagcaattcacaacggcgttggtgatggggataaaggtgatattcctgtgaatcatccttaaaattaaagaactgaaagcaattcacaacaaggacaaggacgacaataccctttcaagtcctgtgaatcatccttaaaattaaagaactgaaagcaattcacaaccggacgtttcatcggtgggtggttatccatcctgtgaatcatccttaaaattaaagaactgaaagcaattcacaaccatttgactgaatatcatttttgaacttcacctgtgaatcatccttaaaattaaagaactgaaagcaattcacaactaatttaaagtttgtccagtataggtgcctcctgtgaatcatccttaaaattaaagaactgaaagcaattcacaacttgcatggcattgatgcgcacactggccttcctgtgaatcatccttaaaattaaagaactgaaagcaattcacaacataatttctatttatttgtgattttaatatcctgtgaatcatccttaaaattaaagaactgaaagcaattcacaactagttgtggagcatgacaatttcgaaactccctgtgaatcatccttaaaattaaagaactgaaagcaattcacaacattgattgtttttcccattcgtccacggtacctgtgaatcatccttaaaattaaagaactgaaagcaattcacaaccctatcaccagttggggaatggatgcatgacctgtgaatcatccttaaaattaaagaactgaaagcaattcacaactgctcggcctcttttttagcttccaatgttcctgtgaatcatccttaaaattaaagaactgaaagcaattcacaaccagtaagcggttgttgaacgatgcccgttccctgtgaatcatccttaaaattaaagaactgaaagcaattcacaaccttgtaccacgcaaggacgattcttttcgtcctgtgaatcatccttaaaattaaagaactgaaagcaattcacaactacaccagcaaccctttcctaatactatttcctttgaagtattgaattaatgcactcaaccaatttttcaaccctgtcttccgtatccaatccttcagcgttttgctgtacttttagaatgccttgctcatcaattacttcattagttataagatcatcataaattgggttttcagcaccttctgcattttgattttcaaaaaggaaatgatttctatctatattgatacttatggtgtttttcttgattttcagatagagtaaatcgttgtagtcaccaagagttagctttttactcttaatctgccgattaacttcataaaaaaacggacaccagttaaaaccattgaattgcttctgacgcatcttattgtatacataatcgtcaaatgaatagtaataacctctggaacattcgctgcggaaggatggatattgtaaaaagtaatatttccaatccttggccttttcttggtaagcttcaagctcagttctaatgtgttctttaataactgtgttaggattgtttactaagaagtccaagcacttcattagcactggtcgagtatgcgaaaaaatatctttcttctttccgaaaccaggtgtagtgaaaaattttcgaatgaccttcttatttgaggaaagaaaattgtaccagccttcttttctctcttcatttccgctatcgtgttgggtatagtcaccgaaacagagtaaaaaattagacctattagtgaagtcctcaattaggaaatcttcatcaaagtatttcaaaaactgagaggctcggttctctgtgtggtcgtcaaattgaaatatggaaatgttccctctaaaaaagtcactatcctctaaacgataaaaagtatcaacagcttcttgggtttgatagaatagttctttctctttttcctcttgtatttggtcggttttaaatctctttaatgtatcaaaatcaaaactcaataggaaggcttctaactctgtgatgctctccaccaaggtttctctacgtaattcaaattctgagtttgcaacaaggtttcttaatattcttactttcctttcaaagtcttccgtttggtgtatgttttggaataaatagctatgcagtaaaagttgctctggtaagctaaaacctctatccttttcaaagtacagcaaacaccgaactaataagttgttctccttatgagggaagaataatcttgttttatccttatggtagttggctttttcaaaataaaaggtattcttccaaaaattagggttcgtctcattgctgagtaccaaattgtctaaaatggaaaagatttcttttacgttgtcttcattgctgtaaatacttttaagctctttgggtgattctacagtatcggtgtattgtatgtcatttttaagaccaataacgtaggtgataaaattgaagaggtttaaaaagctattgtccaccaataaggcaatatcttttatgttttgagcttcttcagtttctaacagtagattccaaatgcagtcaaaccaatcctggtcaatttgcttttcaaatttttgctttagttcctcattcgtgataatctcagaaaaattggctttgaagtattcaaactcggtaagtggcttacctcttgagttcattttgatatataaatcatctgataatttgaactcacttaataccaactgatacatttcaaaagggcaattgtcgtcttttaaaacttgccaagtatcttctaaatcataatcgatatagcgaaattctatatcgtctaaaacgacaagcattgctcggatgcttgggtcaaaatcccaagtttcaaagtaccaagactggttttttatttcctctgaaatagttccacctgtgaaacgaggattaaagcctatgagctttttgcaaaatatggtggtgctgtgccttgtttcgtaaacaaagttttgaagtgattctttttggtctgtgggaatattttcttttgatgctacgaaccaataaagcaaccataataccgtaagcctttgttgtccatcgataggtgagaaaattggattttcgccttgtgttttgttcccatagataaagtctaactctaagtttttatggataacttcttctttgttttttaaaatcgtatcaaagatgacgtctaggaaatctctcctgattttactggtgtttttatctgttctgccttgtgcaaaatctcgttgaatgataggtatttcaactttatcggcaagtatgtctgtaaatttaagcttcattgagcactggtgttttgtttaaataatggtttaagcactcgctaatttcttctaagtgattctctctttctattttagaccagatagatgatcgagaataagactccttttgatagtagtttaaaaacactcttttggtagcaataggaataaatgctccttgcttatccatctctatgattttccttcgctttatttcgaaaatggaattactcaatgagatattttctgttaaccctaaaagagccaagtttttaatgttgtgcagataaaggttttcatcttcatcatcttttggaaggatttcaataatggaagcacttaaatcctgaaactgagcataggtatatttttccctatcaatggcgtttgctttctcaattatttcattagcctttttggaattcgtagttattgatagaagtacattgaggtgcatatctaaccaagagaaccattgctctctcttgttctcattaatgccgatgatattttgagcgtgaatatgctctaagctcttgttgatgttcttgtatatttcaaatgggaagaaatcgttgttattattattttttctcgtaagctccgtattcaccagtaacagaatttctatcagctttttgtggtcgttacggttatcatagcttaaatcgtcccaatcgtttggaatactctctgctattaataggtttatctctttctcaaaaaggtctttgttattctcttttttgagttgaataatgtccataatattagtgccaatggcaatgaggtaacctaccttgtggtaatagtttttatgggtgtgccagtaacttagtgaacgataaatctcttctatactcaaccacttttcccaaagggaatctgcattctccttttcatcaaagaagtgaatgaagctatacaggctgtctttgctattatcttttttttgggtatttatatcgaacaagtactctattttggaagaatagctatccatctttttattggatatgaatgcccagaattttgggttgttgaggtggttttcaatctcatcccatagctgtataagttgggtacgcctttttaccttttcttgcgcaccaaactctttaaagctttcttgatttacaaactttgccttaataagttctgcactattcagcggtattttacctctgttaagacgggtaaatagctcctcgcttttttgtgtattgccgttaatttcgtaccaaataatttgcgtactccactctggcattatggtgttgccagcttcatctttctttacacttggtagcagggtatctaaaaagttgtttttatcggaacgcccttcaatcttgccactattttcaaaccaatctttaattgtatcataagccttgcttaggtaatacaaatcgggtttggtgagattgccttctgtttgatttaaaaactgtcgtgtttcgggtcgtgtttgatattctattgtgtagatgtcctcttggtattcatcactgaatttatctattcgtaagtgttctattctcaggtaggtcaggattctatgaatggtggttaatctctgctgaccgtcaattaactcatagccatcaatggtgtctccactttctgatagccacgttttttttcttaccactatgggttgcaagcagtagaatgtattaacctttgctgggtcatgcctatactcccaaatatcattgagcaattggcttacattgtggttagtccatctgtacccacgttggtaatcgggtatataaaaatgtagccccaacaactcggtaatggtttttaatatgatttggttttcttgtttattcatacagatttatcttttctctgagcgtttgtaaaaaaagctatgtgtacggagaacactttgcttgtgcgctggccttatcttaatgaggcacaacaccacgcagatatggtgagttgcgttggcagattacaatgctgggccataccaactatacgaacgcttagttcttgtgggcaggtttaaattcagggtttattttgtattctcctctccgcactcttacgaaatatggtttcccataaacttttttctttttttatttgggtctaaagaatgtttggctaaaaaaggtttacttttacccaaacattctctaacgtctgaaacttttaaagtttcatctaattgcttgttagcatattgttcagcaatacatttgaatagttggctcatcttattaatttctttgtgttgttgttcaatttatatgcttgaattccagtgaggagattattaaatttaatggatgagtcaatgctctccagttgcgcggtaacttccttgcctagactttccagtaaattttcggacatataatttaaatccccaatttcattacttatgtcatcaagtttatctccgattaaatcgagtttttctgaaatatttttttcccaatttgagttaaaaatatctaatccatcaaacttttcgtaaatctcataaaatataatcatgtcgttttttacgagcgatgttatcatatttatggaatggaatagtacaatattgtatgtataaattttattttttaaaagtctgtcaagttctattacttcttgaatgctttttgaattgttgattgaattgaaaaccaacttaatattgtccttttttgctttcaaataatttgagatcttaatgaagtcttgaatatattccctttttatttcaataattacatcttggtttttcttcagcaaaatatcgaagtccttaaagtcatttaacaaaatctcgtcaccttctttttttgcataagagttaagggtctcactaaccttatttgttaattcaacaaatctttctttttctgctttctcttgagatattttaatatttctttcctcctccgattttctttttcgttcaagctcatactttttttgcatcttaacatcatacttcttatctgaaagaacggccagaaatagaattactccaattgttagaaacataaaaaaagcaattaagttccccataatattttctttatcaatatccgtttgaaaaagtccaattactaatgggataagagttataaaagctaaagccataaaaaatattccaatcttttttttcataaccaaattttctaggtcgttaataaaattaagcggtttgggtcaaacccgcccacaccatatttatatacggaacttgattctgcatataccaacaaataagctgactttgtccggtttaagtgttttaatgcaatgcatagttcccgctgttcaagtacttgtgcaactgtccgccgaaggaggaacggttacagttgttgagccagctttttattgggatagtgtctttaaattattttttccgataaatttaagtaaatctattccttgcaaattagattctctttcaaattgtttccagtctttagaaaaattaccatttgatgtatgtttgaaaacgtaaatattacctttaaactcactaattttattgagatttttccaaaaaacattgaataaaccaccattcttaagttcgcttttcccaataatgataataggaatttttaaattattagaataatttgcgacttcataagaagtgtataacaaaatgttgttgaagtttttttctccgatttttcttttaatctctcttagttctttggtgctttttgtacttagaaatgttttatttataacaatacattcctcgtcaaagtcatctacaaattggtgttttgtgaaatggtttcttaaaatactcccagatggacctacaaaaaatcgtcctttttggtactcttcgtaaccaggattatctccaacaattataaacttaattctagaaaagtctctttgcttattatcaaaggatatttttaagcccatttatattttataaattacgatataattcaattttaaaaactttgtttttcgtggatgtcaaagttaagttgttgaaatcctctgatagttcataattaaattcttcattgtccacttttagcgtattgtcattaattatgtattttccactatttctttttccttgcattctacttttataatcattatccttcttcaagtcaatctcaaatttttcgttttcatatgaaccttcccaatcgcctattaggtaatcttttttatttgcaagtctaaagtcaattgttttcttgccctttgaaagagttaaatttttctcacttacttttgaaattattaatgtgtccccgtcaagataaatcatatttttttcgattgtataatctaataatttatcatcgttcatattttttgcttttccatcagatgtaaacataattatctcatctccataacttgaaatttcataccaccatttgccttctatttcctttttattggaagaacaagatgtcaaaacaattaataatgttaaaaccgatgcagctttttttgtaaattttaa

SEQ ID NO: 1174 - DNA, 24443 bp, synthetic construct
  source 1..24443: mol_type = other DNA
  misc_feature 1..24443: note = Synthetic
tccaggacggctgcgactacttctgctcctactgcgccattcctttcgcccgcggccgctcgcgcagcgccaccgtggccgaaaccgtcgacatggcacgtcagattgcagccaccggcaccaaagaggtggtgctcaccggcatcaacaccggcaccttcggtcagcatcacggcgaaacattcctgcaactgctgcaggctctcgaccaattggagggcattgaacgctatcgcatctccagcatcgaaccgaacctcctcaccgacgacatcatcgcgttcgtcgcctcgtcacgtcatttcctcccccacttccacatccccctccaggccggcagcgacaaggtgctgcaaatgatgcaccgccgctacgacacctccttttacgcttcgctgctcgataaaatcaaacgtctgatgcccgacgcctgcatcgccgccgacatcatggcgggattcaacggcgaagacgacgaggaattcgagaaggtcaaagactttgtcaggtcgctgcccatctcctacctgcacgtcttcaccttcagcgacaggcccaacacggccgccctccgcatggacggtcgcatcgacatccatcgccgacgcgaacacagccggcagctgcagcaaatatcggaccagaaaaaaacagatttttacctccaacaacagggcaagacccgcccggtgctctgggaaagcagccgcaaagaggacatgatgtacggttttaccgacaactacatccgtgtgcgtcgtccctacgacgattccctctcaaacaccatcacaaaccacacgctgacacgccttttcgccgacgaagaggtgttcgaatagccacattgaaaaagtatttttcaacattacaaaacaatataaaacaactatttatacatcttttatacatttttgttatttataaaaacaaccaaatcgttcgtctgtgcaaagaaaattgtatttttgcatttttataaattaaatcatcatatttttcattattttaaaaccaacacattatgagcggactatttggcgtcgtcacgaaagacccttgcgcaaccgaccttttttacggaaccgactatcactcgcatctgggcactcgtcgtgccggtttgagcaccatcgacaatggggtcatgcacctcaacatccacaacatccagaattcctattttcgtaccaagtttagtgaagacctcgttgaaatgctcggcgacatgggcatcggcgtcatcagcgacaccgacccgcaacccatcgttgtcaactcccacttaggacgcttcgccgtttgtaccgtaagcaaaatcaacaatatcgacgaattggaacaactctgcttggaccaacgccagcagttcaccgaactcagcatgggtggcaccaaccccaccgaactcgtcgcactcctcatcacccaaggcaaagacttcgccgacggcattcgtaacgtctaccgtcacgtcaaaggtagcgtctccatgctgattctcaccgccaacggcatcatcgccgcccgcgactatctgggtcgcacccccctcgtcatcggccgccgcggaaccgactatgccgtggcttccgaaagccattcctacatcaacatcggattccaaaccatccgctacgtgggccccggcgaagccgtcatgatctcgcacaacggcttgagccaactcatcgaaccctccaagaaaatgcagatctgctccttcctgtggatctactacggctaccctgtggctcaatacgaagacatcaacgccgaagaggtccgctaccagctgggtctctccatgggcgcccaagacgacgtagaggccgacttcgtctccgccatccccgactcgggcatcggcatggccctgggctatgcagccggcaaaggcatcccctacaaacgcggcatcctcaaatacacccccacttggtcgcgcagcttcatgcccgtcaaccaggaatcacgcaacctggtggctaaaatgaaactgatccccagcactaaagtgctcaacggcaaagacgtggtcttctgcgacgactccatcgtgcgcggcacccagttgcgcgaccaggtcaagatgctctacaactccggtgtgaagcacgtccacatccgcatcagctgcccgccgctcatccacggctgcacctacctcaacttctctgcctccaaaaacgacatggaactcatcgctcgtcgctgcatcgaggaactggaaggcggcgaaatacgcaaccttgaggcctaccgcgacagcaccagcaaggaatacgctgccatggtcgagaaaatacgccaacacgtaggcgtcgacacactgaaattcaacagcctcgacaccgtatgcaacgccatcggcctccccaaaccgcaggtgtgcacccactgcttcgacggctccagctacgacatcagcagtcccgacctcaaccaactcgccatggagttgtaaccatcgcatcttccaaacgacatttcgcgccatttaatattcaaaatcaatacatccacaaaaagcacccgccatgttccgaaaaacaatcaccctgttgctgacgacactaatagcctttgctgtccaagcgcaagtggacgatcctaacatggaatcctccgcagaaacaaatatcatcgcatatcacatgcgtgatttctgccccacctacaacgtcgatgcacgcatcgtcaacaacgacgaaaacttccgtgccatcatggacagccttcaaaaggtgcagcccaacgcctatccgctcatgagccaatggtgccggcagcaacgtgccaggatgaatgccatggttcgcagcatgcgcgaagactacacttgggacggcgacgtcatcgtcatggattccgaacatcagatcgtcgatgccggcagcttcctggtgcgcatggaacaaacagccaacctgctgaatgaacgcgccgaaaactacgacaggctcgaacagaaacgcatcgaggcagaacgggctgctgccgaagaacgcgcccgcgccgaagcccgccgcatccagctggagaggagtaaccgcatcatcgaactgaaagagggcatcaaggtgctccacaactccatcacctccacctgcgacgcccacggcatctccgacaaggctcgcgtcaacgaactcaagaacatctactacgcctacctctccgtatacaacaagtacgacattgccagcgacatcaattccgacgaccgcatcaatcagctcaccgaactcaaagaattccaaaacaacctgattgacagcgtgctcggcgagaattccttccgcacacgcattgacaacttcagtaacaccctcaagctccgcgccggcaagaaccacaccgatgtcaccaagtcctacaacaaggtcttcaagcgggtctccgtccccatcaccttcaaaagcatcgccgaataccacgagtacactgcacaactgcgcgacatcattgccgtccaggaaagctacatgaaggtcatcgaactacgcgaaaccatcagccgcaacagcagcggcatccagaccaaatgcagcaagaaacaccgcgacatctacagttcctacaaagaaatcgtcggcgaactgagcatcgtcccctcctactccaccctgaacgaaagccagaaatttgtcgcctcgctgcaggaatttatccaagtgcaggaagaatacagcaacgtgatcgatcgcatcgatgtcatcgaaacgcgtagcgactccctcctggcactctgccaaaaagatctgaaagacatcggaaccgcttacaaggaactggtcgacgccaccgacttcatccccaaattcatcaacatctcaagcgcccaatactacaacaagaccctggacgaatttgaacagatccaacaccactacggcaccatcatcggtctccgcaaggtcatccacgctcaggggcaggaaatcctcaacgccaaaaacgcccccaaaggactgctgaacggatacaaacagatgctccacaacacccacttcaccccgcatttcaacaccgcacaggggggtgccgactttgtctcgctgctcagccacttcatcaagattcaaaacaagttcaaggacatcatcgcccaaaacacccacattgaatccacctccaaacagttcaagactgccttcaaggattacagcaacatcctgaaagcctacaaccgcatgatcggagaatacactatcgaagccgtgattctgagcgaaagcgacctgaacagctatcgcgcccatcaggacgccgtgatggccatgcaatccaccttcgaacggctgatcaactccatggaaaaagaggactacaaccagcgactcaagaaagtcaaagaaatcgacaaaatcaaactcatcatgggtatcaaatagcccttaaaaacaacttttctctgttaaaatttttaagtattcgtttttttgagtatctttgcaacagaaaacaatcgtctttgaaagtaaagcaaatccacaaaacaattaaaatcagaattttaattaattattaaccaattaaaaaatcatctttatgaagaaattattcttagttatcgcagctgtcttcgcaatggcagcaactgcaaacgctcaggacaacgcattgggtgttcgtctcggcggtggtcaaggttacggtgctgaactctccttccagaaaggtctgggtggcaatcgtctcgaaatcgaccttggtatgaatcttgaagacgaattcacagctttcagcctcaccggcgtttaccagtggactggtgaaatcgctaagggtttcggttggtatgctggcgttggtgcccgtctgggttactggaactatgacctcgatggtgttgacgctgaaatcgccctcggtctcgttggccaggctggtatcgaatacaaattctccgcagtgcctatccagctctctctggacatccgtccttgcttctacatcatccccgaaaccgatttccattggggtgacatcgcactcggcatccgttactgcttctaattcggcagaaacaatccataaaaaaaagcccgcacgattgtgcgggctttttttgtatcgggtagcagcatttatttctttgctgccgcctgggtggcggtaatggcaaccacattgaccacatcttcgaccgagcagccgcggctgaggtcgttgatcggtgcggccataccctgcatgacgggtccgatagcttcggcaccggccagacgctgcaccagcttgtagcagatattgccactctgcaggtcggggaacaccagcacattggccttgccggcaatgtcgctgttcggagccttggaggcacccactttgggaacgatggcggcatcggcttgcagttcgccgtccagcttcacattggggtcaagctggtgggctaccttggtggcttcaatcaccttgtcgaccagttcgtgcttggcgctgcccttggtcgagaaactgaggatggccacacgcggttcctggaaaccggcaatggctttggctgtctgagccgaaacgacagcaatctgtcccagctcttcagccgtcggacacggggtggctgcacagtcggcaaacaccatcaaaccgtcctcaccataggtcttatccttcagcaccatgatgaaagcgccgctgaccacactgactccgggcagggtcttcaccacctggaaggcgggacgaagcacatcgcccgtagcgttgcgggcaccggcaacctcgccgtcggcatcaccgttcttgatgagcagagtggccagatagagcggatcctctaccaaacgcatggcctcgtccatctgcatgcctttcttcttgcggatttcgcacagcatttcggcatagaattgttttttggcatgggtgacagggtcgatgatggtggccttgtcaatgtttttcaagccccactgggcggcaagtcccttaatctcttgttcgtttccgaggaggatgagacgggcgataccttcctgcaggatgatatcggcggccttgagggttcgctcttcggtaccttcagccaagacgatgcatttgtttgctgctttggccttggctctgatttgatccattaatgtcatataatcacggattttcggttgttcaattcgtaatagggtttattttgcgataatcacattggcggtgtagctgcgcgacgaggtgaacagacgcaccacatagttgcccgactggagggcgctgagattgatggcctgagaagtggcggtcagcacggtacggccttccagcacacaacgtccgttgaggtcgaagactttatagttggcatcgcccatggcgtcgacatcgaaatgaaccataccattggaggggttgggatagaccttcaaattgttcgaagcgtcgatttcggggctgttgatagccaccggctcgtccacatagtcaataccgtcaagggtgttgacgccggtgttggtggggtccagccaaggcttgagcgaggtggcgtcggtgttgttgcccgtccaggagttgtagactcgaccatacaaatcggtaccttccgtatagtcgcaggcgctgctaccggcatagagctgtccgatgattcgtttctcaccgttgaagaggggagatccggacgagccctgctcagtcacaccacggttttcggttccagtcaaccatccgcagaggaagaatttggcgttggaaccggtacctctctgaacggcacgggggaaggaaatcttcttgtagtcaccaccggggtgatggatgcaggcacccaacgagggatagccggtcgacgaacggtcccaaccggcatagtagggagtgtagctgtcaggaatgctgctggagagctgcagcaggcagaagtccgaaccgccattgtaagactgcttggccttgatagtggctccggtgatggacttggagatggaaccgccggcattgttgttgcaggtacggctctggtagaggaaataggtcgtaatggtacggaggccgtcgatgtcctggcaatggaatgccgtgaggacataaggcgtacggtcctgattggtgttattgataacggcaccgctgcacatgtaggagcccatgttggtggagagctccaatgccacgaccgaacggatctggtcgcgccagtcgtcaccgtcactgcacaccacgttgatgtggcagtcaccctcggcatagcccagctggcctttcatcgattcctcctgagcttcatacatatcggaaatgctgcggaaaatatttttgtagccgtggcagatacggtcgatatgcatgcggccggggttctgaccggcagggacattgtattcgacaaaaatttcgtcgccaggaatggattgcgtatagaaatcgccctcttccttcacatcggatgccacaaaagagccaagcaccacatcgccactcttgtcgtagaagaagagttcggcaccctcggccatctggaattcagagaagtggacagaaacgaacgaagcgttgggcgaattgagcgcaagaaggtagtgggtgccttgggcatccttcaccaccgaggccatatccagaagatcgacgtcaacgtgttgcatgatgccgacgcgcatcgggcctgcacccttgacggcgttcagatcctcctgctcgtagcgcgcattgtcgagcgtgggagcgtagaatgttttagtttcgactttggtgttgccttgattgaacaaaggggaacctccatggctaatctgagccgaagcatgattgccaaacaatgctgccaaagcaacaaatgtcataaggaagatttttttcatttctctctaaaaatttgattgttctttatttatatattttatttgcttctttaagaattaacaaaagtacaaagtttttacgactatgcaaaaaaattcgtacctttgtgccattattttaaccacgaaacacattataaagcatggcaaatcaagaagatatattcaaaaaagtcgtctcgcacgccaaggagtacggcttcattttcccttccagcgaaatttatgacggtctcggtgccgtctatgactatggccaactgggtaccgaactgaaaaacaacatcaaacaatattggtggaaatccatggtgcagtaccatgagaacatcgtgggcatcgactccgccatcttcatgcaccccaagatttggaaagcctccggccatgtcgacgctttcaacgaccccctcatcgacaacaaggacagtaagaaacgctaccgcgccgacgtgctgatcgaagaccacatcgccaaaatcgaggacaagatcaagaaagagtgcgagaaagcgcacaaacgcttcggcgacgctttcgaccgcgaacagtttgtcagcaccaacgcacgcgtgctggaacaccagaaacaaattgacgaaatccgcgccaagtacgccgaactgatgaacgccaacgacctggcaggtctcaagcagctcatcctcgatctcggcattgtctgccccatcagcggcacccgcaactggaccgacgtgcgccagttcaacctcatgttcgccaccaagatgggcagcgtcatcgacgacagcgacaccctctacctgcgtcccgaaacagcacagggcatctttgtcaacttcctcaacgtgcagaagagcggccgcatgaagatccccttcggcatcgcccaaatcggcaaagccttccgcaacgaaatcgtcgcccgccagttcatcttccgcatgcgcgaattcgaacagatggagatgcagttcttcgtccgcccgggcagcgaactggaatggttcaaatactggaaagagaagcgcctgaaatggcacctcgcccttggcatccctgccgagaaataccgctaccacgaccacgagaaattggcccactatgccaacgccgccaccgacatcgaattcgaattccccttcggcttcaaggaactggaaggcatccacagccgcaccgacttcgacctgagccgccacagcgaattcagcggcaagaagttgcaatactttgacagcgaactgaacgagagctacacaccctatgtcatcgagacctccatcggtgtggaccgcaccttcctggccatcttcagccacggcctcaaagacgagaccctcgaagacggtagcgtgcgcaccgtgctgagcctgccccccgtgctggctccttacaaagccgccattctgccactggtgaagaaagacggtctgcccgagaaagcccgcgaaatcatggacatgctcaaatacgacttcatggtccagtacgacgagaaggacgccatcggccgccgctaccgccgtcaggatgccatcggcaccccctactgcatcaccgtcgacaacgacaccctctccgataacagcgtcacggtacgtcaccgcgacaccatgcaacaggaacgcatctccgtggaaaacctcaaccagtatctccacgagcatatcaaacccatcaaagtagactaaacattgtcaacacgataaggtcaagaaacacggtcgttcatcaccttttttgacctcccgacaatagtttcaccctttacattgcgaaaacgaatcagcggcaggggcttgcaattgcaagcccctgccgccattttcaaggaataacagggctcaattcatttgatatgtaccaaaatacaaaagaaatttgattgatcgagacagcaaccacttaaaaatagcatgcatatagtgaagtgtttcattcaaaaacaattaattcattgtttcatcttccatacaccactgcagcaaaacgagaaatcatatactacaaataacaagatgcgacacaaaaaaaaggcgacgaagtaattagcttcgcccccttagtagttttcacaacggaataatccttattgtgaattgcttgaaaaagtgatgcaaaaatacaacttttattttatgtgacaaaattattttttaaataatcagaaaatgtgtatctttgcactctaaaaatactatcatataatggcaaaaatattaggacttgacctcggaaccaacagcattggttgggctgtggttgacaacgagaaaaaaaagattgaagcagcggggtctcgcattatcccaatggatgctggattaatgggcgactttgaaaaagggaacaccatttcgttcactgccgatcgaaccaaaagtcgcggggcacgccgtttgcatgaacgttttctcttaagacgagagcgactgttacgagcattaaatattatggggttcctgcctgaacactttgccgcacaacttgatagatatggaaaaatgccaatagggagggagcccaaactagcatggcgtgaaggcaaagacggcaagccggaattccttttcaaagacgcgtttgctgaaatggtcgacaacttcagaaaggtcggcataacgcaaaatattccctacgactggaccatctactatcttcgggcaaaggcgttgactaaacctttgtcgaaagaagagttggcttgggtgcttatgcagttcaaccagaagcgcggatacaatcaactgcgcggaaaaacggacgaagacgcaccagaagcccccaactctatggaataccacgagctaagagtcgtcaagattgaagacactggtgagaaggacaagaaaggaggctcatggtataatatcaagctggagaacggatgggtgtaccgccgtgccctccgcatcgctccagactgggaagggaagatacgtcccttcatcgccaccttcaaactagacaaagacggcaaccggaacgaggaacagccctcgctacgttcgcccgaagagaaagactgggggctacgcaaaatccgcacccaacacaacatcgaccagtcgggccttaccgtcggagaacatatctacaacatcctgcttaccaacccctcgcagaagataatcggcgagacggtccgcaccatcgatcgctgctactatcaagacgaactacatcgcattcttgataaacaacacgaattcatctccgaactgaatgaccgtgaactgtaccatcaatgcatcgatgcgctctatcccaacaacgacacctaccgcaacagcattgccaaacgcgacttcacctacctgctagccgacgatatcctattctaccaacgtccgctgaaaagcaaactatcactaatcgacgactgcccttacgagcagcgtaacgggaagcccatcaagtgcatcgccaagtcacatccgctgtatcaggaattcagactgtggcaatttctcgccaacctgcgcatctatcacgacgatacagacattacaccctcactgctgcccactggtgaagccttcgccaacttatatgactatctggcagcgataaaagagattgacgaagctggcctattgcgttacttcaaaattgggaagaaagaccagccgaattatcgctggaactacgtgcgagaaaagaagtatcccatgggagaaacccgtgccgtacttttaggaggattacggaaggcaggtgtcaacgaaacattccttaccttcgaaaaagaagagagtctttggcacctgctttactctgtcgacgacccaaaacagtacgagaaagcccttcatacttttgggcataaacagggctgggataacatacagattgcatctttcactaatgctttccgcaagctaacggtatacaaagcaaaagattacggctcctattccgccaaagcaatcagccgattactaccattgatgcgacgcggaaaatattggaaagttgatgcgattgacgcatccacacgtgaacgtattgaacatcttattacgggagaagtcgacgagaatctctcttccattttaagagagcgattcaatgggctcaatgatataagccaatgtcagggactcaacacctggcaggcttgctacctcgtctacggacggcactctgagtccgccgacacaaagatttggaccaagccggatgacattgacctttacctacaggaattccatcacaacacactcaacaatcccatagtggagcaggtggttaccgaaagcctgcgcgtggtgcgcgatatttggcggcagtatggacatcccgacgagatacacatagagctgggtcgcgaactgaagaagacccgcgaagaacgcgaacgcatgtcgcaatctatcgccgatggcgaagccacaaaccaacgcatccgcctgcttctctccgagttaatgaatcctgattgccaagtggagaatgtccgcccacagtcaccctctcagcacgagctgctaaaaatatacgaagaaggagtgatgcagagcaacatcgaaatccccgacgacatccgcgacatacagaagcgtttcaccgctgccaagaaccagccctcccacagtgaggtgctccgatacaagttatggcttgaccaaaaatatcgatccccctacaccggccataccatcccgctggccaaactatttacccccgcctaccaaattgagcatgtcatcccccagagccgatggttcgacgactcgctgtcaaacaaagtcatatgcgaagctgaggtcaaccaactgaaagggcgagaacttggacatgaattcattgtcaaccaccatggggagaaggttcccttgaatatgggaggtgcggtagatattctttccgttgaggcctacgaaaaactcgtaaaagagctcttcgccaacaaccgccgcaaacgcgagaagttgatgctcgacgacatacccgaagatttcacctcacgccagatgaacgacagccgctacatcagccgcatgatgatgcacctgctgtccaacatcgtacgcaccgagaacgaagatggcaatcgcgaagagactgtgacctcaaaaaatgtcatcccctgcaacggtgccgtcaccgaccgtttgaaacacgactggggcgtaggcgatgtctggaaccgaatcatcctgcctcgctttgagcgtttgaatgccatcaccggaaccaacctttataccaccacaactattgaaggacacaccattccgcaggtaccactcgacatgcgccaaggtttcaacaaaaaacgcatcgaccaccgccaccacgccatggatgccatcgtcattgcctgctgcacacgcgaccatgtcaaccttctcaacaacgaggccaccaagtccaacaagcaacgctacgacctacagcacaaacttcgcgtcttgagttactacatcgacgagaaaggccaaaagcatgaacgtttcagcgagtttatcaaaccttggaccaccttcaacgaagacctgtacaactgcctacaaggcatcattgtcagcttcaaacagaacttgcgcgtcatcaacaagaccacaaaccgctactccgtgcttcgcgacggaaagcacaccattgagatacaaagttcaggcgatagctgggccgtccgcaaacccctccacaaagaaaccgtctatggagaggtgaacctgcaaatgaaaaagatagtttcaatcaaaaaagccctgaaagacatcaacagcattgtcaaccgcgagctaaaagataagataaagaagatgaaggccatgggcgacaccgacaaacaggtggtcgaatacctcgacaaaaacaaagacgtatggagtgaggccgccgacggcaaagtggaagtttactattatacaaaggacaccaacgaccgctacttcgccacccgcaaagacctactctcacacatgtccaagtgcaccaccatggccgatgctgagaaaaccattgacagcatcaccgacagcggcatccgatccatcctccgggcccatcttgccgccgagaacaacaatccagcagaagccttctcagccgacggactggaacgcatgaaccacaacatcaagtctctcaacggtgaccacaaccacatgcccatcaaaaagattcgcgtctatgagaaatctgcaaaaaaacgccaaataagcaacttcggacagaaatccacaaaatacgttgaggctgctgacggcacaaatctattttttgtgatttatctcgacacgaccagaaaacgcaactacaaaacacttcccctcgttgatgttataaatctacagaaacgatatgataatctctggaaagaacacatcgctgaaattttaccacagggatcgtctatgctatatattctctccccaggcgacttagtgtatgtgcccgaggatggtgtacagccaacggttgccacccttaaccacaatagaatctacaaggtggtttcttgtgatgacatatacatcagttgtgtcccattcagttctgcccaacctgtattaaataaggtagaatatgaatcgcccaacaaaatgaagaccaccatagacaagaaatacatgatacgtgaggtctgcatccccatccaggtcgaccgtcttgggaacatcaccaaaataggataacaccatgatcaaacgtactctctgtttctcgcatccggcctatctctcgctacgcaacgggcaactagtggtgcgtctggaaaaacacgacgacaaacctgaaaaacaggccactattcccatcgaggacatcggcatcgtggtacttgaccaccggcagatcaccctcacccacggcgttgtggcggcgttgctggacaacaatgcatccatcatcacctgcgacaactcacacatgcccgtaggcctcatgctgcctctcgagggacataccatacaacaggaacgcttccaggaccagctcaactcttccctgcccttgcgcaaacaattgtggcaacagacagtacaacagaaaatccgcaatcagggcgctctgctgcacgaactgcatggcatcgaggtgggcaatatgtcgacttgggccaatgacgtgcgcagcggcgacaacaccaacctagagggacgcgcggcagccttctactggagtcacatgttcccctcaatccacgatttcacccgtagccgcgacggcgcataccccaacgctctgctcaactacggctacgccatcctccgcgccgtcatcgcccgagccctcgtgggcagcggactcctccccacccttggcatccaccaccacaaccgctacaacgcctattgcctagccgacgatataatggagccctaccgcccttatgtcgaccgcctcgtaatggagacaatggctgtatgcagcgacgttgaggttacaacagccatcaaaagccatctgctcactattcccacactcgaagtacatatcagcggacaacgcagcccattgatggtggctgccagccagacaacagcctcattggctcgttgcttctctggtgaaaaccgccggattatttaccccgagatgtaagatggaccgtttcagcgaataccgcatcatgtggattcttgtgttcttcgacctacctaccgaaacaaaaaaagaacgcaaagccgcctccgatttccgcaaaagccttctaggagatggttttaccatgttccaattttccatatatgttcgtcattgcgccagtcgtgaaaatgcagacgtccacctgaaacgagtaaaagcctctttacccgagtacggtcaagtaggttgtttgacaataaccgacaagcaattttcccaaatcgagctttttatctgtaaaaaagaaatgcaaccaaatgcgcctgggcaacaattagaacttttctgacacaggattgaaaaaatgactctctcaaacaaaaaatcccgccttaacaggcgggatttttttagcccctgacacatattaaaccattgtacatcgcgaagttacacaaatcgtgatgtcaaagagctaatatcactatttacttttcaagcaattcacaacagtggttaaaaaaaaagttcgttttttggtgatgtcaaagagctaatatcactatttacttttcaagcaattcacaactgttattatgggtagccgtctgttggcactgatgtcaaagagctaatatcactatttacttttcaagcaattcacaacacaaagcctcaacgcaatggacggagacgtgatgtcaaagagctaatatcactatttacttttcaagcaattcacaacctctcggtgaagatggctttgttggcgttcgatgtcaaagagctaatatcactatttacttttcaagcaattcacaaccatcgaaacaagttcagacgccaaaaaaaagatgtcaaagagctaatatcactatttacttttcaagcaattcacaacattgttgaaagtttaaaagtttataattagatgtcaaagagctaatatcactatttacttttcaagcaattcacaacagcacgtcgtcggcgttgcggcccatgcggatgtcaaagagctaatatcactatttacttttcaagcaattcacaacttcgttttttctccgcccgcaaaaacgaaaagatgtcaaagagctaatatcactatttacttttcaagcaattcacaacacgtggtgagtggcggcggtatagattgttgatgtcaaagagctaatatcactatttacttttcaagcaattcacaactgtttttttcgctcttttttgtctgttttttgatgtcaaagagctaatatcactatttacttttcaagcaattcacaactgattgtaagttttaaagtttataatataagatgtcaaagagctaatatcactatttacttttcaagcaattcacaacaacgtattgtgtgcttattgtgtcaatactgatgtcaaagagctaatatcactatttacttttcaagcaattcacaacacaaggaacaaatcttcatcgatcacctttgatgtcaaagagctaatatcactatttacttttcaagcaattcacaacatacccttacgacaactgcgagcctcccgcgatgtcaaagagctaatatcactatttacttttcaagcaattcacaactcacatctgtcattgaaatttccaatctccgatgtcaaagagctaatatcactatttacttttcaagcaattcacaacttcaagacgctcgctcatttcagaaataggatgtcaaagagctaatatcactatttacttttcaagcaattcacaactgtttttttcgcaacatttcgcctttttctgatgtcaaagagctaatatcactatttacttttcaagcaattcacaacacgatagatgtcgttactgaagattacgtgatgtcaaagagctaatatcactatttacttttcaagcaattcacaactgagttgaatacaatcttgctttggtcctgatgtcaaagagctaatatcactatttacttttcaagcaattcacaacaaactgaccgaagtaacgcttgcggctggtgatgtcaaagagctaatatcactatttacttttcaagcaattcacaactgtttttagatgctgttttttttttttttgatgtcaaagagctaatatcactatttacttttcaagcaattcacaaccgtcgctatttgctggcaatgtcgctgctagatgtcaaagagccaatatcactatttactattatacgttcaaaatgggacggtctttgcattgccgaatggctttcaatcatgcaataagaaaaaaagtcctcctcctcaattgcatgccaacattttacaacaccgtccattgcaatctgaatgatgcaaaaatacgaaagatattccattcattcctcatttatcaaaaataataatgtttttttcgctgtggatgcaataatctccatcaataatccgttatttaacaattaaaaacaaaaaaaaactttatgaagaaaactttatattctattttatttgcctttctactggtgccggcattggttcaggcccaacagccgctacatgtcgaaacccactacctgagcaacggactgaaagtgatccttgccgaggatcactccgaacccaaaattttcggttccgtgattgtacatgccggatctaaaaacgaagacaccgcatataccggcgtagcgcattactttgagcacatgatgttcaagggcaccgaccgtatcggtaccaccgactgggccaaagagagcctttatctcgactcaatcagcaaggtctacgaccttctgcacgatgcgaaaagcgaggaagaacgacacaaaatacagttggagatcaaccgcctcaatatcgaagcgaacaaatacgctattgccaacgagacagatgccattctgcaaaaaatgggatgtacaggtctcaacgcaggcacttcatgcgattacaccatctactacaactacctcccctccaaccagctggaaaattggatggatgtttacaccgaacgattccgtaaccccgtataccgccttttccaaggcgaactggaagccgtctacgaggaaaagaacatcggcgagaacaacgcaatgaacaaattcatccgcaccatgtacacggaagcattcggcgaacacccctacagtcgcgacgtcatcggctatggccgccacctgaaaaacccacagcccagccaaatgaaggtgttctacgacaaatactatgtcgcctccaacatgacactgctcctcgtaggtgacttcaacaccgcacaagcgctccagatggcagaagaacgtttcagcatctggcctcgcggagaaaaggcggaacagaagcagtataatctgccccgctatgaaaagcaagtcgtcaaaaaaatcaaacagacgccccttcccatgggcatcatcttgttccccggtgtcaaatcgaaccacccggacaaaatagcccttgatgtcaccagcaagcttatctctgggggcaacggacttctcgacgaactcaccaccaacaccgagatcatgggagcttaccatattcctgtttcattacgggatgctggtgtcaacgcgctcttatacatcccaatccctattgtccagagacacaaatccgccgagaaaaaaatctttgccgcacttgactctattcgcgaaggccgtttctccgacgcccttctcgaaagcatcaaggtgcaagctctgcgcgaacgcaaagaaaaaatggaaaatctgaggagtatcgccatgctccttcagacactggagcttgaaggcagcacctacgaagagtggctgcaggacaacgagcgcatccaaaacatcacccgtcaagacataatggacattgcatcccgctacttcgaccgcaaacactgcaccattattcgttccaagatgggatcaccgaaaaaagaatcagccgtcaaaccggactgggatcaccttgaggcccaaaatatcggtgcagtaagccccttcgcacaaacaatttacgaccgccctgtcaaagaaatcacgcctcaagtcattgacttcaataaagatgtcaccattctcgacgtcactcccaactgcaagttatatgctgtcaataatccccgcaacgacatcttctccttgaatatcaactaccactacagcgtatttgacaatcgtgatctcaaacaggcactcaactactttgatctcatcggtgccgacagcttgacacgcgaagagttcaacatcgaggtggaacgtctgggcggcaacctcgaattctctaccacaggggactactcccaactttccatttccggttttgaagacaatctcgaagccatcgtggcgctagtcgtccgcaaactcaacagccctcgaatcaagcaagcccccgtcgacatgatggtccaagcaatgaaagcggaaaagaaaggcaccaaagacgatcccgacgcatggcaggacgccctacttgaatatgcaatctttggggacaaatccagcaatctcaaccacatgaccatcgaagagctcaaacaaatgaagggcgaagacctcttcgccatgctcaatccaatattcaaccgtgacggttatgttacttatgtcggcaaccgaaatcccaaagagattgcccagatgcttgtcgacaacaaacttgtccgcaaggaggtaacccccatgacccaacaccggaagaagaatcaaaaaagatacaatgaagacaaagttttctacgtctccaatgacaaatttgtcaagagcgacatatacgttcttgtcgaatgtcccgaattcgaccttaacgacgtataccgaagtgtggcatacgacgaatatatgggaggcggaatgaacagtgtgtttttccaggaaatccgcgagttccggtctcttggatacagtacctataccgtcttttcctacgataaactgaatcgcaacaatcctacattgatggcctttctgggcacgcagtgtgacaagaccatcgaaggaatcgacgtcataatggagcttctgggcaaattccccgaacgcgaggccaagttcaaccaagttcgcgactacctcgtctctatgcgcaacggcaactacatcaatttccgtaaaatccccggaaatgtccgttcttggatggaatttgagaaacttaccgaagacccccgcgcaaaaatcacccaccagattaaagagatgacctacgaccagcttcgcgacttccataagcaatacatcgaaggacgtccacacatcatcattgtcagcggcaactcagcaaaatacgatctgaatgcactttccaaacatggaaaagtgacagaggtgaaatatgaagaaatgttcaagttctaacgatattgacatccaacaaaaaaaactgccacaattcatggcagtttttttttatccatcgcgatgacgccggactcgtcccacatcatcattttcaagaatagaccatcgaaaaaatatcctgcaggatagcgttatccgactgtggagcataatgtatggaagctcctgcaagaagacgacgtgcctcgtcgagggctgtgaggtcgagggcatcggaggctatttggacatcagtgatgacacctcgggattcatcgaccgtgagagccacctctaccccgccccagtcaaactgagcgctacgctgagccgtgaaattacgccaacggccatagagccactcgtcactgctgtatttatcgtagagttttctgacgtcgtcggtcttcatcatttcatcgaagccgacctgtaccggttgctgaccataaaccgagccgaaggcctcaatcagcggctcgacaatgttgaggctggtcacttcggccagttcggacaggttcaccacacggctgcgaaccgacgccacaccatgcttctgcagcttggccggcttgacacgcaggtagcgctccaaatcgtgcatattgcccgcaatcaggattgttccgtggtgaagacgcatgtaacggcctttggaaaaggcattgccgctgaatttgcgcccctggcacagcaagtcgttgcgaccgcttacctccgactgcaacccatagtgctgcaacgcccgcccgatgacgtcgaaatgacgttcctggctgtacaaatcgggcggcgtaacgaaactgaaattgatgttgccgtcatcgtggtagacagcgccgccacccgtagtgcgtcgcatcacatagcccccatcggcaagcaatgcttcgacattgcattccgagaacgggttctggttctgtccgataaccaccgtgcgacggttcttccacagatacatcgtcaccacatcagcatccctccgcgacaggaggtaattctctacagcaacattccagtacgggttggtctggttgctgacaacatattggagcctcatataaaatgactagatttttaacgacaaggagatgtaattgggggcctgacccagatggtagttgcgacgcgcaaaggagaactcgaagcgcttgacccgcaggccgaatccgtaggaaaaaccgctgacgttgatattcgtgcggtcgtcggcgtccatttcggcagcctgacggtagcggtagcccaaacggacaaagaaatgttctttgatgtccacctcaacgcccaatgccgcatgacgagccaactggtcgagggcattgcccaacccgtcgtaccacggcttgctgatgggctcaccggtataggggtcgacagtcctttcgggctgcaacgggtcgtcgtaattcagacgccaccgcgtcagctggtccatctggaagaacagccggaagggggcgttgctcaccttgtaggaaagcgctgcagagatgtcgaagggcagatgctccaccgttccgtcgaaggtggccagctgggcaccgatattgcgtgcctgaatggtggcgacaaaacgcttgttgtcagagacaaagctaccggcaacattgaggccaagcgcccaagctgtatagctctcgtactgcgaacaaaccggccggatggcggcgccgaccgagaaattggagtcgacatgcatggtccatgccaccgcaagcgcgatgtcggaggcgctgaaagagccctgcggggtctcgttctcatcgtaggcgtcaaactggccgtaaccattgtactgcaaccccaccagaacggtgccgaagcgtttgaagttgcgagcataggcaaccgaagcgaacttgctttcggaaaagagccccacataattcaatgccatccggttatggtactgcggctgcaacagcgaggggttgtcgagcgccacctggatgtcgttggcgtcgtagagcggcagataggtgatgcccaacgcagcagtgcgcgccgacgatgacatctgcagcaccggcagggtgttcattcccgccacctgagccttcaggaagccggacaggccgcagcaaagcagcaacaacaaacagcccaacgagcgcatcgatgttttcatgggtcagtcgttccaaacctccttgccgtcgttcgacagatatccgctgcgcattttcttaccctcacgcatacggataatatatttcccattgagaatcagcacctcgtcatatttgaattccgtcacaaaggtgccgcggatatcgataaacgcccatttgcccttgcgacgcaaggcggcataatagaccgaatagttgtttttggcgtaatcgatttcgcaaacagcggcatcgtagatgcattcggtcagcggctgaccgctcacacctacgaagccccatttgccattggccgatacagggtacatgccgccgttggtctcataaagcacggcgtcgtacattggccggaccgtccaatagttgttttggtcgacgtacccccacttgccagtctcggcacgacagggatagtacatcgggaaaagctcctgcgccagagttgccgacagcgcgctgcaggcaaaggcgacaaaaaacagcgacttgcgaaacgacataggacggttgatattaactgaattaatgttttttgttacgttcgtgacgcatcagatgactgggttcgagcgccatgcggtcggtttcgagcagcgaagcgacaccctcatcgacacgacgtttctgttcgcaggcctcgcaatggcactcttcgtggtattcgcgcggttcggtgtaggtggtgatgacaccttcgaagttgcgcaggataaccttgtcagggctctgcgagatgacgtactgcggcatgacgggggtctttccaccaccgccgggagcgtcgaccacaaaggtgggaacagcatagccgctggtgtgtccgcgcaggttctcgatgatttcgatgcccttgctgacgggagtacggaaatgttccagacccatggagaggtcgcactggtagatatagtaaggacgcacacggttgcgcaccagttcgtgcatcagcttcttcatcacgtggacgcagtcgttcacgccgcgcagcagcacagtctggttgcccaaaggaataccggcgttggccagacgggccagagcctgctcggcctcgggggtgaattcgttggggtggttgaagtgggtgttgagccagatgggatgatatttcttcagcatctcgcacaattcgggggtgatgcgctgcgggcagacgacaggggtacggctaccgatgcggacgatctcgacgtgcggaatcttgcgcagacggccgataatgtattccagcttctggtcgctcaccatcagagcgtcgccgccgctgaggagcacgtcgcgcacctgcggggtcttctcgatatattccagacatttttcgatgcgctggctggggctctcatcgtccttctgaccggcaaaacggcgacgggtgcagtggcggcagtacatggagcacatgtcggtgatgaggaacagcacgcggtccggataacgatgggtcaggccgggagcgggggaatcctcgtcctcgtgcagcgggtcgttgaggtcagccggagcaatgttgcactcggcgccttgaggaatagcctgacgacggataggatcgaagggatcgttggggtcgataagactcaagtagtagggagtgatggccatacggaatttggcgagggccttcttgataccttcagcttcttcgg

SEQ ID NO: 1175 - DNA, 24443 bp, synthetic construct
  misc_feature 1..24443: note = Synthetic
  source 1..24443: mol_type = other DNA
ccagttctgtatttatgtaaatggagttggaaccaatatgaaggattggtacatcgacgatatagaattatccaacccttatccggttgatgcagccatggcttccattgaccttcctcagatttttgttggaagtaaggcagttaaaggaaagtttataaatattggacaagctttggttacctctgccgatgtaagctggcaagtagctgatggagacgttcatactgactcgtttgacaatcttgcccttgaattgggcgatgattttgaattcgaattaaccgattcgctcagtcttccccctgctgattataccattaatgtatggctgagtgcggttaatggacttgaagctgatgacaatccggcaaacgataccctgtcaatggatatatccattccaacacatctgattaactatcgcccattctttgaagaatttacaagtagtacctgtggcccatgtgcgtcttttaacaatagctttttcaacaatttcattgctacccatgaagatgaaattacgctgattaaatatcagatgaactggccaggcagcggtgatccttattacactgccgaaggtggtgtgcgtcgcaattattatggcgttaattctgtgcctgacctgtatgtagacggaaaaaagacagccaccagctccggcgcagtaaataatgcactaaatgctacactgggaaccctggcttatgtggatattgtttctacccacgaaattcagggaaataatgtgattgtggatgccaacatcgttccttacgataattatcccaatgttagggtacatatggctgttattgaaaaagtaaccacacagaacgtgggcagcaacggtgagacctcatttcaccacgtaatgatgaaaatgttgcccaacgccaatggtaccggcgcaagtctggttaaagatgtcccacttaacctgaagtttacccaggatatgtcagttactttcgtagaagaaatggacgatcttatggtagctattttcattcagggcaccgacaaaaccattaagcaaagtggttattctcttgaaattggtgcttcggccatggtgaatattgaaaatggcgccatcgatgtacctgtagatcaatctatcattattgatttttcgcagcctgtgcgtatgcagggcggagccccgataacctcagccaatatctcagaaataatccagtttagagaagacaatgccatgggcaatgctgtgccttttacagctacgataaattcagccaaaacccagatagtagttacccctgcagataatctggactatttgcaggattattacttcaggatggataagttggaaaattatgcttcggtgcctacactgcctgttgtccgcacatttactaccgtgcttaatgttagtgtacccattcaaagcattatcgattacaaagtttatcctaacccatcaagcagcatgatctacatcaataatgtaaaaaatctggataaggttgaactcattagtgtggtaggtaatgtggtacggtcagtttctgatttcggcacatcggtaggagaagccggcatatcggtaagtaacctccccggtggaatgtatttcatcagacttacttccggaaatcaggtgacaacccagcgggtaattgtaacgaaataatttttttatccgggatgctttattgccggctcttgtaaaagggccggtttttttttacccttcaggcaataattttcctgatggtgtcttttttgccgaaaaaccacagtgcggccatcaaacagatgcttccggtgatggtcagtgtggcaggtgccccaatccattctgccaatgctccggtgagcagacttcccaggggcgttatgccaagaaacgacatactgtaaagtgccatcactcttcctcgcatattatcatctaccacggtttgaatgatggtattgctcgatgcaaactgaaccaccataccaaatccggtaacggttagtatcatgagtgaaaaaaacagtgatgaagaaagtgaaaaactaatcagaccgatgctgaacatacatgctgaaataaaaatgatgttgggtatactttttatggttcggcgggaagccaggaaaaaggctccggtaagtgcccctgcaccaatgcttcccgtcagataacccagggtctgggcattacccaaaaatacttcctgggcaaaaacaggcataaatacctgaaaaggtaacccgattaaactggtaagtgaaaccataattaataaaatgcggatgtgttttgtgcggtgtgcgtaccgtaaacctgaatacaggtcgctgaatatggtcgtctgggaaacacgtgcaataaacggagcaagcttcatggcaaataaggataaaataactgcaatataactcaagccgttaaccagaaagcaaaaaccttcgccaccccaggcaatcagcaggccgccaacaggtggaccaataaaccttgctgaattgaataaggtggagtttaaagcaatggcattgggcaaatcctccctattggggatcatgtccaccagaaaggcatggcgaaaaggggtatcgaaagctaccgacatgccatttaacacggcagatagtacgatatgccatacctctattcgtcccgaaagtatcaaccatgccatacccaatgcgatgaacattgacatggactgtgtgatgatcagtattcttcttttagcaagccggtcggcaaatacacctgcaattggagtcaataaaagagagggaatctgacctgcaaaaccgactactcccagcataagctctgaatcggtaagccggtaaaccagccagcccaatgctatattttgaatccagacacccggaagagaaataaattgtccgaaaaagaagtacctaaaattacggtaacgcagcgaacgaaatgccagcgcaggtgcctttaggtaacttcgtatgtcgagaaaacgattcaaattgctgctatgattatgctaaaggcgcgactttcagtttcaccatgactccccaaaatcacagataacctgatctttttagctctttattacttttataaatggttcaggtcagtaagtgttcgattttttcaataattttatctgtatacgcatctcaggtatatgcttttaccgattcatgtgcctgattgcaaagtgcttcataattcctgtgattaaggatgtctttgatggattgagcaattagctgcggtgtattgtcttcgcaatatactccgaaatcaatggtcgctccaaaagtggttttgaattcttcatagggcggaaccactaccggagtgtagtaatacatagcttcaatagaagcagaaaaagcagcccattttggagtggtgttgataaagattctcgcttctttcaataagtcataatacctttccttttcctcttcgagggccttatccagatatccgtaacagaaaacatgagcgggttgatgtttaatatctgattcatcaattccaataagatgtaagctcagttcagaataagcaggcttaagcaactcaaatgccttgatcagggcttctgctccttcaatgtatttttttgaacctacaaaaagaagtttgcccgagttccttttaagatgaaatatttcctcttttcctggttcaaaaagagcgttgatgacattcccaaggtaatgaaccttttccgaaccataacgcgccttcatgtattcagctactctgggaaaaagtgaaataacacaatcagttccctgtatctgtttgtcttctcttttgatggattgcttctcgaaaaagtcgggctttctgtttttaaagtatttaaagtaataatcataggtccagtcacacaattgaatggatggtttttgtgacaaacctgctgtagaaaagctaaaggttaagaatgcaaaagcgtcggagtcagggaattggcggatggctttcttaatttgatgccgtactatggcaaagtgcaggcctgatcggaaatagtcgtaagtggtattttttaatagcttcctcagcaaaaaagtaaagctgaaatcgaatgcagcccgcatcaatctgtttggttttaagctgacgcgattaacttttatacccttgtgtgtaagagaggtagtgaaaaaatatggaatgtttgaccaggtcttaatctgacttgaatctccactggcaaaaacagtaatttccttcatattctttgttggtttaacagaccttccaggttttttagtaaaaaaataaagggccgatttataaaccctgattaatgcactctctgattcattaaaaaatatgtccagcaggctgctttaaagcagggagtggaatttctgcgcgatgcttccaccttcggtgcgaccataaccagaaggcgggataggccagaatgctgtcttcaagaagattcacatatttctgcattaactcctgctcagtttcttttgcggcatcttccgaaattaaatgataggtagcactataatgaccccgcctaatgcgggaaatttcaatataaagcagggctgattttgtagatcgggctatttttatccctcctgtaaaaaagtagctgggctggtttaagaagttatagatgtgatttgaatccagatggtgtggcgactgatcggacaaaaaaacataagttgccggaaaatcctttttagaaagaatataacgggcagcctgattcatagcaagtaattttaccccatgctgcaaccgcaccctattggttactgtatcaatcaatttgttggataatggtttatacaatatatagcaagggaaatcaagggaatagggtaaaaacttcatgtattcccagttgccggtatgtccggataatataatggtgtttttaccggcatgctgaagtgctgataccagttcaggattggtaaccagaaatcttctttttacatcatccttttttatggaaaccgatttgataatttctgcaaaaacatcgaagaagtgtgtgtaaaaatctttttttaacctgttaatcccggaatagttggcttttgggaacgcccgtgacatattctgtataattacgtcccggcgataaccaatgagatgctgtcccaaccatctggtgactgctgccatcccatagagtacttgtaaaggtaaaatgctcagtagccgcagaaatgtaaaaataatctccgaccccaaccgttgatgccatttcatgctgttttttttacaaatttaatacatttacccggtctgaaccgaaaaaagcagttaaaatgaaggttgaaaaaactgcctgataatcataaaaatcagattatcaggcagttgctatgtgatccggaggcgactcgaacgcctgacccgcagcttagaaggctgctgctctatccaactgagctaccggaccgctttttttaaaattgagtgcaaaggtagtcaaaatcataatatagtaaaaaaaacagtgctaaatagtgacctttactctgctgtttttattgttcactctccgctaaaaaaaaaattgcagtaagtatatttactttttagccagattgcacattactttttaagaaattgtgtattaatacttgaaatcatcagataattactttattttgcaacattgttggtacaaagttgcttagcgcaataggactatgagagaactactttttactgatttctccggcttcaaagtgaacaagttatatgattggtcaggcaaaaccattctgatagctgaggatactgattgtagctttttatatcttaaaactgtattaagaaatactcaggcagttattctctgggcatctacggggcaggaagccatcaacctggtacgggaacaccgggaaattgatgtggttttgatggatatcaacatgccaggcatcagtggatttgatgctacagttgctattcacagtattcgaaagaacctgccggtaatcgcacaaacagcctatgtgcatgacaacgaagtagagctttgctatgcgtctggttgcgtggattatatacccaaacccatcgacaaacatcttttgctcgaaaaacttggcgtcttcctgggtgcaggcgttgaaaagtcgaaaagagaaatatagaactttaacctgcacaatagattacgacaaagctctggtatattcggattgccagagctttggttttcagataaattgatttttcctaaccgcctgatttttaataaaaggcaggtttttgcctatttttaccgtcctggggcaaacggttcgatggaaaactgcaaagtaatgggttcggtctttaactgatattgttccattgggccggggccgcagcttccaccgccaagtccattgtgagcggcatcaatggtgatgatggtttctcctctgtaaacaagttcatatggatggttggcttgatcaaggtcggtggggagatgatgcaatgcgctgaaattaagggcttcacctgaaatctttatgccttttccctgatcattgctcagcgtgaaccaacgcgtatctgaacgatttcccatgtcctgcggacgaatataagcttcagtcatctcatttactgttttgtgataaagcccaatgaaagccgatgatttgcggtcgcggtaattttcatgaggcccggcaccaaaccagtttacatgctcaaatccagtcggcatttccataattattcccaactttggtaagagccaaaccgctttttcgggatcaaagtttacctcaacctcaatttgtccatcacctgaaacggtgtatttgaaagatgagttaaccgaatacccttttgaacttttcgattcaaggttgatcaaaacttctatattacctgcatccaattgctttactgtaaagtgggtaaccttctctttcagataagccagtccttgtttttgccagatgggtcccggaccaccgccaaaaatataatcattgtccacgggagccctgtaaacattcaccctgggtccggcaatgcgttggctaaccgtggtgtcccaatgtatcaggcctgtctccggtttaatgccataaacagtgcttaagggtgtgtcaataacctttaaattattgtaaaccaattgtgttatcgcaccggcttttttgttaaatatgaccttaaatgtttttccctggatttcaagctgttgttccgtctctatcaggctgagcggaaaagctttttctgttgatggcgttaatttttcagggatattaaagggaattttaaactgctctctggcaatcacatatcctgcttttgcccacaattcatcgcgttttagcgtatagcttacgtttaggaaatattcgcttcccggttttaatgccggtttattaaaaggaatttcctgcattttggtttctccgggcattatgtttgaggtgaaaaatccagactgcaatactataccatcttcagccaattcccagtagccattaaaatcattaaggttcataaaagaaaaccggttggtaatcttaatatcgcctttcagcaaattgcctgcttccatacaggcactttgatacacttttctcacttcttccattttcggggtttgctgtcggtcggctgtagtcaagccattggcacagaaattccagtcggtaggccggtcgccaaaatctcccccataagccaggaagtaagttcccggtttcccggggatttctttatataatccctgatcggcccaatcccagatgcagccgccaatcaggcgtttgtgggcatatatggcatcccagtattcctgaagattacccaccgcatttcccatggcatgggcatattcacataaaaagaaaggtctgggatcatcattggcaccctctttttcaaaccataccacatcgggatacatggtggaaaccacatctgctacctcattgtaacgttcataatggatagggcgttcggggtctctcgccttaacagcagctgatgctgcttcaaagttgatacccgggccggcttcattgcccaacgaccacatgatgatggaaggatggtttttgtcgcgctctatcatattcattatcctggagacatgagcatcctgccagctttttacatgaccgagtgacttatcaccatagcccatgccgtgagattccacgttggcttcatcaatcacgtaaatgccatagcggtcgcatagtgaatagaaataggaatcgttggggtagtgacttgtacgtaccgtattcatgttgagttgcttaaaaagctctacatcccgaaccatagatgctctggaaatggtcctgccatccgcagggtcaatatcatggcggttaacccctttgattttgatgcttttaccatttatccacagttgctgatcacgaatttctatcctgcggaagccaaaatcactgcgctgtaccatcagggtttttcccgttgcatctttggtaacaagcaaaatggtgtataaatagggtgtttccgctgaccacagatggggatggggaatgtttgcctttaatacaggtgcttttggctgagcagttgcgcttacctgatgtgtcatcaaaggcatgaccatttctggtgattcatcttcagacaaaaggtaaacttcaagctgatgattgccacttgctccatagtttacgaaactggtttccacggaaaatatcgcttcggagtaatctgcatttaaatcggacttcagccagtaatcccttaaatacaagttcggtacggaataaagatagacgttgcgataaatgccgctcaggcgccagaaatcctgatcttccagataactgccatcgcaccattgatatacttctactgccagacgattgcttcccggtttaatgtaacgggtgatgtcaaattctgccggcagtcggctgtcttcactatagcccactttcttgccatttatccacaaatacatggcactttcaacgcccgcgaaatggataaaggtacgccttcccgcaaaatctgccgggacttcaaattcccgcacataggagcccaccggattgggatattcattttttgtatagttggccggcacgggatccataatgtaaggtggatttgccgcatggggataggtcacattcgtgtatatcggtatgccataacccttcatttgccaacacgaaggcacttcaatattatcccagtaagaaacatcaaagccatcacggtagaaatcttttggtcgcaaatcgggatgcttcacaaagttgaacttccagctaccgttcagattcagataatagggcgagtcgttccagttatccttcaccgcctgcccgatttccgcataaggcatgtaggtattgcgcgctttttccttattgatggcattcaccgtttcatcttcccactcatgccgggtttgtgcaaaaagcgcattggtaaacaataccagaagaatcagcaacttggtcattggtttcattggcagggctttatattttggacaaacttatgataaaaatttaagaagtagtgttagatgctgatctagatctgaaatttgagataagttttatgaatggaagcgggagaagtttccattccaaagaattgttcttcgattttcttttatattcttaaaacttttatatatttgatagcgcgattgctcaattagatagaaccataagtttgaaaataaaaaatggtgcaagctattgagagacaatgctttgaacgtaagctaccatctggacattaataaaactgagataaggtagctgtctttcacacacgcttaaagtagtattaaaataaaaaaaggcgacttgcgccgccttaaatgttttattaacagaatgaacttaaataaacagtggttgtgaaatactaaaaaaaaagcccccgtattgaaagacgagggcagcttaaatgttttcacaacggaataatccttattgtgaattgctttgaattgtgagacaaatatacaacataaatttgaaaagtcaatagcatatgaaaagaattttaggacttgatttgggaaccaattccatcggatgggctttggttaatgaagatgaaaggaaaattgaaggcttaggtagtcgaattattccaatgacccaagatattttagatacattcagtggagggaaaccgcttgaaacacaaacagccgcccgcacccactatcgtggaatgcgccgcattcgtgaacgatatttgctacgacgcgaaagacttcaccgtgtattaaatgttctgggattcctacctctacattatgctcaagaaattgattttcaaaagcactatggtcagtttgtgggtgaatcagagccaaaactaaattacaacaatcgaaattttatatttgcagactcttttgaggaaatgctgaatgaattcaagcaattgcaaccccagttattttatacaagagcagatggaaaagaaaccaaaattccgtatgattggactatttattatttgagaaaaaaagcattgaccgataaaataggaaaggaagaattagcgtggataattcttaacttcaatcaaaaacgtggttattatcaattgcgtggtgaagatgatgcagatgcaacaaggactgttcaaacaagaatgtatttcgatacacaagttatagagagtataattgacactggatcagtatacaagggattgaaagttatacaaattattctagcgaacggggatagtggcaaatacttttccaaagaagtgcccaattgggttggattgcaaaaaagtattatcgcaacagttgacttggataaagagggtaatgatagatttgaagacgatggcactttaaagagaagattttcaattccaaccgaagaagattgggagaaaaaatggaaacttataaaaattaaaactgaaaaggaaattataggtgctaacaaaacagtaggcgcctacatttatgatagtttgcttcaaaatccttctcaaaaaattcgtggtaaattggtacgtaccatagaacgtaaattttacaaggatgaattgattgcaatcctggaaaatcaaattgaacttcaacctgaacttttcactgaagatttatatagtgattgtgttcgcgaactctatagaaacaacgaagcgcaacagctgaccttgggtaaaaaagatttcgttcatttatttgttgaggatataattttttatcaacgtccgctacgcagtcagaaatcatccattgggaattgttctttagaatatcggatttataaagacacagaaagcaatcaagttaaggaatatctgaaagctgttccccaatcacatccactatatcaagaattccgtgtatggcaatggctctcgaacctcaaaatataccgaaaagaggatgatgctgatatcacaactgaatttctgaaaagtacagatgattatgccagcctttttgagtttttgatgacgcaaaaggaagttggacatacagatattcttaaacagttgcttacgccaaccttaagagtgaaatttcaaggcgcaaaagcagtaacattcaataaggaagtggataaagaaattgcaaaataccggtggaactacgtttttgacgactcgaaagacaaggaagaagataaatcaaagaaatatccatgtaattctactggctatgaaatcaggcgaagactggcaaaagtagtaaatgttcctgacggttttcttgaaattacagatacaaaagaggtagaagtcaagaaggggcagaataatggacagaagattactgtttcattaggaacaagagaacatcaactttggcaaattatctattcagtgactgacaaaaaagaatatatctctgcacttgaaaagtttgctaaaaaatactttcttgataaggaatcttttgtcggcaactttgagaaattttcgccgtttccaagtgaatatggagctttttctgaaaaagctatcaaaaagtttatacccttattacgattgggaaaattctggcattgggaggctatcgatagtaaaactcaagacagaataggaaaaataatatcaggcgaatatgatgaaaacattaagactcgtgtcagagagaaagtcataaatcttactgataatattcattttcaaggattacctatttggttggcgagttatattatttatgaccgtcattcggaagccgaaattgctggaaaatgggactcaattgccgaattggagcagtaccttgaagattttaaacaacactccttgcgcaatccaattgtagaacaggttgttacagaaacattgcgggtggttcgtgatatttggaagaagtacggaaaaggtgcgaaagattttttcagtgaaatacacgttgagttggggcgtgaaatgaaaaatactgctgatgaccgtaaatggctggcttcacaagtaaccaataacgaagcaacgaatctccgaataaaagcattgctggcggagttaaaagaaaattcagacggaaaattgcctgttgaaaatgttcgtccttactccccaatgcaactatacgcattgagaatatatgaagatggcgtaataagctcaaaggttgacttgcctgaagatattataaaaatcagcaaaacagcccaacccagtaaatcggaattgcaacgttataaattatggcttgagcaaaagtatcgttcgccttacaccggacaagcgataccgttgggtcgcttatttactgaagattatcaaatcgaacacgttatcccaaaatcccgctactttgatgatagttttaataacaaagtgatttgtgaatctgctgtaaaccaattaaaagacaagcaacttggtctggagtttattaaaaatcaccacggttcaaaagtggaatgtggaatgggtaaagtagtggaggtatttacagaggaagcctatcaaacttttgtaaaagagcattattccaaaaacaaaaccaagcgtcagaacctattattggaagatattcccgaaagaatgattgcccggcaaatgaacgacacccgctatattagcaagtttatttcggccctgctttcaaatatcgtccgtgctgataaagaggatgatggcgtcaactcaaaaaatctgattccaggaaatggtaaaatcacaactgttttgaaaaaagattggggaatggatgcagtttggaacgatttgatactgccccgttttgaacggatgaatcaattaacaaacagtactactttcacttattggaatgaacaatatcaaaaattcttacctgtagattattctcctgctgattctaaaaggatagaaaagaaaaggattgaccaccggcaccatgccatggatgccttggtaattgcctgtatgaccagagatcacgtaaacttactcaataatcaatcggcaaaatcggaaacgtcacgatatgacttgcaatataagttgcgaaacaggagcaaggaaacgtggattgataaaaaaacgaacgaacaagttgaaagagctgtgtttaaagaattcaaaaagccttgggacgattttacagttgatgcgaaaaacgctttggaaaccgttgtggtaagtttcaaacaaaacctgcgtgtgatcaacaaagcaaccaataattatcaaaaatgggttgacgaaaacggagtaaaggtaaaagaatatgttaaacaggaaggaacaaattgggcgatacggaagcctatgcacaaagaaacggtttcgggcaaagtgattttaaatcgaataaaggtaccaaaagaaaaaattctaaccgctactcgcaaatcggttgatacttcttttgatgtgaaaaccataaattcagttacggataccggaatacaaaaaattcttagtaattacttgacttacaaagacaataatactgagcttgctttttcagcagaaggattggaagaaatgaatgctaacataaaacaatttaatgctggcaaatctcacaaaccgattcgaaaggtgcggatatttgaattgggaagtaaatttccgttaggagaaagcggaaataagaaagacaagtacgttgaggctgcaaaaggtactaatctcttttttgcaatttattctgatgaggatggcaatcggagttatgagacaattcctttaaatgttgtgattgaacgtttaaaacatggattgagtgaagtgccgaaaaaaaatgagaagggaagaacacttctatttaatttatcaccaaatgatttggttatggtttctgatgaaagaggaagcaaaattgaaatttataaaatggtttcatgtactggtactcaatgtttttttatccctaataatattgcaactcccatagttcaaactacagaattaggatctaataataagtcagaaaaaacctggaatggagtaatgattaaacaagtgtgtatgaaacttaaagttgatcgtcttggtaatatttaacttttaattcataatcttgataaaacgtaccctttatttcggcaatccctgctatcttaaaaagagagatatgcagatggccattgagtttcctgaaaaagatgggaaaccgggaacttctattcccatcgaagatattggaattgtggttttggacagccctcaaattaccctttctcatgctttaattgctgcacttggagatcaaaataccgccattatcagttgtgatgcaaaacacctgccttatgggttaatgcttcccatgttttcgcatcatgcctttactgagaaaatgtatcagcaattggagtcttccctgcccctaaagaaaaacctgtggcagcaaaccatagtagcgaaaatcagcaatcaggctgccatgctgagaagtgtgggagtagccgacgggaagatgcagtattatttgaggctggtaaaaagtggcgacccccaaaacgtggaaggaagggctgctgccttttattgggagcatttgtttggcgacaaaagtggatttacacgcgaccggaatgaggttggaataaatgccatgctcaattatggctatgctattttactggccattgttgcccggggattggtagccagcggaatgctgcctgcattaggaatccatcaccgcaataaatacaatccctggtgccttgcttctgatattatggagccctatcgaccttatgttgaccggattgtattgcagatttcagaagattttcccgaatgtgacgagcttacaccagaagtaaaaaaaatgcttttacaagtgccggtcatcgacatagaaattgatggaaagaaaagcccactcatggtaggaatgcagcgtacaacagcatctttatcatcgtgttttgaaggtacaggtcgaaagattttgtatcctgaattaaactgaaacaattgacatctaataattttaaccggctaaatcagtaccatatattgtggatattcgtctttttcgacctgcctactgaaacaaagagggataggaaaaattatgcccagttcaggaagaatctgcaaaaagacggttttaccatgatgcagttttctatatatgttcgtcattgcaatagccgtgaaaatgctgacgtgcacaccaagcgtgtaaaatcatttttagctcctaaaggtgaaataattatattttcggttaccgataagcagtttggtatgatggagttttttagaagccaaaaagaaacagcgaaaccgaatacgccccaacaattggaattattttagtcaggaataaaaaagtccttcaacccgggagctgaaggacttttattgaacacttttttaatttctgatacaagcgttaactggttgtgcattagtgtattgggcgcgggtatggtgtgctcaatacttcaaagatacaattcaaaagcaattcacaacatataacacgaagggttggaaaactttaagggtgtgctcaatacttcaaagatacaattcaaaagcaattcacaacaattagacgatacattatataggtcaaaaggtgtgctcaatacttcaaagatacaattcaaaagcaattcacaactcaacaatcatttcaacgcgcattaattttggtgtgctcaatacttcaaagatacaattcaaaagcaattcacaacaacatttcctaccataacgtttgctgaaggggtgtgctcaatacttcaaagatacaattcaaaagcaattcacaactgctgctcaggggtgagctgcgattcttcgggtgtgctcaatacttcaaagatacaattcaaaagcaattcacaacgaattgatggactacctcacaggcgagcagggtgtgctcaatacttcaaagatacaattcaaaagcaattcacaacgtagtgtcgtcacttcttataattggcgacggtgtgctcaatacttcaaagatacaattcaaaagcaattcacaactgattgtaccctatgtattcaagaagttctggtgtgctcaatacttcaaagatacaattcaaaagcaattcacaacaaccccggtgcaaggcaggtgaacccggcaggtgtgctcaatacttcaaagatacaattcaaaagcaattcacaacatggtttgaagtattcactatccgctttcaggtgtgctcaatacttcaaagatacaattcaaaagcaattcacaacccatcattgcctaagtatctgccatgttcaggtgtgctcaatacttcaaagatacaattcaaaagcaattcacaacggtcatacaccgcgtgccccatactcttaaggtgtgctcaatacttcaaagatacaattcaaaagcaattcacaaccgcttgtttactgagacttttccgatgcgcggtgtgctcaatacttcaaagatacaattcaaaagcaattcacaacagttactggcttgtttccgcaaagcgctcgggtgtgctcaatacttcaaagatacaattcaaaagcaattcacaacgagctggttaagtcggatacaagcgtccatggtgtgctcaatacttcaaagatacaattcaaaagcaattcataacgattgttcagccctatctttgtaaacgtgaggtgtgctcaatacttcaaagatacaattcaaaagcaattcacaacatcttcgatcatataactatcaacagtgtaggtgtgctcaatacttcaaagatacaattcaaaagcaattcacaacgaaggtaatacggtccatcattcggcacatggtgtgctcaatacttcaaagatacaattcaaaagcaattcacaactcgtcagataaagtgattttttgctcaagtggtgtgctcaatacttcaaagatacaattcaaaagcaattcacaacgtgtagccaaagcaccaccaatgctttcacggtgtgctcaatacttcaaagatacaattcaaaagcaattcacaacgtagcattaacaattccgattgttgccataggtgtgctcaatacttcaaagatacaattcaaaagcaattcacaacgttggttttgttggtttacttcctctgtaaggtgtgctcaatacttcaaagatacaattcaaaagcaattcacaactgcgggttaacaggaaaattggtactccggggtgtgctcaatacttcaaagatacaattcaaaagcaattcacaacagtttaatccatatgagcaagtagattggagttgtgctcaatacttcaaagatacaattcaaaagcaattcacaacaggcccgattacattctccagcaaaaggatgttgtgctcaatacttcaaagatacaattcaaaagcaattcacaactcatggcaaattggtttttgttaactgcttgttgtgctcaatacttcaaagatacaattcaaaagcaattcacaacgccttcatttgcggagggctactcagccttgttgtgctcaatacttcaaagatacaattcaaaagcaattcacaacaaatatttctgcatagcgatcataaggtatgttgtgctcaatacttcaaagatacaattcaaaagcaattcacaactgttcatccccttcccttatcaaaattggtgttgtgctcaatacttcaaagatacaattcaaaagcaattcacaacgagttggcaatggtttcatttcaggcagttgttgtgctcaatacttcaaagatacaattcaaaagcaattcacaactggcggttggtgctacattaaacccaagcggttgtgctcaatacttcaaagatacaattcaaaagcaattcacaacgagacaaaccacctcagacgaaaaacttaagttgtgctcaatacttcaaagatacaattcaaaagcaattcacaacaactgtgttaccgtgaaacaactgtgctttgttgtgctcaatacttcaaagatacaattcaaaagcaattcacaactaccaggcgttagcggaaattggggcaatagttgtgctcaatacttcaaagatacaattcaaaagcaattcacaactgagctttggtagcttcttccaccgcacccgttgtgctcaatacttcaaagatacaattcaaaagcaattcacaactaacgctttacccatcaaatcataagttgtgttgtgctcaatacttcaaagatacaattcaaaagcaattcacaacacagtacaaactgccctttcacctgttaatgttgtgctcaatacttcaaagatacaattcaaaagcaattcacaacgtgtgggcatagagctacatagcccttattgttgtgctcaatacttcaaagatacaattcaaaagcaattcacaaccgattgaccggagtgcaatgcggagctcatgttgtgctcaatacttcaaagatacaattcaaaagcaattcacaacaagctcaccacagtaacgagagacccatccgttgtgctcaatacttcaaagatacaattcaaaagcaattcacaacaatgaagtaaatgagactacctaaaggccagttgtgctcaatacttcaaagatacaattcaaaagcaattcacaacatagctttcgggttcaaatcacagccaatagttgtgctcaatacttcaaagatacaattcaaaagcaattcacaactagcaagttacagattgtctcaggcgtgaggttgtgttcaatactttaaagatacacttcaaaaccaaatcacacaaaaaaagacctcccgttttcacagaaggcctcttttagtcggggtgaatggattcgaaccatcgaccccctggtcccaaaccaggtgcgctaaccggactgcgctacaccccgaaatatttcaaataaaggataaaaccctctctgcggtgagggggggattcgaacccccggtaccgtttccagtacgacagtttagcaaactgttggtttcagccactcacccacctcaccaatgggagtgcaaaagtacgaattgatttgtaattcgcaaattttttattttttcttttttattccggctattccggaattatcctatttttgttcatcttaagccactcatgtaataaacattgttatgaaatcaggtaattatttcaaattatggtggcttgtgctgccactatttttaggcgcttgtggtactacctcttatcaaatgcaactgcttcaaccggcaaccttaacccttccgcgcgatattaagcaggttggattgattaaccgttctttgcccgataaagggcagggctttttaaatgtgatggaaggactcataaccggtgaatcaattgcagccgatagggaagcatctacagaatgccttcgcggactttcagcgggcctcaacaacgggccacgatttacagcggtaatcattgaaggtcttgacctgcgtggcacaggcaccaggcaattcccggaatttcttagctggcaaagggtagaggaactttgctcacaattcagggtggatgctctgatagccctggaaactttcgattcagacctggccctccgggaaagttatgctgatgtggagcgcaccattgataaaaagaaggtggtcgtaagggaatactatgctgaagcccgtatgaatgtaaatagcggctttaccatttatcagccggcaagccaaaaaattatcgaccgaaatgtatttactgatgagatgtcctggcgaggaaccggcgacagcaaacaacaggctctggcgaatttaccgtcaaagcggcgggcgctcaatgagtcggctgtattttcaggccaccagtatgccagccggatttcgccggtatggataacagccagccgggatgtttatcgtaaagccaatgatgatttcaagatagctgcccgttacataaagcaggacaattggccggaggccattgccatctggaaaagatataccaaagatactgatcataaaatcgccggtagagccaactacaatatggcagtagccagtgaagtagaagggaatttatccatagcagaagaatgggctcagcgtgcatggagagaatacggcctcaaaaatgcccggtcttatattgcattgttgcaaacccggaaatatgagttggaacgactcaaagaacaaatggatgaatagttaagggagtttgaatgtgttaatatccgttaatttaaacccgggcagttttatattgtttacttttgtccgctgatggttccctgtcaactatcatcttgcagcattcctgaatgaaaaaatatagtcgggcaacttatgttaaagctggcgcattatcacttatttttgcgcttttttcggtattgtatgttcttttacttaccgctctgcctaaatacgctggaaggctgccgctgatgctgttgcttggtatgctggattggtttctgtatttggatatacgtcgttacctaaagcttaaattaaatacctccggagtcatttttgcaattttctggtggttgcccatgttgttgttgctggcatttctgatagcaactacctttgttccaattcaggaactccctgcatggcccaggaatttatttccaggaattgccattataggttatctggtaaagatggtgctggttgctttttttgttcctgcatacttatttaccgcagggatgctattgtttaatcgaattaccggtaaaaaggccacctggcccggtattacttctaacgtttttaaaaaaatgggaatattttttggcagccttgcctttgctggtttgattataggcagcacagtctgggtatataagttcaagattcatcggattaatctggccatagcctcaatgccacccgaactgaataatctgcgtattgttcagctttctgatattcatctgggtagctggatgtccaccaggccattgcaacgcgcagtggacagcgttaatgcattgaatcctgatatcatcgtttttaccggcgacctggtgaattattctacggcggaagtcaagggttttgaatctatacttgcccgattaaaggcgcgtataggaatctatgctattaccggcaatcacgattatggtgactataccacctggcccagtccggaagcaaaacagcagaatttcgatgatttggtagctttttataagcaactgggatggaaactattgctaaatgatgtggattacatcaacgttgattctgcacgtattctgatagcaggtgttgagaactggagttcaacagcccggtttaaacggtatggtgatttagctaaaaccatgaaaaatcatgaatttgcggatgtaaatattttactttcgcatgatcccacccattgggaagcagaagtttttaagcaatatccggaatttgatcttacccttgccgggcatacccatggcatgcaaatgggtatagaagcttttggacttaggtggagtccagctcaatacgtgtacaagcattgggcaggactggcccgttatcatcagccggatggatccatcagtaatctctacgttaaccgtggcctgggtcatattgcctatccgggcagagtaggtattttacctgaaattacgctgataaagctgattgcaaaatagcattttgagaagaaacgctgaatagagacgagggacggggcgacatggggacggggggacaaggagacgggaagagagaatttctaacttctaacctccaacctccaacctctaacttctaacttctaacctctaacttctcacttctcacttctcacttctcacttctaacctctaaagaccaacagccaaagaccaaagaccaaaagggacgagagacgtaaaagggacaaggagacgtggggacagggagagagaatttctaacttctaacctccaacctctaacttctaacttctaacctctaacttctaacctctaaagaccaacagccaaagaccaaagaccaaaagggacgagagacgtaaaagggacaaggagacgtggggacgggaagagagaatttctaacttctaacctccaacctctaacttctaacttctaacttctaacttctaacctctagcctctaaccccgtaagtaaggaatgcaggacacatctgcaatccgcaatcctacatcctaaaccattcattcaccctgtctgcgatctgacaattatcggaaaagtgcttaaattcattggtatgcttattataaatataatctttttcccattgcttgtggtgaatactaatttcttccagggcattcaggatgaaatcaagttcctggtcggtcatggtaggatgcagagagagtcttatccatccgggcttttgcgataaatcaccatgattgatcaggtcggtgattgatttggagtgttcgtggcttacatccagcagataatgaccataggtgccggcacaggcacagcctccacgcacctgaatgccataacggtcacttagtagcttaacggccagattgaagtggatatcatcataataaaatgagataacacccagccttttcctttgattgtttgcaagtattttaatggacggtattttatccagtcctgcaaaggccttttcaagcaattgttcttcgcgttgggctatgtttttcacccccattttttcttttatttcaatacaaagcgcggtgcgtatgcattgcataaaccccggagtaccgccatcttcacgcaattcaatgtcatctacatatttatattctccccaggggttggtccagtccaccgtgcctccgcccggttgatcgggagtgcggctattgtacatggaacggtcaaataccaataccccggaagatccgggccctccaagaaatttgtgcggagaaaaaagtatggcatccaacttctccataggatcttcaggatgcatatcgataggtgcatagggtgcagaagcagcaaaatcaataaaacagaaaccattatattcatgcataattctggcaagttcatagtatggagtatgaataccggtaacattggaacaggcagtaaaagaaccaagtttaagcgggcgatccttgtaattctcaagctgctttctcaattcttccggatcaaccaataagtccttcccgggaggcaaaacaacaacatccgacatggtttcaaaccaggaagtatggttgctgtggtgctccatatgggtgacaaagacgacgggtttatctttctccttaaaacacctggaatcatttagttgtccgcacatcttcaaacccatcatgcgctgaaatttcacaataactcccgtcataccaaagcctgcggtgatgataacatcttgcggcccggcattcacatgtttcttaatgcggttgtgtgcctcatgataggcacgggtcatagaggtgcctgtttcactggtttcggtatgtgtgttgccgataaaagggccgatgtcgttggtgagccggtcttctattggccggtaaagtcttccgctggcaatccagtcggcatatatcaatttttgacgaccatagggcgtttcatattccaggtcgtgaccaacagtattctttctgaaagtttcaaaatagctctccataaacctgcattatattgtgtgcgattggaatgcaaatgtcagcatttttttgttcccattagggatatatcatacacaaagtaatagatttagaggattcctgttccttccagtgactatctactgatcgggatggtaaaaatcagtcgccctgggcaatctgcatcctggaaatctcaatgctgccaccttcagaataaatggctatccagttgttgtcttcccggtaccagcggtcttgtatgcttaccctgaccaaaaagtcgccattttcgtcactggtaatagtgcgtaaaacaattcctccgtttttctgtgcgcttctgccatagttcacgtacactttagggtcagcttcgctggtttttcgtgcaactatggaaacataattgttctttcgcagacgcatttcaatgggagtaaaactaaactttttctcatctcccgattctatagtt

SEQ ID NO: 1176 - DNA, 24440 bp, synthetic construct
  misc_feature 1..24440: note = Synthetic
  source 1..24440: mol_type = other DNA
aatgttttctggatctattttattttgatcaaaatctttgggttgttttttttcatcaattacaaatagcggtttttcagagttttgaatagtactattttttttgattttaacgtacatgtctccatttggagttaccaaaccactattagacgcttctattgtttttttgtccccatctttggtttctataacaatggttttaatgttctcaggatctacaaattcatcaacaacttgcacagaatctgttagtatgattcgttttacactggtcttgatttttttatcgtcatcatcatcatcaccggtataaatagctatatatttctcttcttttttggtttcttccctaggagtgtcttctatcacttcaattacttcaatgatttccttttcatcttcaactaattcaaggatctctggattttccttactattttgaattgtttttctgaaggtgattttctttttaggagtagtttccttttcatcttcaactacctcaatgatttcaatgttcatatttttttcatcatcatttccggctgttacaaacaaatgttttccgctgttcagcatgtcaatttcagaggtgtttgcattgtaaccgcaagtgattttaccatcctcttgatgtgcaaagaagtgaactggttctatgccatttgagttttcaatcttgtaatttccagtttgtcccgcaacttcatacgtagatttaaatttcacaatgttaccattggttctcttaattccttttaccttaaagtcaacgcccaatttttcttttagcgtattttgaaaagatgtaatttctgcatcgctggtggttttggtaattggaaattcataatgttccactttcttttcctgttgatcctctaccaccataatttgtgcttcagattggtaattgaacataaaaaagaaagctgtaagtagtgggagtataattcctaattttaaagcgtgactgttttttgatttcgatttttgtaacataacgattcgttttttgattgataatttaaagaatgaactcaccaagggaagttcgttttttgatatgtgatgattcagtaataaatattgataatttttgatgtttttggtcttttgaattgccgcggtatctgctagaaactccaagttttgcgataattgtcttttataaaaatggatgaacggaaagaaccataacaggattgaagctacttcggcaatgataatgtctacagaatgcaactggcgaatgtgagcaaattcatgctgaagtatggcgctaaattcggttttagagtaatttttttgattgtataccaaataattaaagaaagaaaacggtgtgttttcgtcttctgattttatcaaatggatgttggataattttcgtttcaagccggtagacaatactttgtttacgcttaataattttatgattagtcgaccactgaaaaacagcaaaccagcgaaataaacgatcgctaatatattggtggtattccaaaaactttcttccataaccagctcactttgtggtgaagcagtagtttgcagggaagattgtggaatgtaaatggtttctacatgtgtatacgtgagcagcggaaacagaaaactgataaaaattccggctaaaagaaaaattcgattggctttgaaaaacgtttctttagccagtagttgatagctcaaaaagaagagcgtcaacaaaccacagcttttagcaatgtaaataagaaatgtttccattattgttcgttttcaatgatgttgatgatttccttcaattcgtctaccgacagtttttgctcttgtgcaaaataggataccatacttttataactattattaaaataattttctatagccttgttcataaacgtttttcggtattcctctttcgggataataggataatattgatgcgtgtttccaaacgcattgtggtctacatatcctttttcctctaagtttcggatgatggtagacaaagtgttgtaatgtggcttgtcttcggtgatctcttgcatcacttcttttacaaaagctttttcaagcttccataaaatgatcatgatctcttcttctttctgcgttaattttttcattattctttcttatgatacttcgaaagtaaaactattattttagttacacaactatttttatagttaaccaactgtttttgtagttaaatcatgttaaagaaacggtaagaatactcgtttggcataaaagaaattgtatttttacgtcaaataccttttcatgttacaagacattctgtttgttattttcggatttgtactattggttttaggaggaaattggttgctgaaatctgcggtagccttatcgcttcggttggcgattccaaagatcgtaataggaatgaccattgtctccttagctacgtcagcaccagaacttatcgtaagtattagcgctgcgttcaagggaaatccggatattgctatcgggaatgtggtaggatccaacatagcaaaccttggtttagtacttggaatcacaaccattttgggaaatatagatgtggagaaaaatttctacaaagtcaactggccggtcatgatgttgaccagtgtattattatatctattcgtcatatttgatggaacgttaagttgggtagaaggaattttattcattgtgttactagcactctttttatggtttttagttaagaatggaaaaagttctgtggtagatgaaatgccggaagatgatgaaccactttctctttttaaaacccttgcttttttggtattgggtggagttgcgctttggggtggttcggaattgttgattgatggtgcggtttctttggccaatgatatgaatataagccaacgcatcatcgcggttaccgttattgctataggaaccagtgtgcccgaattggcggcgtcggtgatggcggtgatcaaaaaagagaaagctatttcgctggggaatcttctaggctctaatatttttaacattctagccgtattgggtgttacttcggtcattcaccctatagaagtgagtaccgcttttaatagtgatttgctgtggatgttgggtatttcattccttattttaccattggtgttttttccaaaacgaatgagcttaggctggcgcgaaggaatctttttgttatgtagctacggggtttgtttgtatttgtctatataaaaattcatatcgtagtacttttttttggtagcattcactgacttgatgactgtggtttgtaaagggatgttttagggattaaatatttacttatgaaagtaaatggcattgtgctattgttgttgttattaaactatggttgtaataaacctacagctttagaaaatagatttttaggtgattggcaaattatagaatctgtaaatatggatcatacaataaaggacatcattaatagtactcttatattgacaaagtgggttttcctcgtaaccacctaattcatctattatcgtttttacattcataaagtatctatttacatttttcacattcgctgtgccatcaatacaagttctattgttaataagtgtaaagaagccaccaaggctaatacaaaggatgaagataattagagccttccaaatttatataacttataatacctctgttttttgaataataaattattctctcctcatcactgtctggaacattaacaccaatagtaatattaaatttatatatgatttcattatcaagagtgtcgattcttgaagtcttggattctaaatggtagattattgtacttaaattgcactcattccctacagaaaacaaattatgattactaattcttttcaaccctatcttccaaacttcattgcattcatcaaaaatatcatctatcatatatacagtatcattagattctcttatgtaagcttcatagatatctaaactatccccgtagtgacttatagcattgtaagtatctttatagaaaatatctccattaaactcctttagttcttttttgatggaaggactattactacatgaattcagtaatatcacaaatagaataattaacctaaaattcataaatttctatttctagcgtcattggtacttaagcttttttaatgtatgcatcaattctaacacagaaatatttactatcacatctactacatgttacttttctataaataatatcatcagtaaaatctatataaacaaattttttctcgttgtaaagaaattgattcacgttatatttatcctccttttttaaaatatcaataagcttccaaaaatgattataatcagaaccaatagaaaagtatatttgataataatctaaagtttcattttcaaacgcaagaatatatttcacttttgttttttcatgattgaaaagcgatattttaaactctgtcactaaagtattccataatgtatccactgtaaactcaccttcgtttactccatgggaatcgtgaaatttctcaaaaactttttgcttgtcttcacctaaagataaatcaaatccaaatatgggttgtagataaaaggtcttaatttcattttcattagtagcttgagcatttaaatttagaaaacttaaagtgcatagaatgaagaggtatacgatgtgaggtttcataatttctgattttagcgttatatgtgtgtaaagatgtctttgccagtagttattttttatctcttattttgttggtatacataaaaaaagcatccaaaacttggatgcttttttaaatctgacacttgatattgaatactaaaaattaaattttcgcagactttacagttttcacgattcttgccgcaattttgtacggatcaccgtttgaagatggtcttctgtcttctaaccaacctttccatcctttttgaactgtcataattggaatacgaatagaagcacctctatcagaaactccaaatgagaattcgtggatagattgtgtttcgtgttttcctgttaaacgcatttcgttgtgcgctccataaacttcaatgtgctctttcacaactggtctgaaagcttcacaaatcttctcataggtttctttagaaccacattctcttaatacagagttagagaagttagcgtgcataccagatccattccagtctgtatctccaagaggttttggatgccagttaatagctaatccatactcttctcctaatctttctaaaatataacgagctacccaaatttcgtctcctgcattttgagcaccttttgcaaaacattggaattcccattgacctgcagcaacctcagcgttgataccttcaacgttgatacctgcttctaaacacatgtctaaatgtctttcaacgatttctctaccaaatgcatttttagcacctacagaacagtagaactgtccttgtggagtttgatcccttgggaaacctaaaggtaagttcgtgtcaacatcccaaaggaaatattcttgctcaaaaccaaaccagaaatcatcatcatcatcatcgatagttgctcttccgttactttcgtgtggagtaccatcagaatttaaaacttccgtcattactagatatccgtcttttctagccggatccgggaaaattgcaacaggctttaacaaacagtcagaagagtttccttctgcttgtcttgtagaactaccgtcaaaagaccacattgggcaatcttctagtttaccgctaaaatctgtttcaatttttgttttacttctaaggcttgccgttggttgatatccatctaaccaaatgtactctagcttcgctctgctcatagttgaattgttatagatattgattgaacttaattttgaactgtaaaattaatttttttttgtatcccctccttgggaaatgggggtaaatattaaaaaattattaatttttaatgttagtgtagtaaaatgaggggtgcaatgaaatttttttaaaaaataccttttcaatttatatttttgcaataataatcaaagattactagtatgtcttcaatcagattcaaagctttacaagaaatttataacaaaaaacctcatttcgtagataaaattgaaagaaggtctaaaatttttgcggaaaatgttttcaatgagacttccatgaggcaatttatgagtgaagcggcttataaaaatattaaggatgcagtcactttaggtaaaaaaattgatagaaaacaggcagatcatattgctgtaggtatgaaaaattgggccatctctaaaggagctacccattatacgcattggtttcaacccctcacagggtctaccgcagaaaaacacgatgcattttttagcttaactgaagagggaattcctgtagagcgttttgatggttcacaattggtacagcaagaacctgatgcatctagttttccaagtggtggtattcgtaatacgtttgaagcacgtggttacacagcctgggatccttcttctccggcatttgtatacgggagtacactttgtattcctaccatttttgtttcgtataccggtgaagctttagataccaaaacccccttgttaagagcattgagcgctatagatagtgcagccacagaagtggtgaagtattttgataagaatgtgaccaaagtaaatgcaacgcttggttgggaacaagaattctttttggtcgataaaggattggcatattccagacccgatattttaatggcaggaagaaccatgctgggccatgcacctgcgaaaggacaacagctagatgatcattacttcggaagcattccttctcgtgtgattggctttttaagagaattggagatcgaatgtatgcgattgggaattccggtaaaaacacgacataatgaagtagcgcccaatcagtttgaattagcgcccatacatgaagaagccaacctggcggtagatcacaattccttgatcatggatgtgatggataaaacagccgataagcatcagtttaaaatactatttcatgaaaaaccttttgcggggatcaacggttccggtaaacataacaactggtcactcaccacaggagctggtgtaaatttgttgagtccgggaactactcctatgaaaaatctacagttcttaacgtttttcatcaataccatcaaagcggttcatgagaatgaagaattgttaagagcttcggtagcttctgccggaaatgaccatagattaggagctaatgaagcaccaccagccatcatttcggtatttataggagaacaattaaccaaagtgttggatgagttagaaggcgtttctaaaggaaaactatctccacaggagaaaaccgcattgaagttgaacgtagtagggaaaattccggatgtgttattggataataccgatagaaaccgaacgtcggcttttgcctttaccggaaataaatttgagtttagagccgtgggaagtaaggcaaattgtggaagtgcgatgacggttttgaataccatagtagccaagcaattgcaaaactttaaaaaggaagtagatgctttaatagataaaaaaggactgaaaaaagacgaagctgtttttaatgttcttcgggaatatatcaaggcttctaagaaaattcgttttgaaggcgatggttacagtatagattgggagaacgaagccaaacgccgtggcattagtaactataaaaatacaccagatgcgctgaaagtaatgaaaagcaagaaggccattgcactgtttgaagaaaccggtgtaatgaatgaggcagaactgcgagcgcgttttgagatagagttggaggagtatgccaagaaaattcaaatagaaagcagaattttaggggatatcgccaacaatcatgtagtgcctacagccattcgttatcaaaatttgttaattaaaaatgtacagggcttaaaggatatttttggagctacgtttagaaccgtaggcgcagaacaattggaccttattgaacaaatagccaatcatattgccatgatcaaaaagaaatcagacctcatgcgtaatgagcgtaagaaagcaaacggtatttcggacgcgcataagttggcagaagcctattgctaccgcgttaaaccgtattttgaagatattagataccattgtgataagttagagttattggtagaagatgatatttggccattgacaaaatatagagaactgttgtttatgcgataaacgtaaccgaattctctgcgagggtgttaattttaattcacaaaagtgtagtatttcaaaaatatttaagtacatttaaaaagtcgtaaccagacagcggatactgaatgggatagtgaaatactaacgatacagctcaaaaaaagccggggcctaatccgaatttttgagctttttttatgtctttttagtaaaaaccagtacttacggtttgtgtaaaaaataaaggtttcttctagctgatttatgctacatttcctttaagagaggtattttgatgtgatttaagatgtaaattatgcattttgcagcaacaaacgtttggtaggaaggaatcaaacgtttggtaggaaggaatcaaacgtttgtttggagtgggggaaacgtttgttttggaagtattttgataaaaaaatcccgaccagcggatactagtcgggataatgaaactaccgaagtagctcaaaaaaagccggggcctaagcgactttttggtaggtaagcagtttcagcatttcgcggatacgcttacccggttgaaacaacactcgatttttggtgacatcactggctacaacatcctcttcattgtcttgtccctgtgcgctgacgcttactttaaaactccccagtcttccgagttttacatgtttcccgttacgaagttgtttgatcacatttcgttccagggctgctagcactgctaagcagtcggtttcagttacggtgcattgcagtgaaatgtcttctgctaatgcttccaaatcggtttctccatcggtgatggctgtggcataatactttgccggttgggccaaatctaacggattgatccgtttgaccgctttgattttaacgctcataaagcttaaaatttaaaaatgaatactttttgttggatacatatatactacgctgtgagtaccttgatgctccttttcaaaaatacagtaaaattttagctacttgataatcaaataactatgaatgttaagtaaatgtttttaaacgacatgtaactacttgtttattaatcgtttaaaaacttataaacaggattatgtttgtaagtatttttaaatcaagtgtttatggtgttgattttttcggaattatttatcatatttgcggtcaactaagggcgtattcggtatatacctatttgtttttattttttacctgtaaatcaggtgtttatgaattttagaaaatagtgatgagtcattatttttttaagtacttctctttccaagtcgctgtttgaaaagccattacattgtttaaaaacagttaaaagtgttcatattacggcttcaatggcataaaatgaatgtcctgaaattccatttttttggtgcaaaaatgtatttatgtgtgcttgatccgtgagtaaaaacgctagattttgatttttacagattttttttgatcattttatcggtgcacacgtcgtcgtttgttctgtatcttttttgatggttttctgtgatggttttctgtgatggttttctgtgatggttttctgtgatggtttcaaaagggtagcgtcgaagtgttttttggagtatacttcagtggttatagaactagagttgtctacagtatataaaaaaagccccgaaggtagtcgaggcgctaaatgttttcacaacggaataatccttattgtgaattgctttcaaaattgtactccaaatatataaaaagaattctaaattttattacggttaaccgtaaagttgtgtaaaaattaattcctatatttagaaacgttatagtattgaaagaaaatagctatgaaaaaaatattaggattagaccttggaaccaactctattggttgggcgttgatagaacaagattttgaaaataagcagggtgaaatattaggattaggaagtagaataattcctatgagtcaggatgtattaggtgattttggtaaaggaaattcgatttctcaaactgcagaaagaacagggtataggggtgtaagaagattacgagaaagacaccttttaagaagagagcgtttacatagagttttaaacatattaaattttcttccatctcattatgcaagtcaaattgattttgaaaagcgactaggtaagtttaaagaaaatactgagcctaaaatagcttggaacaatataaaaagcgacgatgaagaaaaggaaacctatgagttcctatttcagtcttcgtttgaaaagatggtacaagattttaaatcaaagggatatgatataagtattccttatgattggacaatttattatttacgtaaaaaagcgctttcatataaaattgataaacaagaattagcgtggattatacttaattttaatcaaaagcgaggttattatcaattacgtggagaagaagaagaggaaaatcctaataaatgtattgagttttattcattgaaagttattgatgttaaggcagacgaagaaccaaatagaaaaggagaggtttggtactctttaactttagaaaatggttgggtatatagaaggtctagtaaaactgatttagctgattggaaagataaggttaaagattttatcgtgacaacagatgttaatgatgacggatctgtgaaaactaataaagaaggagaagaaaaaagaagttttagagctcctaaagaagatgattggactttaataaaaaagaaaacagaacaagagataactcaatctaaagtaactgttggaacctacatttatgacaacttacttaaaaatcctaatcaaaagattaaaggacaattagtaagaactattgagcggaaatactataaagaagaattacaacaaattttacaaaagcaaatagcattacaaccagagctgtttacagatgagttatatatagattgtgtaagagagttgtataaaagcaatgaagctcaccaaactcaattaggcaaacgagattttttacacttatttttaaatgatattattttctatcaacgtcctttaaaaagtcaaaaatcatctataggtaagtgtactttagagtatagagtttttaaagataaggacggggttgaacagactcaatacttaacaacaattccaaaatcaaatcctttataccaagagtttcgtgtttggcaatggttacacaatcttaaaatttatcttatagagggagataaagatgttacagaacaattcataaatagtaatgtcgatgttgaacagctctttgagtttcttatggaacaaagggaggttgaccatttggatattctaagctattttctattaccaattgtaaaaaataaatttccgaatgcaaaaggtagagctttaaaaaccgaattagctatagaggttgcaaagtatcgttggaactatgtatacgattcagataaaaatgaatcaaaaaaatatccaatgaatgaaaccagatatgaaattcatagaagattaaaaaaagttatcaatatcacggatgattttctatcaccagacaaagagcaacatctgtggcatatcatctattctgttacagataaacgtgaatatgagcgagcattaaagtcgtttagtaagcggtataatttagatgaaagctcctttgtagacaatttcataaaattcaaaccttttgatagtgagtacggccgctattcacttaaagctattaaaaaactactccctttatttagagtagggaaatactggtcttgggatgcaatagacgaaaatactaaagccagaattgaaaaaattattaccggcgaatatgatgacaccattaaagatagggttagagagaaatctcaaaaactaacaaacgaagatcattttcagggattacaattgtggttagctcagtatatagtttatgatcgtcattctgaagccaactccgcaggaaaatggaattcagtgaatgatttggaagagtttttaaatgattttaaacaacattcgttgcgcaacccaatagtagaacaagtggttacagaaacactgagagttgtaaaagatatttggaaacagtatggaaaaggaatcaaagattattttgatgaaattcacgtagaactaggccgtgacatgaagaatacagccgataagcgtaaaaaactatcgagtgttattgctgaaaatgaaaacacaaatctgcgtattaaaaagatattaatagagcttatgagcgatagctctatacagaatgtacgcccatattcaccaatgcaacaagaagcattgaaaatatatgaagatggcgtattaaaatctaatattgtcataccagatgatatagataaaatcagtaaaaaagcagagccttccaaagcagaaattcaacgttacaaattgtggttagagcaaaagtattgttcgccctatacaggaaaaccaataccgttgagtaaattatttactgctgcttacgaaatagaacacgtaattccacaaagtagatattttgacgatagttttagtaataaaattatttgtgaagctgaggtaaatagtttaaaagataaacagctaggtttagaattcattaaaaatcatcatggacaaaaagttacgacaagttcaggtgaagtagaaattttatccgaaacagcctatgaagcgtttgtaaacgagcattatacaaagaacagaggcaagaaagataaattattattggatgagattcctgagaaaatgatcttacgtcaacttaatgatactcgctacattagtaaatacatagctaatgtactatccaatattgttagaactgaagatgcagatgatggcgtaaactcaaaaaatataatacctggaaacgggaaaattactactaaattaaaacaagactggggattaaatgatgtctggaatcaattgatactatcacgttttgaacgaatgaatcaattaaccaaatcggaagagtacacttctaaaaatagcagtggtaaaaccattccaactgttccttttgagtactctaaaggatttcaaaagaaaagaatagatcatcgtcaccacgcattagatgccttggtaatagcatgtgccacacgtgatcatgtaaatttattaaacaataagcatgcacaatcaaaagaacggtatgacctacaacataagctaagaaatacggagcagtggatgactaaaaatggagaaactagaaataagtttaccacgttcaagaaaccatgggataattttacagcagaagcaaaaattgaactagagcatacagtggttagctttaaacagaatttaagagtaatcaataaggctacaaattattatgagaaaatagtaaacggtaaaaagactaaagtagcacaaaagggtgtcaattgggctattcgaaaatctatgcataaagagacagtttctggattggtagatcttcctagagtaaaagttccaaaaggaaaaatattaactgcaactcgtaaaagtttagatgcttcttttaattcaaagagtatagagagtataacagatacaggtattcagatgatactcatcaatcatctagaacagtatgatgaaaccaaagtgacaatagctgaaaaaggtgttgccgagaaaattcaaagaagaaaacaacttatcaaagacaaggttcttttagaacatcctgaattagctttttctcctgaaggtattgaagatatgaacaagaatatagttcaattaaatggtggtaaatttcaccaacctatcttaaaagttagagtttttgaattaggaagtaaatttaaagttggttatcaaggaaataagaaagccaagtatgtggaagctgctaaaggaactaatttattctttgctatctattgggatgaaactaaaaataaaagagtgtatgaaaccattcctttaaacattgtaattgaaagacaaaagcaaggactaagttcagtacctgaggctaatgaaaaaggtaataagctcttgtttcatctttctcctaatgatttggtatatgtgccttccgaagatgagagtactagtttaatagatttaaacaatttgagttctgaacaaatcaaaagaatttataaagttgtaagttttacaggtacacaaatgttttgcgtaatacaaaatatggcaacttcaattgtaaataaaatggagttttcatcattaaacaaaatggaacgtagtttggataatacaatgatgaaagatgtttgtgtgaagttaaaggtagatagattaggtaatatacaaaaagcttagtgttatgatcaaacgcacgctcttttttggtaacccagcctatctcagtaccaaaaacgaacaattggtagtgaactttccggaggacgaaaaacctccggctaccattcctatcgaagatttggggtttgtggtgctagaacatccacaaatcacggtaaccaacggattgctaaccaagttaatccaaaacaaaacagccgtggttacgtgcgacaaacagcatttaccttgcagtttgctgcaacccttaacaggccatagcgaacaaaccgaacgctttcggcagcaactcattgccagtgtaccgctcaaaaagaacttgtggcaacaaacggtcatggccaaaatcaacaaccaggcagcgcatttacaagagcggcaattatatgctaaaaaactgtttcgatgggctaccgaagtaaaaagtggcgatgcagccaatcatgaagccattgcggcggctttttattttcaaaacctatttgcacacgtaccggatttcagccgaaatcaaaagggcataccacctaacaacctcctcaattacggctacgctattttgcgggccgtgacagccagagccttggtaagtacgggcttgttaccctctttaggcatctttcacaaaaataaatacaatgcttttgccttagccgatgatatcatggaaccttaccgcatctatgtagatgcgttggtgtacgaaatagtgcaaagtggagaagaggtaaccgaattaaccaaatctttaaaagcagatttgttaagcatcccggccatggatgttagtatcgacggaaaaaagagtccgttaatggttgctatgagtagaacaaccaattcgttgtatgagtgttttctgggaagtagcagaaaagtgttgtatccggactatggaaattaacgaacatcaaacgtatgatacaagaacagcatttatcacgtttaaatcaatatcgttgtatgtgggtattagtgttttttgacttaccaaccgaaactaagatagatcggaaacgcgctactcggtttcgaaaagaattattagacgacggatttaatatgtttcagttttctatttacatgcgattttgtgccagtagagaaaacgcagaggttcacatcaaacgcgtaaagcgttcccttcccaaacacggtaaagtaggcgtgatgcaaataaccgacaaacaatttggaatgatagaattgtttcacggtcaaaaagaaatagctccagaaacacctaaccaacaattagaactattttaggaatataaatctgagtttgtgctaacgaagtccgctttaaacaactagattttttaatttctaatagataaggtattcatcagaataccagtctgatagcgacggtatcctgtgaatcctaaataaaaatacaattttgagagcaattcacaacttagttataatattcgacgtaagcaagaacctgtgaatcctaaataaaaatacaattttgagagcaattcacaactttaggctaagtgtaacagtgttatcttttcctgtgaatcctaaataaaaatacaattttgagagcaattcacaacactgtatgccagacggtgaaggtgaagaagcctgtgaatcctaaataaaaatacaattttgagagcaattcacaactgtacaacttaacgtaccaattcgttttttcctgtgaatcctagttaaaagtacaattattcatatcatttttattggtttttagaggaattcatgattacttcgcaattctgaaactgattttatgaggttcagcgactccaaaagagcaataaaaattggagctaaagcaattcacaaccttaagtttttatatttttgtaatgtcaggctcgcgagccgggcaaagctcagctgatggataagcaattatttatcagctgttcgatttttaatggaatttatgattacttcgcaattctgaaaccgattttatgaggttcagcgactccaaaagagcaataaaaattggagctaaagcaattcacaaccttaagttttatatttttgtaatgtcaggcttgcgagccgggcaaagctcagctgatggataagcaattatttatcagctgttcggttttaatagaatcatgattgcttcgcaattctgaaaccgattttaagaggtttatttgatttaaaaatgaaccatctaaaggtaacagtagcatattgaacaagataaaacataaaagccaattcataagaactggctattacgaggaagcttgagattgctcccgcgcttcgttgtaaaagtataaattatgatctcattatttatacttttttaaaaaaataataacattattccgtcatggtcacgtggaaggtaaacgtagcagtaacactgttcccattttccggagtgtagaccaacgcttgtttaatggtatacgtggtacctgcaagtgcgtgggtaggatattgccctacagaaaagctgagggctgcctcgtcaaattctgaaaataaaacggcgctttcgccccaaccaatgacatctccattggcatcaaaccaatgcccatacccattggcggtatattcttcagataggtttccgtcactttcctctgcatagaatacaatgttggtccctatcaaactagaaatttctgatggttgtagtacaaatgctgttgctagttgcgctgtagggatgttttgtgtaatgctggtatagttggtatcatctgcagtaagtgctatatcaaaagtgaaatcaacatcttcaggtgtttcatcaccattaaatacaacataaccgcttacgttggtgttggtaaaacttactgtgtagggccattgatcatcgttagaaggttcgtcgtcccaaggatgctcagcgtaggtagtgggagctcctgtaaccaccaaataaagatccgcggcattttcaggaacttcaaaagtagcggttgaggtgcttgtgcttccggtttgcatgtcgctatacactcgggttccgttttctaaaagtgctacaaatccataacgccaaccagctcttgaaggatcggctaccgtattgtagcctgcttcatttataagtccggtaaatgctaccgaaatggttgtattgttttccggtaaagaaagaggcactacattgtagcctgctgtttgtggtgtggtagcgtaggaagagcgtaaagttccaccttctaaggcatcaaattgatatgcaaactggtgttgatagtcttctccgtacgttctgatagcattataatctaaatcccaggtagcaaatttgctggctgcatcataaatttcgtcgttgaaagtggtattgtctatccctgttaaacgttggtatgcttcgataggatcttccggttgttgtgcttctcgccaaacctgaccgatgatttcctttccgtgaatatctgaccaataattcagtaaccagtagctggcatatcggtagtcttcatgtagcggatgcttaaagtaattagcaaaatagtcgtctagataataggtagtaaaggcttcctcctgatatgtttgaaatgattgccattgcgctgtttgttcccaaaaggtattcccgccgttacccccaaagccatatctaaatccgcttccgccacccagatcggcaaaaacctggtattgaaaagaatgacctatctcgtgtgcaatggtactaccaacaggttgacatgtactaggatttacccataaagcaccaataacatcatcgtatcctgatcctgtagcgagccattcatcttgataatatagaaagatcatcattttataggtgtctagttgagaatagcctaatccggtttgcgcaaataagagttcgtctacgttaagcgcatagaatgcttccgctttactcaaaagatcgtcgatatccactctgtacgttgcgggaatttcagcatcgtttgggtcgtttgtgccatacgctgtatcccaaaaaacaataaaatggtctgattctctactacgttcaaaagaccacgtacttgagttgttgttataatccatgtctccaaactctagaggtttgtaaatggctaattcggaaacaacaactggagtttcttcttccggtatgggatccgtatcgtcatcgcaactgaacaaattaccgatacagaaaatggctatcagtagttttataaccgctgtagccgggtgcgtgaaatggtgtttcataagttgaaagtgtttgtgatgtatgacgaatttaagccattaacagctttcaattttatagtatgttagctttttttgatgaaaaattagcgagctaaaacattttaggagttgttaaaaagctattttttaccataaaatgttgctagtgaataaatatgctatgaagcgccaaggatagaaagcaaaaactccgaccatgtcggtagtcggagtttctttaatgaagtatccccaatcgggaaatctctctacttgtttagcaactgctctaaacaagaacccacgtagtttttctttctatctatattctccacgtgagtgcttgtcaagtgatgttgagatcactttaagtacaacacaagtatcaataacacttcaaactctatcagtatgtaaatctttttgagaagcctacttttatacagtttgataaatgataaaaatactaattgaaagtgctttgaatattacctaatttttacccaatagttatgtttttgaagatttgattttgaacttaactcgcaggtaaaataaatttaatattgcagtaattttaggaatgtaaaaaagccataagagacttatggcttttattgtttttatgttgttttacagattatgctaatgcttctttcaaagcttttgcagcagcagcaggatcttcagcaccataaatagcaccaccagctacggcaactacagctccagatttcttaacgtctgcaatgctgttgatgttgacaccacctgctatagataccggtacacctgcattagttgcttcgtcaattaatacttggatagagtagccgtctttagcttgctcatctaaaccagcatgtaattctacaaactcaacacctagtttagaaacttcttgtgcacgcttcacacggtctgcaacgccaatagtatctactactacagcacggttgtattctttagcttttgctacagctccggcaatagttgcatcatccacagctcctaagatggtgatataatctgcaccagctttgaaagccatttctgcttctaaagcacctgcgtctgcagttttaaaatcagcgaaaacttttttgtctgggaaagcctctttcatagcggtaataacgcttaatccttcacttttgataaggggagtacccagttcaataatatcaatataaggagctactttagttgctaatgcaatagcatcttcggtagttaataaatcgattgctacttgtaatttagccataataatcagtgtttaaaaatgtatattcaacttaattttatcttgtatttattccatgttggcatggcgcttccataattcctctctgctaacaccagcatcttgccataagtgttgtatgatagcatcgaagatcaaaaggaacgattgctcaaacaagcttcccgcatattggtgcgatacagcttcttttaattcttgttttcctgcagcaggaatctgtactgtatgcgtagcaagttgtgctaaaggcgattcggtattggtggtaaagcaaacaatagcagcaccgcttttttgtgcagtttgggcagcttttacaatgtttcctgtggtacccgaaccagatccggcaatcaatagatcaccttcgccaatggcaggagtagtagtttcgcctaccacatgcacctgaaatcctaaatgcatcaatcgcattgcggccgcttttatcataaatccggtacggcctgcgcccaacaagaaaatactttttgcatttttgatagcattgatcacttccggaacgttgtcaaaacttagctgattgtacattaactgatgctcatctaaaatcatctctaaagcatcctgaactgcttctgctgttgtaggggtttctgtatagttcatagcatttagttgtttacagggcaaaactaggagggaatgttggcgctatttgtatacaatctgatagttgtgtggtacaatttgctcagagcgctacaacttgtggtgttatttggtagctttgtggtacattatggaaatagaggtgtttcctactgaaaaatgaatagagaaaatgacgctacagaacaaagttttatacattagaaatttagataattgtccgcctgcttatttggaagatccggcgcgaaaggagtttttcgaaatcgtatggttacgcaacgaagaggctttgcatgagcttcaacatagttttcaaactttgaaaggtgattggatatatctgattccgccgtatcgggttcatcaattgaacaaagcaggaaaaaacggagtgcttatctcttttaaacgtgaattattagaaggagatttaaaagaatttctgttagatgtgttccgaatgtttaacattcagggcgaattctcttgtttgcaggtgaatgaagaaacatctgaaagcttggcgcaggtattccaacttttgatggatgagtatgagaaagaagacatgcaattgattatgataaaagccttgttgaaagtgtttttattgaagttgattcagttaaaagaagagcattttaccaagcaagacattaatgaaaagcgcgtgtatgagtttatgctgttgttagaaaccaattatatggaagagcgtaccgcagacttttatgccggaaaattaggattgagtgccaaacgtttgaatcagattttaaaagagaaactgaacaaaacggcggtgcaattgattcatgatagggtagtgctagaggcgaaaagacaaattattcacagtgaaaacaccattaaggaaattgcgtttaatttaggctttaaagaccgctcgtatttcagcagattctttaaacaacattcagggcaaacgcctcaggaattccaaaccgatgtaaaacatcatgtagctgtacacgacaataccctcatcaattcctaaatattaacaatccgaaagcatcacagcaacggccaaaccaccttcagaagtttctttgtatttggtattcatgtctttggcggtttcccacatggtattcaccactttgtctaacggtactttggtattcaacggatcggtatctatagccaattcggctgcgttaatcgccttgatagcacccatggcatttcgctctatacaaggtacttgcacaaggccgccaataggatcgcaggtaagacctaaatggtgttccatagcaatttcggccgctactaaaacctgttcaggcgtaccgcccataagttcggtgagtgccccggcagccatggcagacgatacgccgatctcggcctggcaaccgcccatagctgcagagatggtagcaccttttttaaaaatacttccgatttctcccgcgactaaaaagaattgtctgatgtggtggaacttagctttgtgattttcaatagttaaatagtacataagtactgctggaataacgccggcacttccgttggtaggggctgtaaccactctccccaaagaagcatttacttcgtttacagaaagcgcaaaacagctcacccattttagaatctgacgaaatttaacttcggtatttctaatggcattcaaccaactttccggatctgtatatgaaacatccccgatgaggtttttgtgggtatcaaaggcacgtctgcgaacgttcaatccgcccggtaaaacaccttcggtatggcatccggtatacatacagttgagcattacatcccaaatacgttgtaatccggcgtcaatagcttctggttcgcgcagtgataattcgttttcccaaaccaattccgaaatgcttttgccctcttgtttacaagcggccaacaactccgtaccattttgtaccggatatggaaacgacttaaataaagctttgttttctttagaattactacgttcttcctttacaacgaatccgccaccaatagagtagaaggtttcttctaagaattctccggtttttaaggttgcttgaaatcgaattccattagaatgaaacggaagaaattctcggttaaaaattatatcattttcagcattaaaagcaattgtatgtgtgcctcctaaaggaagttgtttgttgttttgtatagtttcaataatggtaggaattgcttcggtaggcatggtttccggatcttgtccgcataagcctagcatggccgctatatcggtagcatgcccttttccggtaagtgataaagaaccatataataaaacctgaacactggaaactttatgaaaataatggtcttctttgagttcttctaaccaacgttctgctgctcgccagggacctaatgtatgggaactcgaaggcccaacgccaattttcaacatatcaaaaacgctaatacactccataaaattcttttgatttctgtctaatggcaaagatacatttagtttgtaattggcaaggataagtcattgtttggtttccgtgaatttattttatataacatttctgaatgggcttgtggtaatactttatttcatcttatcaaggtttatgggtttaaaattcgacagaatgaaagtaaaatcttaattttatggaaaactaatgttatggggaagattttgacattgttgtgtatgggtgttttttggatgtacgctaatccaatttttgcacaagacattcaaggagtagtcctaaatgtacttacagacaaaccagttgccgatgtgtacatattttcggaaggagataaattagttgctagcacaaatgctgatggagagtttcaactattgagtagtttaggcttaaaaaatagaagtcagcttattttttctcatgtgggatttgaagattataaagttgattttaaagatttacaggaacaaacagtaatttatttaaaacagatagaggaacaattggatgaagttaccttaaatggaaagcgaaaattacattcaagagttcagtatacagaaatagcttcactaaaagacaggttgtttgattttggggcggtgcttcaaggcaataaaatttatgtagatggaggaaatctttctaaggaaaataatgccttcataagtggagattttaataatggaaatgtaggaagtagtactacaatgcaggaacaactgcggtcggcagagataagaagttatttctttaaggaatattcagatgtgatgcatgtatatgatattgagaataattcttgggcaaccttagataaaaaatttaggaagcgggcgtatcatcaaatgttgagttacaagaataatttgtatatgcttggtggtaggttttattcaaaaaatcatcggtttgaatatttagataacatgacagaggttttcaatatagcaaaagataccgtgatacttgacaacacaaatcctcatgaagctactagatttggagctattaatttcaaaggaaattttgtgctgtttggaggttctgtaaagcaacacaaaaatgggagtgtagaatattctaaagaggttcatctttttgatgcaactagcggttattggtatgctttaaaagatatgcccgatgcaaaagaagtaaacgctgtgttggttggagataaggtgtatttaattggaggttttgacgggaaggaacttaaatcaatccaaacatttgatttaaaatctggcgagtgggcaaatgagggatctttgagaacggctatggaatatcctgcattagcagtactgggaaactccatctatatgtttgaaaatggaatattggcatcctataatataaataccaaaagtctcaaagaatattacatcaacttgcaattatatggctctcatatgtttatttataataa

SEQ ID NO: 1177 - DNA, 24437 bp, synthetic construct
  misc_feature 1..24437: note = Synthetic
  source 1..24437: mol_type = other DNA
ccgcattcaggaaatatttctggtctacatatttaaagttgcctgccagattcataatgtcgtgattgcccaaaatagtatgaacgtagccacctttcagtttagcttcttcttccagtttataaagcaaccacatcgtagcaggtacttcggttcctctgtcaaacagatctccgcaaatcaccaaatgtccgtcaccaaatgtccattcgtattttttattaatgactttgttggccagtaagagatctcttagtgcatcgaattcaccttcaatatccgagagtaccagcattttcttaggctgtgctgttacagagggctcattcgaaatattttgttttagttttacctcgaagtttttctcgggtgcatccgaaaaactgatgcgcagttttatagctttcttatttttttgaaggtaatgttcttttttctggctgccagcctcaatttgttgcacaagaatactgtcacctttataagtaacatatggaccatcggacgaattgacaggtcttttttcctgtccctgaacggagcataaactgatagaaaataataatagtagcgcagattttataggagaaaatatcatgatataatattaatctgaacaaatataagggataatggggacttgggaatggggtaccggttgctagttgttagttaagtacgaagttagaagttagaaaaaagaaattagagatctgccttaagtgatttcatctggctaatcaaaaactcccgactatatcggttttttataattaattacccggatattttatagcatccgaaagttctataggattgttgttttttcttattgtaaactgtttttgtttcgtaagctcattgaaattaggtgtaactggcttaccagattcatcaacaaatttcatttttactttaccggttttggcttctttatatggatcgttataatagtctgtatatactttatttagctgatgaattgttacaggaatactcttaattagttttggattttttccatataagtcttcagatccttttagtattttcactaaactgaattcgtaattatttttagtgtcattcagagcaacaataagtccgggaagtccattgaaaatataaggaccttcatgtacggggatatcagttgtaaaccaagctatccagtctctgcctttatatgatgttgttgctttttgacatttcatttgtccgataacttttgaatccttggatagcttccaattaaatttcggaagcttttcagaaatttcaaatagatctaataaaatattgttatatttatttacacttccagtctttaaatcttttttaacaaaaaaagcataatctctcgataccgtctttgttatcttattaagggcttcgtttgaaacaattgtagaatcacttttatataacttgtatgaataaaatacagagttatcaatattgtaatccaataccatattcttagttacaaattcagcactagtagaatctgttttatatttcatatcgtaaaaagccctgaaactttgggcaggtaaaaaaacaattgtaataaaagtcagacaaattttaattaatttcaatttcataatattttattgtggtttgttttgatggatttttcgtccaatcattccaaatacctttatatgggtcatatccacattttaaaggttttgataagggatttgaaggtgtttcaagataagctcgacaatctgtgcatatatatcggtattcacaatctttacagatttcaatactatcctttgtaatatttctaacagggtctgcttctattactgtataaagatcttcaattaaaatatcatttatatggccaatttcaagattaagcgaagggcagttttttattgttccgtttctggaaataaacaatttgtcctttaaacaattatttacattttttgatttcgagaagttttttatatcgattaaaaaataatcggtattaataatgccacatagtttttcgtcagtcagattcctctcataataaataacattaaaataaaaaggcttattgatacttttattaaatggtgaattataaaagtatagtatctgaactctgggatttttctcaatataactgattagcgcagaatttttatcttcattcatatagggtaccagaatttcaattgttctgatatttgatgatgacaataatgaaagtacttttttcaattttctgaagctataatctataaaacgtatttgtataaattcagcaccaatggattctagtttcttatatacattttctatagagaaaccctcatttcttgagtgttcaataataacctcattgatcagtttagaagattcccactgaagacttttatggtgtctatttttttcaacagatatatatccaaatttttcctctataaggaagtcaataatttctttactcttatcttcatataaaatagaaagatcatcttcaaaataagaatatacatcatttatatttattgagttcttagtatacaaatcacagagtaatatattctttgctccttttacaatctggcaatcctgatataaaataaaatatttattcatcatcaaataattttgtatctataaacggagtgcttaccttatcataaagcttcactttcagactatttgtattgtacctttttgaaaagatgtgatacttcttattgtgaggtacatttaacgataacttttttaaatgttctgtaagcttaggagttaaagtaaaatatattaagttaattctgtttttcataagattcataaagtgttttaagtgataaagcgatttctttatccaaataagtattgttaaaaacggagtggtatgtgaactgccctgtagcattaacttcaaggaaaacatgattgtcattattatcaataatcatatcaatagatgcgcagtttagatccagatgctgtaacattttttgcaacttaatttgtaccgatgttggcagagaatacacttcatatctacaatcaaaatggagggcatttaatctgtgatcaacttcatttttattttcatctataattctggtggtaaaaaatctgcctgtcaaataaaagattctaagctcaaattttttctcaactcttttctgtattagtgctggtggaaaaaaatcaggtatatgatcaatgtgtttatttacaatagacgttttcatcaagatatattttccttctatagttataggaatgcaattttcaaaaggctttgttattaaatcttttcctttatgaagttttattatttcaataagaccggattttgaagtaatgacataagaatcgggtatgagtagtccgagttctttggctattttcatctgtagtaatttgttttctgtcgaaaagaaaggacttgtcagccattttatgtttttaattttccttaattcggtaaaaaagaattgacgaaatgccgaagcttcattactataaaaactaccaaaagatttagacatttttttagttaaataatttcttgtgacttcatcgatactggacgagtattttctaaaccagactactttaaattcatgaatatcaattccttttattttgaatagattagtttgaaaatctacttctatatcattatatagctcatcattaatacgcataaaaggagtattccattttattaaccagtcgataacaagatctgtcgttgattcggcatcttttgagataattaaaatcattcagtacatttaaaattatccattaaaaactgagctccatttttacttattttatctgaaattgttaatgtaacatcgttctttttatcacactgcaatgtttttgtataatacccttttgggtacgttttttttctgcctactgaaagatctatgaatgccatgaattgcattggattatcatgataagttgtaaaagcgtataataattttttagatgtatggaaactcaccacacctgttacttctttactgtgtagtattttcttgtatttattcttgtcgtgtgcatgtacataagctccaaaaattagcattgtcatacgaagggagtcattggtgtatttataataattgccgttaaaattacttccttcatatttaaaatactgatcaccctgatataggactgtttctttcggaatagaattgtataatgcatattggctatatgaggtacagctatatacaaatagtaaaaagaatactaaggacatttgtttatacgtctttaacatatttcttataatatctttcttcatacgttggcattttttaaatcactcaatgcatttaaaattatccattaaaaatttagcaccactttctgaaatattttcagaaataacaagtgttatcttgttcttattattgcattttatggtttttataaaatcactgtcagggtattttttttggcctacggaaatatcaaagaagtgttcaaatacagtagcgttattatgataagttgtaaaggcatataataatttgttccgacttttaaaaggtattttattggttatcgatttatcagtcatcatcttcttgtattgctgcatattttgtgcataaacaaaatctccatacatgagcattgtaattttataatattcattggtataccgatagtaattaccatttgaataaaattcagatttttccgggatcgagttgtaggaagcatatttactatatgaagtacagctaacagcaaatagtaagaagaatattaaggacatatatgtatatatccttaacatagcttttgtgaatagaaaatctaataccatgggcctgtatttcccggacctgaaggatctgtaggtttgtctccgtcgtcattatcatcttcatattcactttctaatgcagcaggccttggaactgtgattacaacctctttaatcgttaaggatctgtttccgccaacgattttagaaccaaatgttttggtgaatcctcccagttgtaatttttcccgaaggttttcaattgatttgtcttttttcataaataaaatatttaaaatgatgtgccattattgacattttaaatttggtgatatttatttgtaaaaaaaagatattaacatagtttaacatttgtaatgtgctgatttgtaggtttttgtgtttttgttgttttgatgataatgctttatgaatgtgatttttatttctaaactccctattcacaaattttcaaatagttatcccttcaatttgaaataattttatcttatttttgcccgaacattcactaatacggacatttatggagttaaattataagctagaggaacaggattatttacaattgtatatgtatgctgcttctaaaaatcaggttataaagcagcagcgacaaagggtgttatggcttctgattataatctacatcgtttgttcattgcttatgtttagtatgagtatggtttctttgtttgtttttatagcagctgctattactgttacgcttatttatatatattactatgaacgtaagcgctatgaaaagttttacttaaagaatataaaaactaatcttaaaaacaggataggggttaactataaaactgtatttggccctcacgatattattctgacagagcctaatgctgaagcaaagtttaaatatcccaatatagagcttgtagaggaaattaatacctattatttctttaaaatgaaaaccggtgaaagattcattgtgcctaaaagtgctattcaggattctcaggaatttaatcagataatcagcagactgtctaaagattataatattcagttgtatcaggaactcaactggaagtggagataggaggttagttattggttgtcagttgttagttgtcagttgttagttgtcagttgttaaactgtgtaatcgtaaaatcgtgtaatcgtattacctcattcacctattgactcattgacataattataattgtaaaaccgtgtaattgtgtaactgtttaatcgttttacagtgtaaacaaattcacccattcaccaattgacccattgatatagtatagttgtaaaactgtgtaaccgtaaaatcgtgtagttgtttaactgtttaatcataaaagcaaattaacgattacacgaattaacaaattcacatattcacatatttacctgttcataaatcttattttttcttttggcttataatttgtagttgttttattttaaaataagaaatatttactttgttttaaatgattgaaataaaattatactgaaactaacttgtgagcatagtacgggttgacatctaaaagtagattcttttaatatctacaacttgtaattgttctgattaataaaacactgatgaaatctcaagatgaaaaatttaactacaacaaagggcgaagcctggcaccggaggatatattaaaggctctgctggatgcattgaaaaattacgaaacctcgggagagaagttttacgatagtgccgatctgaagcgtctgttgaatattagtgacagtacgctttaccgattgcggaaaaccaagagtattccttttatacattttggaaaaaagtacttttaccctaaatcgttttttgataagaaagccgaggggtaaattattaaattttaaacgtaaagaacacaaagtttcatttttcttttatgctgttttaagattcgccaagctgctaacgcttagcaatgggcgctaacttaactatcttaacttctaaatgttgagaataattttacctgtctgtgatctttgaattattgaatattaaccgcaaagaacgcaaagtttcattttcttttatgttgtttttaaggctcgccaagccgctaacacttagcaatgggcgctaacttaactatcttaacttctaaatgttgagaataattttacctgtctgtgatctttgaattattgaatattaaccgcaaagaacgcaaagtttcattttcttttatgttgtttttaaggctcgccaagccgctaacacttagcaatgggcgctaacttaactatcttaacttctaaatgttgagaataattttacctgtctgtgatctttgaattattgaatattaaacgcaaagaacgcaaagtttcattttcttttatgctgtttttaaggcttacgaagccgctaacgcttagcaatgttccctaaaacttaactatcttaacttctaaatgttgaagataattttacctttaggtgaaatctttgtgctctgaaagcagtgctatatcaacatcacttttgtgtctttgtggttaaccttctaatagtcctaagacttatcataacactaaggcacaagatctgtttatcagccttgttttttttaaggcacgaattgcttcgcaatactctttgtttattatattttcagcgtcagttcgagtggaattatttgacgtgaagcggagaataattgtgtatcgagaactcttttaaattattgaattttaaacgcaaagaacacaaagcttcattttcctttatactgctttaaaggttcgcgaggccgctaacgcttagcaatgttccctaaaacttaactatcttaacttctaaatgttgaagataattttatcgcaagataaaatctttgtgctctgaaagcagtgctgtatcaacatcacttttgtgtctttgtggttaaccttctaatagtcctaagacttatcataacactaaggcacaagatatgtttatctgctttgctttttaaggcacggattgcttcgcaatattcagttttctattgtgtcagtccgagtggaattattaaatcttaaacgcaaagagcgccaagcttcattttcttttctcctgttttaagattcgccaagccgctagcgcttagcaatggacactaacttaactatcttaacttctaaatgttgagaataattttacctgtctgtgatctttgaattattgaatattaaacgcaaagaacgcaaagtttcattttctttgatactgctttaaaggttcgccaagccgctagcgcttagcaatgggcactaaaaacttaatttccttaatacctaaatgttgaagataattttacctaccgttgatctttgagttattgaatattaaccgcaaagaacgcaaagtttcattttctttgatactgctttaaagatttgccaagcggctaacacttagcaatgagcgctaacttaactatcttaacttctaaatgttgagaataattttgcctgtctgtgatctttgaattattgaatcttaaacgcaaagaacgcaaagtttcattttttttatgctgtttttaaggctcaccaagccgctagagctcagcaatgacgactaaaaacttaatttccttaatacctaaatgttgaagataattttatcgcaagataaaatctttgtgctctgaaagcagcgctctatcaacatcacttttgtttctttgtggttaaccttttaattgtcctaagacttatcataacactaaggcacaagatctgtttatctgctttgctttttaaggcacgaattgcttcgcaatactttttgtttattatattttcagcgtcagttcgagtggaattattgaggtttaaacgcaaagaacacaaagcttcattttctttgatactgtttttaagattcgccaagccgctaacacttagcaatgaccactacaaattactccgtagaatcttcgacttagggttaaataacttccttccaggttacatactagtgtactttagcagcatttttgtttcactcttgttcggggtttgttcgggaatacccccgtttttaggcaacattcccgaagtatcctcgaagcatccccgaacaaagccattaaaaagcattggatttataggcagtaaaagcctttactcatggtgtttttcagtgttttcagacagaggattgtatcgtatttcagaggtttataccggtcaaaaccagtcaaatgcagtcataatcggtcaaaaccagtcacgaaaactgaaaaacaacttttgaaaacaataagtctataccttggctctgcaaccaataaattttatttattatggcaacaattagtaaaggaatccttggtggattctcaggaaaagtaggcaccgtagtgggtgttaactggagagggatggatatcatccgaagtgtaccaaagcggtcacgaaaacggccgacagataatcagatgttgcaacagtacaaatttaaactggtcgttagcttcctgcagcccctgcgcagtattcaggagttgtatttcggaagtccgcagggaagtctgtcacgggtaaacctggcaacatcggaaacgctgaatacagctttggaactggtgaacgatgtgccggaattggtattcgaaagaatactgattactaaaggcgagcttaccggatttcagaatctgaaaatcagtccggaaacggggagtatcctgaatctggaatgggaggacaacagcacacaaagcaatgctaaagaaacagatttgatgaaccttatctgttatctggaaacgcaaaatgcttttgtcatctttgaaggactggcagcccgtaagcttattaaggctactgcaaaactgccggatgtgtatcagggaaaggaggtgcatacctgggctttcctgaacaacgagaaaaaaacacaggccagtaccagtgtttacctcggcaaaattactttaacctaaacaaaagaccacccgaaagggtggttttgttttatatgtaaagaagttttgagaaaaataaaataaaaacataaaaaatcccccgtattggaagacgagggggcttgaatgttttcacaacggaataatccttattgtgaattgctttcatttacaaagctatgtaaataaaattaatttcaaatacggaaaaccgtaaaaatgaataaaaaagtctttttatatttagtgggtatttgaaatgaagacaattatggttaaaaatatacttggattagacctaggaaccaattctgttggatgggcgttgataaaacaagattttgaaaataagcagggcgatattctagggatgggaagccgtattatcccaatgtcacaagatgttctaggggattttggaaaaggtaattctatttctcaaactgctgaacgtaccaaatacagaagtgtaaggagattgcgtgagcggtttttattgcgtcgggaacgacttcaccggattctgaatgttttagattttctgcctgaacattatgcttcacaaattgattttactaagaaatttgggaagtttaaagaagaaacggaaccaaaattagcttataataatgatggttttattttcaaaaaatcatttgaagaaatgatttcggattttaaaactcatcagccagagccattagaaaataacaaaaaagttccttatgactggactatttattatctccgcaataaggcactttctcataaaattgaaaaagaagaactggcttggattcttttgaattttaatcaaaaacgtggatattatcaattgcgtggtgaagattttgaagaagagaaagataaagtgtttgtcagactgaaagtagacagagttgttgattctggagaaaatgttaaaggaaggattctttatgatgtatattttgaaaatggatggaaatatgaaaaacagattgtaaaaactgaagattggataggacgtacaaaagagttcatcgttacagaatctattctgaaaaatggtgatacaaagagaacctttaaaactgtggattctgaaaaagattggattgcaataaaagcaaagactgaacaggaaatcgacaaatctctcaaaacagttggagcatacatttacgaaacccttcttcaaaatccaaaacaaaaaataaaaggaaagctggttcgtacgattgagcggaaattttataaagcggaactaaaacaaattctggaaaaacaaaaagagtttcatccggagctaagacaagatgatttatacagtgattgtgtccgcgaactctataaaaataatgaagcccatcaactgacattgagtaaaaaagattttgtacatctttttatggaggacattattttttatcagcgaccattaagaagccagaaatcatccatttccaactgtactctggagtttagaaaatataaagacgaaaatggaacagagcatacacaatacctgaaagctattccgaaatccaatccatattatcaggaatttcgcatctggcaatggatgtataacctgaatatttacaaaaaagaggatgatacgaatgttacaaagcattttttgaacaccaaagccgattttgaaagtctgtttgaatttttaaacaatagaaaagaagttgaccaaaaagctttgctgaagcattttaagctcaatgataaaacgcatcgctggaagtatgtagaagataaaaaatatccttgcaacgaaaccaaaacgatgatttcagaaaggttaaaaaaagtagaaaatgtttctgatgatttcctaacgagagaaattgagcagaaaatctggcatattatctattctgttaatgataaagttgaatatgaaaaggcattaaaatcttttgctgagaaaaataatctggatgaaaattctttcttcgaggctttcaaaaagtttcctccttttaaaagtgaatacggtgctttttccgaaaaagctattaagaaattgttgcctttgatgaggttagggaaatattgggatgacgatgaaattctaaaatatagtgatatttattttaaaaacattgaatatttattgggtgttctcaaacaaaaagatgaaaatatttctgatgatgatcgccaaaattggaataaatcaataaacaataagttacgagaagagttagagattttccaaaatgcggaaatagaatcttttcaaggactaagattgcacattgctcagtatattctttatggaagacattcagaagcagcaatgttgggcaaatggaactccgctgacgatctggaagagtttctaaaagaatttaaacaacattcacttcgcaacccaattgtagaacaggtaattacagaaacacttcgtgtggtaaaagatatctgggtgaaatatggaaatggagctaaagatttctttaatgaaattcatattgaactgggtagagaaatgaaacttcctgctgaggatcggaagaaaatcaccaaccagatttctgaaaacgagaatacaaatctccgcatcaaggcgttattagccgagatgatggctgatagttctgttgaaaacgttcgtcctttttcacctatgcaacaagagattttgaaaatctatgaagatggtgttttaaattctgatatcgaaatcgaagatgatattctaaaaatcagtaaaacagcgcaaccttcttcatctgatttaaaaagatacaaactctggctggagcagaaatacaaatcaccttacaccggacagattataccattaaataagttatttacaccagaatatgagattgaacacattattccgcaaagccgttattttgatgatagctttaataataaagtgatttgtgaagcggcggttaataaactgaaagataattacattggacttgggtttattaagcaatttggaggaacaattgtagagtgcggaaatggaaaatcggtaacggttttaaaagaagatcaatatgaagattttgtaaagaaacattatgctaacaaccgaagtaaaagaaataaactgcttttggaagatattcctgaaaagatgattgagcggcagatgaatgatactcgctatatcagtaaatatatttcgggtgttctttccaatatagtaagaactgaagacggaacagatgatggcgtaaactctaaaaatatagtgccggggaacggaaagataacaaataccttaaaacaagactggggactgaatgatgtgtggaacgatttgattttaccacgttttgaacgaatgaatcaactgaccaattctacagattttactgcctggaatgaaaaccatcagaaatttttaccaactgttccggtagaattttcaaaaggattttcaaagaaaaggatagatcacagacaccatgccttagatgctttggtgatcgcttgtgctacaaaagaccacgtcaatttattgaacaatcaatcggctaaatcagatacgaaacgatacgatttgaaaaagaaactgatgaagtttgaaaaagtagtctacaaaaatccgcataccggtgaaaaaatagagcgtgaagttccgaaacagtttcttaagccctgggagacttttacggttgatgctaagagtcgtttggaaataataattgtgagttttaaacaaaaccttcgtgttattaataaagcgaccaactactttgaaaaatatatagaaaaagacggtgcaaaggtaaaaggaagggtagaacagaccggaacaaactgggcgataagaaaaccgatgcataaagaatttgtttatgcaaaagtaaatttaccatgggtgaaagttggtgggaaagagatattaactgcaatcagaaaaccactggatataagttttgatgagaaaaaaattagaagttcaataacagatagaggtatacaaaaaatacttttagcacatttagaaaaatataaaggtattttggatgaaacaggaaaaataattccttccgaaattttagcattcacgcctgaagctatcgaagagatgaatagaaacattattgaattaaatgatggagtatttcatcagccaatttttaaagtaagggtatttgaaaaagggacaggaaggtttccggttggacaatcaggtaataaaaaagataagtatgtagaagctgcaaaaggaactaacttatttttttcaatttatgaagataaagaaggaaaaagaagctatgaaacaattcccctgaatgaagttattgaaaggcaaaagcaaggattaaacccagtgccattagaaaacaaaaaggggcataaactattatttcatttgtcccccaatgatttagtctatatgcctgaagaaggtgaatttacagaggggatttttaattttaatgatttaaacaaggaacaagttaaaagaatttataaagttgaaaaaacttcgggttctgaatgttactttgttcgtcaagatattgcttatctaataaagcaatatgatgcgaaaactaaaatcggagaattggaaagccaaaataagcttcaagttacaatgtcagaggatagaggtaaaatcgtaaatacttgtattaaaattaattgtgataggttaggttatataaatattctaacaaaagaaaaaattaaaaaattatttgatgaatataggtaatattgccattgatacgaatgttcttttatatgcttttgataataaagacattaaaaagcaagataaggcagttgagatattgctcaatagaccatttgttacgcaattagtcctttttgaatttataaaagttctcgaaagaaaatggaaaaaagataagaaagaaattacaaaacttacagttaaaatactcaatgagttagtacttccgctttcccaacatggagatatgtataactatgcacactttttgactttaaaatataattatgggctgagtgatatttttatactttcagattccatacttaatgattgtactattttactttcagaagacatgtgtaatggaatgatcgttgataaaaaattaaaaatcataaatcctttcttatgattactcgctcagtctacattggcaatcctgcttatcttaaactcaaagacgagcagttgtatattctatgtcctgaaaccaaagaactaaaaggtaaagttccggtagaagatttagggttgctgatgctagatcattttcagattaccatatcgcatcaattgattcagaaaatgatggggaataatgtagtagtggtcagttgtgatggtcatcatttaccgcacggaatgatgttgcctttgtatggacatactgaacattcagatcgggtaaaagaccagctggaagccagtgaacctcttaaaaaacaactttggaaacaaaccgtggaatgtaaaattgaaaatcaaaaagaagtattgaggcgtttgggaaactattatgaaccaatgacagattatcaaaataatgtaaaaagcggtgatattaccaatatggaaggtattgcggctcaacattactggaaatatcttattggtaatggttttttacgggaaagatttggagattctcctaatcagttttttaattttggctatgcggttttgcgcagtatggttgccagagctattgtggagactggtttattacctgtgatgggtatttttcataaaaataaatacaatccttattgtctggcagatgatttaatggagccgtataggccgtttgtggatgtattggtgatgcaatggctccaaaccaatccggaagcagaagaactgactaaagagtttaaagcatatcttttgcaaatcgctactaaagatgtaaagattgacggaaagaccagacctttgttggtggctgtaaaaacaacagcatcgtcactatataaatgttatacaggggagaaacgtttgattgcttatcctgaactgatatgaaagccgaaaggtttaatgcttaccggattatgtgggttttagtactttatgatttaccaaccgaaacaaaggaaaatatgcgggatgctaatctatttcgtaaacgtctgttagatgatggcttttcgctttttcagttttcaatgtatatccgccactgtcccagtagagaaaacgcagaggtccacatcaaaagggtaaaagttatgctgcctaaagctggaaaagttgctattatgtgtattaccgacaaacagtttggtgatattgaaattttcttcgccagaaataaagaagaaccaccgccgacctttcaacagttggaattattctgatttttaaattctaaaaaataataaaatccgttgattatcaacggattaaattttgaggttgtgttatatcacaaagatatccaaaattgaaagcaattcacaacaatcatcattgcctcattaaaaaaggcatagttgtgttatatcacaaagatatccaaaattgaaagcaattcacaacgcaagttcttgctgggttaatttcgcatttgttgtgttatatcacaaagatatccaaaattgaaagcaattcacaacttgtagtcttctttgccattaaaaaatatagttgtgttatatcacaaagatatccaaaattgaaagcaattcacaactaaagtagtttcaccttcattaattacggggttgtgttatatcacaaagatatccaaaattgaaagcaattcacaactgcttgcttgtaatttcctcgtaaagctccgttgtgttatatcacaaagatatccaaaattgaaagcaattcacaacctggtgttgcactatcaatgcaacaagtcagttgtgttatatcacaaagatatccaaaattgaaagcaattcacaacgaacttccagaagtgacgaactatctaaatgttgtgttatatcacaaagatatccaaaattgaaagcaattcacaacctcctatatttatttttgtgtaattcatttgttgtgttatatcacaaagatatccaaaattgaaagcaattcacaactctgagacctatcatacgcaattcgccttagttgtgttatatcacaaagatatccaaaattgaaagcaattcacaacgctttgctgcgcgggatgctctcttctttggttgtgttatatcacaaagatatccaaaattgaaagcaattcacaacagcttctgattcagcttttttctgagcatcgttgtgttatatcacaaagatatccaaaattgaaagcaattcacaacaagattttaataatgacatataaattaggagttgtgttatatcacaaagatatccaaaattgaaagcaattcacaacctggtgaatctttgattattggtgattcaggttgtgttatatcacaaagatatccaaaattgaaagcaattcacaacaaactttgataaacgctgttaatttctgaagttgtgttatatcacaaagatatccaaaattgaaagcaattcacaacacaggaaatgactattttaaaaagtaatccgttgtgttatatcacaaagatatccaaaattgaaagcaattcacaacgaagcatcttaattgctatttcaagttgtagttgtgttatatcacaaagatatccaaaattgaaagcaattcacaacaaaaacagtggtgaagaaatgattaaaacggttgtgttatatcacaaagatatccaaaattgaaagcaattcacaacactgagtagggttagcaccatctgccttcggttgtgttatatcacaaagatatccaaaattgaaagcttacaataaattaaggtgtttttattgtaaattagatttacacaatgagccttttgtggttaaccctgtttagtcgataaaggtcattataaaaaacaaaacctttcaggagtactgaaaggttctttgtatggtttaggtttttaattttaatcatgcatttcgctttcgacatagccttcatcttcgatctggaaggtcgtatggctaattttgaaattactggtcgcctgatcggtgagtatccgaagcatttggttatgcggaatgctttgatcggagacaacatgggcgctcatcgcattgataccagaggttagcgaccatacatggaggtcgtgcaggcttttaacacccggaactttttccatggtactgcgcagttcatcaatatctacatctttaggagtaccttccaataatacatgaatagcttccatcagaagtcgccatgttcttgggaagatcagtaaaccaatacctgcagagatcagtggatcggcgtagtaccagcctgtggtcagcataaccactccggcaatcattactccgacagaggtcagcatatccgataatacttcaaagtaggcacccttcatattcagactgtcaccagagctttttctaaggatcatcatcccggcaatattcactaaaagtccgattccggctacgataagcatagctttgctctgtacctccggtgggttcaggaagcgctggtaagcttcgtaaagcacataaacggaaattcctaaaaggactacagcgttgattactgcggctaatatctcggtacggtaatagccgaatgttttggaggatgtcgcttttcgttcaccaatccggatggcaatataagcgagcaacaggcctacgacatcggtaagcatgtgcgctgcatcggctaacagggccaaactattggtgataattccaccaatgacttcagcgataaggtaaaggccgctgaaggaaagtacaatcagtaagttctttttgtgcttactggaggctgaggctgtttgtatatttgtttcactcatgatgtttggtattacatttcgtagtataaaggatttctcttcttctgcggtacattttgctcaccagtcatttcccgcaggttgatttctatagtctgtgccagggaagtcatcggggtgtctactggggtgttttcaaacggatcctgcatgataatagctgttttttcaatcgcgataaagagggtagggatcaggatggtgattccaatttctatgattaacaaagaaagctgagaatcgtcgaatccaaatggcagaatggcagcaaatacatagatgagactatgtaccaaaatgctgtaagaacgtggaaatacggtatttttgattctttcacattttcccatgctgtcgcataaacgtgctaatgtttcattcaactgtatgagtctgaactcactgataagccctttgtccgccaattgctttagctgcaaagaatgttcatccagtaatgcattgggaatattagtggcttctattctgtgatcgataagataatcctgaacacgatccgagaaagggagctttctgagggattccccaagagcatagttccagataatctgacgctgtgcaaattcctgaataatagtttcgcttcctaaaggaagtgcctgggtaatctgacggataaatgtgcgggaatcgttgacaatagcgccccatatcatacgggcttcccaccatctttcataggattgtgaaatccggaaggccagcagtagagatacagctgtacctaccaatgcaggaatggtaagaggaagtgaaattttctgaaaagcaggaagcaaatctaaaataccaatagcgactgcaaacatagagatcagtaataactgggatttaattaaattaatgaaataccagatggatattttcttttttagcagcatagtgtgttgtgttatggtttgcgatgtataaaataaaaaggtgttttttgttataaaaatgtcagcccgggtgtttaatggaaatgacgataaatgacaattaaagcgtaataattaataataaacaatataaattaaacttctgaaaccatattcaattataaaaatgattcaaagtattacactggtttacccggactgacgtgtttacattagtgtgtgtttttgggttaatgtaaatttattttaatgttcgtgctcaccaacattggtaagcttagcattgacaaagaaggctccttttacgacaattttagcatcaggtgcaagctgccctacaggcgttattgctgtatagcccatgtcagatgttccttttataacctctactttttcgaagttgacggttcttgcatgtgattgctcagcaggagcagtttcttttttatcttttgattctgcttcctcatgtgcttccggttttttgtctgtttgtataaagacatagaatttaccatcagcctctacaatcgcttcggttggaatagcaggtgtagtactgtgatccaggctcactactccggtaatattcatcccgtcgataagcccggtcttgttaccgattacagtacagtgtaccgcaattgttttgctttcgttctcaaaggaagatccaatgctgtataccttagcatcatattctgtttcaggattattagtaagtttgaaatgtacaatctgaccaatacgcattcttggcaggtctttttcaaatacctgtaaatccaggtggagcgaagtgttgtctataatttcggctacgggagcggatacatctacatagctgccaatctgcgctctgatattgctaattgtcccgctgatcggagcggtaatagccaaacctgttctcatggttgcattggtaacagaagccggattaatacccatcatttgtagttgtcgggctaaagaagccttttgggtagacaatgttctgagttcggaagaagaactctgaaggttctttttggttcccgcgtcgtttttatacaactcgttctgtcttttaaattcctgttcggcaaaagcaattctactgatagtagtaagatactgctcctgtacgcggatgtattccgggttggcaatggtggcaataacctgacctttgcgaacatagtcaccttccagaatattaagtgtttttacgactccgctgaaaagagcagctacagtagctttattgttattgggaacacgaagcagaccattggcttttacagtagccgttagttccttcatttctattggacctgtagtaacgccgactgactgtatctggtcttcggtaagactggcaatagtaggagctgcctcttcatggtctttagctttagccgtctgttcggttttactctcgggagcggcttcttttttgccacagctggtgaagattaaagaagcggttatcaggtagattatggtttgtttcagtttcattttattgattaattatagaattaataataaccacagattggtttacttgctgtatggattccagatatttcagctggatattggttgatgtctgcagagcgaaaagatattctacataagaaatatctccggtgcggtaaccgagttgtgcggctttagcaattttttcggcattaggaatggcctgttgtacataataattgtactggtccacgtcctgtcggtattggcgcatagcagtatcaaactgtgtggtcagctgttgctgttgcaatttggcattgttttctgcagcctgtctttggtattccagtgattgtattctggctttggttgcgccaaaagtaagcggaatgcttacaccaacgtttaccgaattaaaacggttccagccattgtagtatttttcaccaccattattggttgggtgcatacccgtaagggactggctggtcacgcctaatgtaaattccggtaagccctgagctttttctatttttttgtttttctcagcaatttccatttcctgataaaaagctcttaccgatggattattggcaattacactactgtctagtacatagtctatttttaaagggagatactcctctttaggagctacttctatagattctgaagtgttcagtaaggttttcagattcttgtaagcattgtccagatagacctggttctgtttaagcaataagttaatttctcctttttgggtttctgcagtactgatttcaatcttcttgatatcgccggcattataccttacagttgcaatacggatgaaatcctgatagagattgtccagactctccagtttggttttgttaaactgaaggtattcaatctggtaataataggatcttacttgtctcaacaattcatttatagagacttctttctcaatctgtctgcttttgatgttggattctatcagctcctttctcgccttgaagattgtagggaagggtacagtctgagagatcgcaaatgaattatcgaatttcggactattgtattgtcccagttgtgcagatacacttagttgtggaagttctttggctgtaggtcttagtgctttggaagtcataatattcagatctttggacttcatcaacaggttgttttcaacagccatttgggtggcctgctgaatatcgatggttctggtctgggctttcaggccttgccctgccaatcctgataacatgatgaatagtacaactacagtagtcttagttttcatctttagaatacggccttttactttttcactgaaaataatatataacatagggagtacaaatagggtaaggaaggttgctgtaatcagtccgccgataactacagtggccagtggtttttgtacttcagcacctgctcctgtagatatagccattggtaaaaaaccgatagaagccacggtagcggtcatcagaaccggacgcaatctggttttggttccttcaataactcttttcagaacatcggtttcgccttcttttttcagctgattaaaggtgcctataagaacaataccattaagaaccgcaacaccaaacaaggcaataaatccgattccggcactgatgctgaaaggcattccccggaccagaagggcaaatacaccaccaatagcactcatcgggatcgctgtaaatattaaagcagcctgtttgaaagagtggaaggtgaagtataacagcataaaaattaaaagtaatgagatgggtacagcaatcataagccggtcgctggcttctttaaggttctcgaactgacctccgtaggtaaagtaataaccggaaggcagttttatttctttatcgagtttttgctgaatatcttttaccacgctggcaacgtctcgaccgctgacattaaatccgattacaattcttcgttttccgtcttcacggcttatctgagctgcacctaatttgtaatcgatgttggccacctgtgaaagcggaatttgtaaaccggattttgtagagatcatcaggttgttgacatcgtctatattagtacggcgaaggctgtccaaacgtacaacaagatcgaatcgtctctcgttttcgtagacctgtccggcagctttaccggcaaaggcagtactgaggacatcgttgacatcctgaatgctgagtccgtagttggccatacgggtacggtcatattgtacattgatctgtgggagaccgcttactctttcaatttgcggcgcagtagctccgggaacagtctgaataactttgcctactttatcggcatatacagcaagggaatccaggttttcaccaaatatcttgaccgctacatcctgacggatacctgtcatgagttcgttgaaacgcatttggataggttggtttttttcaaagaatacacccggaatagtttccagtttctcactgatctcatcagccagttcatcataagactttttggttttccattcgctttggggtttcaggaccacaatcatatctgtggcttcaggcggcatggggtcggtaggtacttcggcagcaccggtttttccgactaccatttttacttcatcgaaacttttgatgattcgcgatgcctgcatagaggtttcgatactctggctgagtgaacttccctgcggaagaatacagtggtaagcaaagtcgccttcctgcagctgaggtataaactcgccacccatatttttaaagatgataagtgtaccaaagaatataaaagctgtacctgctaccagccagtattttattttaattgctttcaatagtaaaggctgataaatactttgtagtttattcatcatcttatccgagaaagtttctttatgggaaatcttcttagacaggaacaaagcactcatcatcgggatatatgtcaaagagaggattaatgcacccagaatagcaaaacctactgttttggccattggtgtaaacattttaccttccacacctgcaagggtaagaattgggatatatacgataaggataataatctcgccaaaggcagcactgcttctgatcttggaagccgaaaggaatacctcttcgtccatttctttttgggtaagcctgttgacagactttctgagaccgaggtggtggagtgtagcctctacaataataacggcaccatctacaataagaccaaagtctatcgctccaaggctcatcaggttggcgctaacgccaaaaacattcatcattcctaaagcaaacaacagagacaacggaatagcagaagctacaataaggccggctctgaggtttccaaggaatacaaccagtacgaaaattacaataagagctccttcaataagattcttctccacagtgcctattgctctttctaccagatctgtacgatccaggaatggttctataactacgtcatccggaagagacttctgaatggtcgggattttag

SEQ ID NO: 1178 - DNA, 24437 bp, synthetic construct
  misc_feature 1..24437: note = Synthetic
  source 1..24437: mol_type = other DNA
acgaagcatcggctatcgctctggtaaacggagcatatcagccgcttcaacgtccgaagctgtacaatatgcgtatctggacattggatattattgccggtaatagcgaagtaggtgccggaggcggtacggacggaatagaaaccgttacacttgccaattttgtggctacggccgacaatgctgctgcattggatatctggcgtggacctaacccgggcattctgtattgcaataccgttttggagagtgtgccatccatgaatatcagccagtcgttgaaagacagatgtatcggcgaagcgaaatttctgcgtgcgcactattatttcctgctggtgcagctattcggcgatgttccgatagcagtcgaaacgcctaagccgggcgataacctgcatgtttcccgcgaggataaaatgactatctacaacgatataatcatccccgacctgaaagatgcaatagacctgttgccggtgagagaggaatactcgggcaacaatatcggtcgcgcatcgaaaggttcggctgccggaatgctggctaaggtttatctgacattgggcaggcatcaggatgcactggatatgtgcgaaatggttgagacattgggttatgttttgaaccccgattacagcgactgtttcggaggagaggacagaaataagaatacagcagaatcgctgttcgagatacaatactatggcttgaccaaagccggattctgggacgatgaaaatcaggcttgctggttgagtacctatatggggcctcgcaataccggatgggtagggggcgcttatggatggaatcaaccgacgcaggagtttgtcgaccaatacgagccgggagacttgcgcaaggacaagaccgttctctacgaaggttgccctgcattcgatggcaaaacctacagatcgactatgtctaatacgggctacaatgtgcgcaaattcttggtgccgctgaccgtttcgccggattacaatacaaactcggcgagcgtgattgtcctgcgttttgcggatgtattgctgatgaaggccgaagcgttgaacgaactgggaaggacaaccgatgccgaagagccgctgtatcaggtaaggaaaagagctggattgacagttcgcgccgatgtcgaaggattgaccgacgaccagatgcgcgaaaaaatcagacaggaacgccgcatcgaacttgcattcgaagggcatcgctggttcgatatggtacgctgggataacgggcaatatgcgttagactttttgcacggtatcgggaaaataaatgcgacgagaaaacatctcctgttccctatcccacagaaagagagagatgctaatccaaacttatcacaaaacacaggatattaaatctaaaaaacagcacattatgaaatcatataaattattaccattcctgttggctctttgcctgacatttttcacgggatgctcggatgacgataatatagagtataacaaaggaaatgctccgttggaaataacagcttccggcgagcagatcgaactggatgacgaaaaccccgaagtggatgccctgaaatttacgtggacttccggctctaaccaagggacggatgcagctatcacttacactttccagatggacatacaaggcaatgattttgccggaggaatatccatcgatttagggcgtgaagtatatgagaagatatacaaaaatgaggaactgaacgatatcctcctcaacgaattcggcatagccatcgatacggacgttacgttggaaagccgcataatagcgactgttgccgacgacaacgttgcgcctgtcatatctaacattcaaacgataacagtgaaaacgcacaagccgataacaaagactttgtatctgattggcgatgctacgcctaacggatggagcgccggcgatgctactccgctgaaggcgataaccaatgttgccaaaggcttttcgtggacaggaaacctttcgccgggtgaatttaagtttattactaccttgggtgagtttactccgtcgtataacaagggtgcagatgatacaaaactgtatctgcgcgaaagcggttcagatccgtatgacgataagttccagattacgcagggtggaacttataccatcaaagtgaatctgataaccatgcttattaccattacaagaggcgaaggccctgaatataccgaattgtggcttgtcgggaatcctacgggatggtcgtttgagccgatgactgtcaatccgctcgatccgtttgtgttccattacaatggcgatcttgctgcgggtggagagttcaaaatcggtacggttgccggagactggaatgccgctttctatcgtccggaagtcgatcagacagcagagggaatgaatctggatgtggacaagtgggccggaaatcctgataacaaatggaatatcacaggcggagtgtataaaatcaagctcgacacacgcgatatgaaaattgatattgcgccgttcacgccttatgcgatggtgtatcttgtcggtgatgccacgcctaacggatgggatatagataatgctacgccgatgacagcaacttcggatccgaataaattcacttggacgggtaacctgagcgcgggcgaaatgaagttcaccttagataagcaaagcgattggaacggagcatggtttattgcctccgaagccgataaagcccctgccggaacggaagaacagatgatattcaactatccgggcgccggagtggattataagtggaaaataacagctgccggaacgtataccatcgaactggatcaattgaacgaaacggtgagtatcgtaaaacaataaaactaaatatattcactgtgccggttgcggccggtacagtggatgctctaaaagaataacattatgaaaaaaagaataacatatatcgtagccgccctttcgctgcttttgtttgctgcgtgcgacgatttttacgatacaaagcataatcctgtgacctatggcgatagctatatgagtatcaacataagtacggataaggcagtttacagtccgggtgaaacggtgcagttcgcgctaaaagaaacacccaatacgaacctcacagtccgctattctcatctggggcaggtgctgaaagaggaatcactctccggcgacgcttggagctggacggttcctgccgacgattacaaaggttatatggtcgatgtatatggaacagtggaaggcgccgaaaaggtatactacagcatagccgtagacgtatcttccgactggaagaaattcccgcgctatggcttcctctcctcttacggcaaactgtcggagaagcagatatcggataacatagctacgctgaaccgttaccatatcaacgggatacaattctacgactggatgtatgatcatcaacgccctttagccggaacggcagataatccgctggcatcgtggtctgatcttatcgggcggatgaactataaatcgaccgtagaaggatatattgctgctgctcacggcagaggaatgaaagcgatgttttataaccttgccttcggtgcgttgaagaatgccgcctccgacggggtgaaagaagaatggtacctctttaaagacaccaatcacgacgaaaaagacaatcatcacctcgatgcacctttccgcagcagtatttacctgaccaatcccgctaataccgagtggcaggaatacattgccggacgccacaaggatgtgtacgaagtctttgatttcgatggctaccatatcgaccaattaggaaaccgcggaacactatacgattacaatggtactgttgtgaatctgcctgcagcttatccgtcttttattgcggcgatgaaacaggcaagccccgacaaacgtttggtgatgaatgctgtcagccagtacgggcaggcagggatagccgcttcggatgtcgattttctctataccgaagtctgggacgaaagcaaaacattcgagcaattatcgcaggtcattttggataacaatgcatacagcagccgtacgaaaaataccgttctcgctgcttatatgaactatggcagatcaaattccgccggatatatgaatgctcccggggtgctgctggcgaatgctgttattttctctttcggagggtcgcacctcgagttgggagagcattatctggcgaacgagtatttccctaattcgaacctgcaaatgaaaggcggattgagaacagcgcttgtgcattattatgactttctggtggcgtatcagaatctgttgcgcgatggcggagcgtttgctaataatgcagtgcaatctgtcgatgggcaactgtcgttcagcaactggcctgctgcacagggagacgtggctgtcgtaggcaagcaattcatagggaaagagctgattcatctgattaatttttccgatgctaacagtatggattggagagacacgaacggaacacaaaaagaaccgctgctggtaacgaatgccgaaattaaaatcgcagtgaatggtacggcaaacaaagtttggtttgcatcgcctgacgtgaacggtggagttgcacaggatgtacaattcactcagtcgggcaatgagttgacgttcacccttccgtcgctgaaatattgggatatggtagtaatagaatattaaggttagaggttatgataaagaaaatcttattggttatttcagggttaatactttcttcggcaatagcgattgccggagaatgtatttcgtatgagaagaaaggaaatcaggtgatattcaactgtaaagacggttcgcgattatcactgacaatcaatagcagctcggttgttaaagtatggttcgatcaatcagggaagttcgtccgcaacaacgaatcgttcgcggtcgtgaatgaacaattggaagatgtaggcgaaatcaatgtgaacgaagagcccgcttgctacgagatatttacgtcgaaactgcgcatccgggtaaacaaaaatccgatgcagttgcagatattcgacaagtggcagaagttagtcttcagcgattttcaggaaaaaggacacgtttccgacgctactgcggtaaaggctcataaagtattacgcagcgatgagcaattcttcgggctgggcgaaaaaacaggaccattgaaccgtcgcggacgttcgtacaaaatgtggaacagcgaccgcccttgttacagcgtgaccgaagatccgctggcaaaaagtattccgttttttatgagtagttatcgctacggaatatttctggacaatacgtacaaaaccgaattcaaattcgggacggagtcggatgaatattattcgttcgaagcgcctgacggggcgtttgtttactatttcattttcggaaaagattacaaagaaatacaagaacaatatattgccttgacagggaaaccgataatgcctcctaaatgggcattaggatttgcccagtgtcgcgggttgtataccaaagagatacaagcattagagattgctgccgaattccgtaagcggcagataccgtgtgatattatttatcaggacatcggctggacacagaatttgcaggatttcacctggcgaaagggaaactatacgaacccacaaggaatgctgcaaactttgaagaagcaaggttttaaaatgatagtgtcgcaggatccggttgtttcgcaacgcgaaaacccgcaatgggtggaagcggacaagctgggctatttggtgaaagacatccgcaacggtaaatcgtacgatatgccttggccgtggggaggtaactgtggcgtggtagacttcaccatccccgaagtggctgactggtggggcaagtatcagcaaaagccgatagacgacggcataagcggattctggacggatatgggcgaaccggcatggagtaacgaagaggatgttgatcgcttgtacatgaaacaccacatcggtatgcacgacgagatacacaatgtatatggattgacgtgggataaggttgtgaaagagcagttcgaaaaacgcaaccccaatcgccgtatattccagatgacacgctcggcttatgcaggtcttcaacgctataccttcggttggacgaacgatagtggtaacggcaacgacgtcctggaaggatggggacaattagaaaatcaggtagctgtcggcatttctgccggattgggtggaatccctttctggacaaccgatatatcgggctattgcggagatataaccgactatcctgctatggcggaactatatacccgttggatgcagttcggtattttctgcccgttgagtcgtgcgcatcacgaaggcgataatgcggcagagccttggatgttcggcgaagtagccgagaagaacagcaaagcagctatcgaactgaaataccagttatttccttatctctacacctattcgcgcaaagcacacgatacgggattgcctattacacgcggcttgtttatggaatatccgaacgatgaacaggctatcaaagtggataatcaatttatcttcggcgaagagatattggttgctccagtactgaaaaaaggagaacgcgtgaaacgtgtctatctgcctgatggtgaatggatagactttaatgataagaaaacggtttatctgggcggccagatggtcgcttatcgcgcgccgctgggtgttatcccgatttttgtaaagaaaggttctatcatcccgatgatgcctgtgatgcagtatatacatgagaaaaaggattatccgttgttcatccatattttcccgaactatgaggacgaaagtgcaacattcgaattgtatgaggatgagggcgagaatctcgattatctgaaagatatttattccaagactgacttctcgtgtacgacgttggcggaaggctacaatactgtaattacgccgaaagacaaaggctttgtgcaatccgaaaagcggaatattgtcctcaaatatcatctggaagaaaaaccgtcgggtgtatcggtagacggtaaatccatcaaacaagtagaggaacgggctattgccgataaactggataatgtatcttcggtggaatggtcgtggaatgaggctacattggagtgttgggtgaaattcccggacaaaaggaaaggggtagaagtcatcgtcaaaaaataatgtgaatcactggtacaattatacttataagtttatcaatgttatgatagttacgagttactttgtgcttcgcacagttacaagttacaagaaaaaaagtaactcgtcaaaaacatcgaaaatgagtagaggtatgttactttttcggaaaagcgttctttaaagaacttagtgaacttggtgtagaaccttcgtgtcctctgtggttaaataataaaaagtaacccaacaaaaaatacagaattatttgtaccggttttaaaatataagatgttggtaattagtttgttttatttggatttgctcgaaaaaaagtaactaaaagtggtacaggaaagcgacactttagaggctttttagggtaggaagctaattagtgattcgcatacataacagctttgtgaaaaataatatatttaaaagaatgaaaaaattaatctttctattgtgcttattcgtttcaataagtatgatacatgctcaggaactaaaatcgcccgatggcaacctgtcgatgaccttctccctcgaaaaaggaggagtgccggcttatcggttggcctataaaggcaaacaaataataaaaccgagtaaactcggactggaactgattggcaatacgaccaaagtagaatttggcgcggaaatggatataaaatcggaggataaagaccccaaaaactcgctttacgacaacttccgtatcgtagataccagaacgtcctctttcgacgaaacatggcagcctgtttggggcgaaacaaaagatatccgcaaccgttacaacgaattagccgtaacgctgaatcaggaaggaacggacaggcagatgcttatccgcttccggctgttcgacgatggactgggattccgttatgaatttccacaacaaaagaacctgatttatttcgttatcaaagaggagcgtacgcagttcgccatgaccggcgaccatacggcttactggattccgggcgattatgatacgcaggaatatgattataccatgtcgcgtttgtccgaaatcagcggactgatgaaaggcgctattacgcccaatgcttcgcagacagtattttccccaacaggggtacagacatcgctgatgatgaaaaccgatgagggtatatacatcaatctgcacgaagcggctttgattaactactcttgtatgcacttgaatctggatgataagaattttgtcttcgaatcgtggctgacacccgatgctaacgggacgaaagggcatctgcaagcgccctgcaatacgccttggcgaactatcctcgtgagcgacgatgcgcgcgatatactggcgtctaacgtgacgctgaatctgaatgagccttgcaaaatagaagatacatcgtggattaagccggtgaaatatgtaggtgtttggtgggaaatgattaccgggaaaagcgaatggtcgtatacgtacgacttgccgagtgtacaactgggtgtgaccgattattcgaaagtgaagcctcacggccgacatggtgcaactaccgaaaatgtgaaacgctacatcgactttgctgccgaacacggcttcgatgctgtgttggttgagggatggaatatcggttgggaagattggtttggcaattcgaaagactatgttttcgatttcctgacaccttatcctgacttcgacctgaaaggtatcagagattatgctaagagcaaaggtgtgaaaatgatgatgcatcacgaaacatcgggtgctatccgtaattacgaacgtcatttggaggcagcatatgcctttatgaacgaaaatggatatacctcggtgaagtcaggctatgtaggcaatatgattccccgcggagaataccattacagtcaatggctgaataaccactatcagtatgcgatagagaaagcagccgaacataaaatcatggtgaatgcgcacgaagctacccgcccgaccgggctttgccgtacatggcctaacctgatagggaacgaatctgcccgtggaacagaataccaagcctttggaggcagcaagcccaatcatgcagccatccttccgtttacgcgcctgataggagggccgatggattatacgccgggtatttttgagatggatatcgagaaaatcaaccccaacaatacatcgcatgtcaatactacccttgccaaccaattggcgctgtatgtgaccatgtatagccctttgcagatggcggcggatttccccgagcattacgaacgcctttcggacgctttccagtttattaaggatgtagccgtagattgggacgaaagcaactatctcgaagccgagccgggcgaatatgtgactgttgcccgtaaagcaaaagggacagataattggtttgtaggaaatgtttgtggcgagaagggttttacttccaatatccaattcgatttcctcgaaccgggaaaacaatacatcgcgactatctattccgatgccaagaatgcccactacaaaacgaatcctcaagcctatgagatacgtaaagtagttgttaccagtaagtctaaattgaaacaatattcggctccgggcggagggtatgccatcagtatctttcccgtagcaagtaaggaacagattaaaggattgaaaaagttatagcaggtattcaccgaagaataagaaaagagcttgtaattgtgtagattatgagctcttttaaaaaagaagaagacggaaatcgctttccgccgccttatttgttttcacaacggaataatccttattgtgattagctttcgttaacaaatatagatcaaatagcattaaaatccaaatattctttttaaattaggcaaaatatttttagaccttaattatgaaaaagaacgtattgggattagacctgggaccaaactctatcggatgggctttagtagaatacattaaaaatcttgaaacagaagggttttctccttccggaatcgtaggcttaggtagccgtataatacctatggacgctgcaatgttgagcgacttcgacaatggaaacctgaaaacgcaaacagcagaacgaacaagatatcgtggtgtccgccgccttcacgaacgctatttattgcgaagagagcgccttcatagggtattgaacatcatcggtttcttgccggagcattatgctaagtatattgatttcgggaaaaagcccgggaagttcctgcttgattcggagcctaaaatggcttattcgctgaatgaagaaacaggcaaatatgacttctgtttcaaggagtcgtttgccgaaatgatacaggactttcttgaaaagcagcctgaccttgtaaaggacggaaagaaagtgccttatgactggactatctattatctacggaagaaagcattgacggagaaaatagcaaaggaagagctggcatggctgattctgcattttaatcaaaagagaggctactatcagcaacgaggcgaagaggaagatataaacataaatgagacgaaagagtatcagaaattgcaggttgtgagtgtcgaggattccggcgatagaaaaggagatgctatatggtataacgtgctgctggagaatggcgatgtttataaacgacagagcaaaattccgctcgattgggtgggtaagacaaaagagtttatcgtcacaacgaagcttgataaagacaacaacgagaagcgctcgtacagtatccctactgccgacgactggacgttggtaaaaaaacgtaccgagaaagaaatcgacgaatcgcataagtcggtgggtacttttatctatgataggttactgtctgatccgaatcagaagataaaaggaaaactcatccagacgatagagcgtaagttctaccgtaaggagcttaaccagatattgaagaaacagagagaatttcatcccgaactgaataatcccgagctatacacgctttgcatcaaggatttgtaccggagcaacgaggcatatcgcaacagtattcagaacaaggattttgtatatctctttatcgacgatattatattctatcaacgtccgttgaaaagtaagaagtcgctgatagaggattgccagtatgaatacagaacctataaacatcctgcgacagggatagtagaaaaggtatatctgaaatgtatatcccggtcgcatccgctgttcgaagagttcaggttgtggcagttcctgaagaatgtaaagattattgcgaagggtgatacctcggatgtgactgctctctatcttcctgacgaagaggcctatgttgctttgtttgaccgattgaaagaaaagaaagaggtcacacgtaagtcgttcctgtcatccatcaaaggtgccaagctcaaagaggatgcttacgaatggaattatggcgaccgttcgttgcctatgtgcccaacacatgccgagtttgtcagccgcctgaaacaagtgggattggatgatagcttccttacggcggaggtcgaagaacacttgtggcatatcctgtactccgtaagtgacaagggcgaattggtgcaggcattgaagtcgtttgctgtcagatatgaaatagctaacgtagaagactttgttgccgagtttaagaaggttaaacctttcgataaggcatatgcttcctattcgtccaaagctatgaagaagctcctcccgctgatgcggatgggaaaatattgggataagaatgcatttgacgcaaagacaaaagaacgcatcgacaggcttattgatggcgaagactgcgaagcgataagtgaaggtgtcagggaaaaggtggcaaaggaattaggtcaggatttgaatatctccctattcagcggattgccgctttggctggcctgctatgtggtatataaccgtcactccgaagccagcgaaactgcccggtggcagtcgccgaaagatatagatgatttcttgaaagacttcaggcaacattcgcttcgcaacccggtggtagagcaaattgtgaccgaaacattgcgtgtcgttcgtgatgtttgggagaaatatggcgatttatcggaaatccatctcgaattagctcgggaaatgaaaagtcccgccaataaacggcaggagataacccgcaagaatcaggagaacgaaaatacgaacatgcgtataagggcattgttgacagagatgaggaatgaaggaaaagatgtccgtcccgattcattgtcgcaacaagaacggctcaaaatctatgaggaaggagttcttggctcagctatcgaaatcccggaagatattatcaagattacgcgccagaaacagcctacacaatccgaaatcatccgttataaatgctggctggaacagggatattgttcgccttacaccggaaagcctattccgctgggacggctctttacaagtgaatatgatatagaacatgtcattccgcaggctcgctattacgacgattcgttcactaataaaataatttgcgaaagtgctgtcaaccgggataaaggtaatctgctggcatgtgaatatatcagacaaaaaggcggtacatgggttgacttgggtaatggagataaaagggaagtcttgcgatacgaagcttatgaggactttgttaagcgcaatttcaagaactcgccattgaaaaagaaaaagttgctgatggacgaaattcctgatagtttcattgataggcagatgaacgacacccgctatatcagccgatatgtgaaaggcttattgtcgaatattgtaagggaagagaacgaacaggaagcaacatcgaaaaacctaattcccgttacaggggcaataacagccaaactgaaagaagattggggattgaatgatgtttggaataaaataataacccctcgtttcgagcggcttaatgagctgacaaaatcaaacagttatggatattgggtagatagacaaacattcaaaatacaggtgccggaagaaaatcaacgaggattcagtaagaaacgtatcgaccatcgacatcatgcgatggatgcccttgtcatagcttgcacaacccgttcgcatgtcaattatctgaataatcagtctgcaaaagagggagattcccaaaagagagaaagagagaaaaaagaactgtttattgagaaaaatagagggaagaaactgcttcgcaagccatgggatacctttacggaggacacacagaaagctatgggcgatatcattatcagtttcaaacagaacttgcgtgtgattaataaatcgaccaataagtatcagaaatacgaaggaggtacgaagaaattggttcatcaggtaggcggtgacaattgggctattcgcaagcctttgcataaagaaactgtctatggccgggtaaatctgcaattgaaaagaacagtaactctttctgtggcattggacaactggcaaatgattgtcgatagggaagtccgtgataagataaagcaattggttagcgaaaagtttgataaaaagcaaatcttagcctatttcaaaaaactggataatcgttatgcacggaaggatatatccaagctcgaagtgtattattatagcgacgagaaagaaccgttggtcgctacccgcaaagctctggacagcacctttacgcttaaaaatataaattcggtaacagatacaggcatccggcagatattgcttcgccatctcgaaaaatacggaggtgataccgaaaatgctttctctcccgaagggcttgaggatatgaataaacatatccggacgctaaataatgggaagtaccataagccaatttataaggttcgggtatccgaagcgcttggaagcaaattcaatgtcggcgaacggggaaacaaaaaggcgaagtatgtcgttgcagccaaaggtacaaatctcttctttgctatttatcaatcaaaagatagtagtaagcgaagttttgaaacgattccgttagagatcgttatagataatcttaaacgaggagagagcgctgttcctactacaaataatgatggagataaattgttatttaccctttctcctaatgatttggtatatgtgccaaccgaggatcaactggagcggggaaatatagatataaaagatgtagcagggaacaagagcaggatatataaagttgtgagctgtacaggaaatgaagtacattttattccttattctattgcatggcctattattcaagtaacagagttaggggcaaataataaggctcaacgagcttggtcaggcgaaatgataaaggaaacttgtttaaaaatagaaatagatagattaggagaaataaagcaaatcaagtagagcacataagctaatcacaactgacttcatattaatattctttatgaaagtaatactcagttatattttgctctactcaatttgctaaatctactaactcccctaatgaggaggagatagttcttacatagtctattaatgaatagtacaaatgtaatgaataatgattacttatttgtttgagtaattattatatttacaaatataagttattatataatatgaagtcataaaagattattgttaaattgttaaaaaaataaaaattattacattttcaaaaaagcgatcatgttttaagtgtaaatattctgattattaaataattatatgaagttatgatcaaaaagaccctatatttcggaaacccggcctaccttagcatggcaaataagcagatgatagtgaaattgccggaagtagaaaatgcagatgttccggagtcatttaaagaacgctctaaagcgagtattccgatagaagatatcggggtcgttattttggacaataaacggataacgattacacacggactgatagaagaattattggataataatgtagcccttgtaacttgcgattcctcgcgaatgcctgtcgggttaatgctccctctttgcggacattcaacgcaaacagagcattttcgtgagcaaatcgaggctacccagccactcaagaagcagctttggcaacaaacagtcaaagcgaagataaaaaatcaggcaacccttctcgaatctacgcgaaatgtagatgctacgccgatgtttaaatgggttgatgatgtaaagagcggagatcctgataattacgaggcacaggctgccgcctatttctggatgaatatctttcctgatattccggacttccgtcgtcacagggaaggagttcctcccaataatttgttgaattatggttatgctattttgcgtgcagttatagcccgtgctattgtttcggctggcatgttgccgtctttgggtatttttcatcggaataaatacaatgcctattgtttggccgatgacattatggaaccttatcgtccggtggtagataaggttgtaattgatattgttgcttctggggttgatatctccgacttggatattgaactaaagcaaacacttttatctatcccgggacatgatgtggtgatgaatggcaaacgccgtcctttactggtcgcagcctctcaaacagcagcaagtttatataaatgtttttcgggggaagttcggaagattgtatatcctgatataattgtctgatcgaaatgggcttgtccagattaaatgaatatagaattatgtgggtaatggtattttttgatttgccgaccgagacaaagaaagaacgaaaaatgtattcggactttcggaagaagcttatacaagatggttttacgatgtttcagttttcgatctacttacgtcattgcgttagccgagaaaatgccgctgtacatattgcacgggttaaaaagagtttacctcctaaaggttatattggaattttatgtgttacggataaacaatttgaagcgatggaacttttctatgagaaagaagaaaagaatatttctaccccataccaacagttagagttattttagaaagcaaaaaatcgggagtattcccgatttttctgtttggatatacacttttttctgatcctaaattttattgtaattgtttgatatatagccttaataatgagggtatgttgtatatcctctgctaagttacaaattttgaaagctaattacaaccgccaaacgtgctttcgttttcaaatcatagttgtatatcctctgctaagttacaaattttgaaagctaattacaacaggatcttgcgccggtatacgtatgtcatagttgtatatcctctgctaagttacaaattttgaaagctaattacaacaaacggataggtacgcttaaagacggatttgttgtatatcctctgctaagttacaaattttgaaagctaattacaacttacagaacgaaataaacccattttattagttgtatatcctctgctaagttacaaattttgaaagctaattacaacaacacaatttaattatggcagaagaaacgagttgtatatcctctgctaagttacaaattttgaaagctaattacaacggctgtcaataaatcacgaactttctttttgttgtatatcctctgctaagttacaaattttgaaagctaattacaacatatggaaataaatggaaataatcttgcttgttgtatatcctctgctaagttacaaattttgaaagctaattacaacagaaaatcattagatttttttcaagttcttgttgtatatcctctgctaagttacaaattttgaaagctaattacaacatagtcccgagttttcagaagcatggatatgttgtatatcctctgctaagttacaaattttgaaagctaattacaaccgaaaaaaacagaatctcataagcctctatgttgtatatcctctgctaagttacaaattttgaaagctaattacaacttgatggagcgaaatatatcggagttgcaagttgtatatcctctgctaagttacaaattttgaaagctaattacaactttaactcttcactgttcattcgttctaatgttgtatatcctctgctaagttacaaatttagtaaacaaaatattctgctccaatgattattcctttctatttatctcacttggggctgtaccaaaatgtttcgtgaaacaacgggtaaagtacttcgggtcgttaaatcctacctcatacgctatttcagatatgctcatattacccttgctgttttgcaataattcatatgcaacagataatcgataattacgaataaagttgcctggagactgccctgccaaggtatgcatttttcgattcgtaacactcttactcatgcctattgcgtctatgaaatcactaacttcatattctggattcctataattctcttttacaatttctatagctttccgtaaaaatctatcatcaatggattcttctgcaatattcagttcgttaacgtccatttttaaactgaatctgcgctgatatgcccgcctgctctctaatatattattaatccgcgtcaatagcaattcctcatcaaaaggtttggagataaattcatctactcctgttttaaagctacagatgcgcgtttcaacatttgtttttgccgtaagcatcaaaaacggtatgtgtgatatcgtataatccgatttcacctttttcgataattcgagtccgtccattacaggcatcatcagatcgcttataataaaatcgatatttttggacttgataatatccaacgcttcctctccattactggcttctaatactttataataatcggataagatggatcggatatattttcgcatatcgtgattatcctcgacgacaagaatatgtagtttttgctcacctaatatatttttcagaggatcattttccatgtcaatcgctttatcatccatcgttgcatctatttctgttgatgtgacagatttttctctgaaaagaggtagtaaaaccctgatcgaagctccctttacatgattgttttttgcttcaatactaccaccctgaatagttataattttcttagacaagtataagcctatacctgttccactttgtcccgatataggatattgctcattatcttttgattgataaaagcggttgaatattctgcttctgtcctcttcgcgtatacctatgcctgtgtcttgtatgcagagatataatgtctctgtattgttatttttatccgctaatgacgtcagatatattgagacgacaccattgtcaggtgtgaattttatcgcattcgacatcagatttgttacaacctttcggatagcttcttcgtcgtacaatacataaggatgtatgagcctgtagaacttcctgataactatattgcgttcgttagcataagattcgaaaggatataagatttcgttcagaaaattaatcaagtttcctgtaacaggattaaaaggcatattacccgattccacctttcggaagtccatcaactgattcaccaaagataaaagatgctttgaattacgggctacatattgaagttgctcaataaccttttgatttgtactcaatttcaaggctctctcgattggcccgatgatcaaggtgataggcgttcggaattcgtgagttatattggtgaaaaatgatattttgtctgatgttgcttcttgtacctttttagacatgtcaatcagctgcttctgctgcgaaagaatcttctcattctgagagactaacatttcgttctgaaacttcaattccatcgcctgatcctctaataatgctttttgctctttcagcacctgagtccgttcttctacttttttgtgtaaaatctctctttgctttttgaaactttgtactcgccagcgataaaatgatacaatcccaataaagataaataacacgcaaagtgctataaaccagcctgtcttatagaaaaatggatggacggtaatatcgatttcgcttatattatctgtccaatcatgattccccgacatacttctcacctgcaaggtataagctcccggtttcagattggtatagctgacgaaacgacggtctgcctgcacgtcaacccaatcatcttcgaatccgagcaaccggtacgaatagaccactgtcgatggattatcataatccattgccgaaaattcaattgaaaaggacttatctctttcgtgcaaatcaatatggtctgcatatacaatatccgtttcaaggtatttttcgttgctccacaccgttttgttcaatacttgcaacttagtgaatgtcactttctcccttttggggaaaaggtattgattgttacctttcaactcgctaagtccccccatattacctaagtaaagattcttattggtgggcgatttatatcccgcattccagtaaaactgctcattgaccaacccgtcatatttcgtatagtttacaaaatgagacgtctcggggtcgaaacaagacaatccataacctgtgcctatccacaacaatccttgctcgtcttccaaaatcccaaatgcagcattgtttaccaatccctgattttgggtatatgccttaaaaatatactctccgttttcttttgtcagcctgcatataccatatccattgctccccagccaaatatcctttttggaagtttgatatatggatgtgatggttttgaagaacaattcactgattttgtcttctatggtgagatagcgggctggacatgtaaatgtatcacgatcgaattggtgcaggtcgatctggagcaaacctttagatgtacccagccacatacaatcgtcttcatctatcaggcagcccaatacccccataatgtttttagtaatggattcgggtaaaggttgtctcattgtatgggtttcatcatcaaagaagaatatatttctgttcgtacctacccacatacctctatttatagaatcgtacttgagcacagctatataatccagtcccacatcattatgtatttcaaatgctttttgttggattttattcagaggcagtatattaatgcctttaccccatgtccctatccaaagatttcccgaagcgtcctcctccagggtacttaccgaattgtggctaatgctgctcgttgctgtcgtgaaatgtaaaaatccatctttacctttcagttttaagtttaaacctccttctacagtccctacccataaattacctttgctatcttccagaatagcatttactggattgggagaaatactcttaggattgttcttatcatgaatatagttacgaatagccaatctccggagagacattttattcacaccaccggcttcggtacctatccacagggtattatcatcggccaataagcaattgacaaagtcactgttgagtgatgactcatcttttccgtgacagacatgctcaaatgtatttgaagcgggatcataaaagttcaaccctctgagagtacccacaaccaatgtcccatctccggtgagagcaagatctgttatcatattctgcgacaaggatgccggatcgttcgcatcatggagaaatacctggaagcttttatctgtcagattatatctgtacaaagctccttcggtacctatccagatatggttctctttttttagtatactcgaaataaaaacacttgggtttcttaatggtatatcattaaccaagacggggactaagatacccgatttgccgggcagaatgtgatagatggcacctgcgctcccaacccacatttcaccatctatctcactgattgtagtgaacgaaaaagaagatttcgaatctgcttcattcgtcgaagaaatattctctatcgagcctttttcgtcaaaatcaattttgagtagttccgtcgttgacaaaatccagatactaccttttgtatctttcagtataaaagaggctgaaacatccgctatgcgggcaaggaactctttcccgcttgcaatatcggactgagtcatcattttcaggtctataacatcgatgcccgaagtcgaagccacccacaatcggttgtaatcgtcctcacaagtcttttttatgaaattactcttgagagctatggggctactattgacatcgaactggaggcactcgtaaccatcgaaacggcacaatcctccaccttgagtagatatccagataaagccatgtgtatccttgaatatatcatctatgaaattgccggaaaggccattttcgactgttatcgaactgaagatacattcagacgaaactgaattctggctactggctgaatgagtagacagaatatgtatgagcatgattatcaatagccaattatatgtgtttctcatagtacaggtcgtttgtttttttaaaattaatgataatattttgaaaaagcacccggttaagtgtaaaaaatacaattgtccacctgaaagggccaattgtccacctctaaaataaacaagtaatttatatttgcgtacagagattggagggaattatagaaaaaggttaaccgaaactatttcaattttagaaaaatttgaataccatgaaaagaataaaacttctgctattattatcattcgttatatttcagataaaaggagcagttcaggacagcatattcagggctgacggcaatcctgtcattcgccacaaatatacagcagatccggctgcattagtccataataataaagtatatttatatgcgggacacgacgaatgtcctcctccgcacaatcattacctgttgaacgaatggctggtattctcttccgacaaccttgtggaatggacagagcacccggttcctttaaaagcttccgactttaagtgggcaaaaggtgaagcatgggcatcgcaagttatagagcggaacggtaaattctattggtatgttactgtcgaacacaatgccattcaaggcaaatcaattggagttgccgttgccgacaatccattaggtccctataaggatgcccggggatctgctctgataacaaatgatatgactaccggatacacatcgataagctgggacgatatagaccctaccgtatggatagatgatgacgggcaagcttatctcttttggggaaatacgcaatgttactatgccagattgaaagacaatatgatagagttagacagtcctatcatgacgatagatctgccaaactttactgaagctccgtggatacataagcacggtgaatggtattacctgtcgtatgctcaatactttcccgagaaaatcggatattcgatgagtaaaagcataaacgggccttgggaatacaaaggtattctgaatgaaatagcaggtaattccaatacaaatcatcaggctatcatccaattcaaaggacaatggtatttcatataccacaatggagcgattcctactcaaggagggagcttccggcgatcagtctgtatcgaccggctctattataatgaggacggaacaatgcagcgtctacaaatgacttcggaaggcattgcctctaacgaagccaatgaatgaatataattttaactatatcataactgataatttagatcaccatgaaaagaattttattagcttatttatctctacttgtctgtataacggccttttctcaacaaaaggctgagataacagtcaataccaatgaaggaaaatatcaaatcaacaaacacatttacggccacttctccgaacacctcgggcgttgtatctacgacgggttatgggtcggagaaaactcggccatacccaatgtcaacggtgtgcggaaagacatcatcgacgcactgaagcacataaaaataccgaacctgcgctggccgggcggatgttttgctgacgaatatcattggatggacggcataggcccacgcagtgaacgcccacgcatgatcaatacacattggggaggtgtagtagaagacaatagcttcggaacgcacgaattcctgaacttgtgcgaagctctcgaaactgagccttacatatgcggtaacatgggtagcggaacagtagaagaaatgtctaagtgggtagaatacatcacttttgacggagaaagcccgatgtcgaaccttcgcaagaaaaacggtcgcgaaaagccatggaaagtttcgctatggggtgtaggaaacgaaaactggggatgtggaggaaacatgactccagaaggttatgccgaaaattatcgccgctatgctacttattgccgaaactacggagaaaacagattgtacaaagtagcgggtggcccgaacgtagacgattaccgctggatggaggtgatgatgaaaaatatacctcatcacatgatgtcaggcgtatcggtgcataattattctttcacatacagttgggagaataaaggagacgccttaggtttcaacgaagacgagtatttctcactgttagagcatggtatgagaatggacgaaatcgtgaccaagcatagtgagataatggataaatacgatcctgaaaagagaatatccatgattgtcgacgaatggggcgcatggtacaatgtggaaccgggaacaaatccgggcttcctgttccaacagaatactttacgggatgcgttgctggcaggtagcattctgaatatttttcataagcattgcgaccgcgtgagaatagcgaatatcgcccaactggtgaatgtattgcaggcactcttcctgacagaaggagacaaaatgctattgactcctacctatcatgtattcgatatgtacaaagtacatcaagaagcgactatgttgcctctggatattacgtctcctacatacagccgtttaggcaaagagatccagtctgtatcagcttccgcatctatcaacagtgagggaaaagtccatatctcatttgttaatatcgaccctaaacaatctgtcgatatcacttgcaatgtaaaagatatgaaaaaagcgcggttgatttcaggcaacattattacggctccgaaagttgattctcacaatacatttgacaatccgggcaatgtaacgttgaaggagttcaagggggcaactattaagaacggaatcttaacggttaaaattccggcaaaatcattggtaactatagcgctgaatcagtaaatatatagaatagaccactatgaaataccatacattttatgcccttattatagggtgtacggccatattcatgtcttgttcacaaaagcctttcgaacccgttgcgaacaaaaatccatgggtagacgactattcagagcaatctggcatgagagattaccaacaatggggtacatataacgtacacgatccgtcgtgcctgctcattggcgacacatactatatgtattctaccgatgctatttacaaagaagatagtacagtaatcaaaagtgaaa

SEQ ID NO: 1179 - DNA, 24437 bp, synthetic construct
  misc_feature 1..24437: note = Synthetic
  source 1..24437: mol_type = other DNA
acagaatctttggagctaagacatccaaaattcctatggtagacattgatgtggaagattacggaatgctttacagaatggcagaaaaaggagctcagcctaaaattaaaatcgatgcccagtcgaaggtacttccggaggcaaaaagctttaatacgatcggtatgattaaaggaaaagaaaagccggatgagtatgtgatcctttctgctcaccttgattcatgggacggagcacagggagctacagacaatggtacgggaacacttacaatgcttgaaaccatgagaatccttaaaaaatactatcctaataacaaaagaactattgtgattggtctttggggaagtgaagaacagggattgaacggttcaagaggctttgtggcagataatcctcagattattaaaggaacacaggcagcattcaaccaggataacggtaccggacgtgttgtcaatatcagtggtcaggggttcgtaaaagcttatgattatattggaaaatggcttgatggtgttccaaaagcggtaagaagtcacataaagacagatttccctggaatgcctggcggtggcggatcagatcatgcttcatttgtggcagcaggagtacccggattctcattaggttctctgaattggggatatttcggatacacctggcatactacaaaagatacttatgacaagattgtttttgatgaggtgaagaataacgtgatcttaacggcagctttggcttatatggcttctgaagatcctgaatttaccaatagggagaaaagagtaatgcctaaagacgagaaaggaattacggtacaatggccggaagcaaaagagcctaaaagaagttctaaagattataaataaaagggtcttttaaaaaatagctcttcagtaaaaaggttgcctgaaaaggcgacctttttttattttttttacttcacttattgttgaaataatgcctttgtgtttgctttttagtaatggctattttagcataaataatcttcatgtatgattgttgcatgcaaaaatgcagattaaatattaagtgcttgaaaaacaaggttgtacgaatacctaataaacggagctgtttcagaaatggaacagcttttattttgcataaattttaatttttttgtacatgtttttaatataatatgcaataaaaacacacgtaaatgcaaaaagagataaagtggggatctttaattttaaaaagcttttagaattaaaaaacacacattatgaaaaaaaatattttgatcgggaaagatcctgctcacagaattgatcctatagaaaaacagaatttttatcttgtaaagtctggagaaaccttggaaagtatcgcaagggacctgatgcttgaaaaccacgaatacctccgtgaatatcacaataaacggtgcagttttcttgatattattcctgaaaacggagcgttgagatttttgcataagctctgtattcctgatgaaagagagatcctgaccataaattctttgatcagggagcgtggaaaaggctggtataaacagttccccaaaggaaaaattccttttaaccgaagatctgtacttggagattatagagtaaagcaaaccgaaagtgatgatagggttcagaaaagtgaatatgcctattcattacattttaatcatataaaagaagaaaaaggacattatattcatttttcaatgagtgattttgaaaaagacggagaagagccgggagagaagatcagtaacctggcttccgcatttgtaaaaatcatttatcccataacattgattgtagaccgttccggagaactgatagcagcagaaacccataaagagatcccggaaatgatgagtgaaattgaatcattaaaaaactatcatcagggattctatgcatcttcacatattgatcatatgaaagctaaaatggctactcctcagattatttataacagtctgaaaaagatactgccaatacagtttctgttcagccttttttatcaggccgactataacataaagggaacagcagttccatatacagatgacttttcatggctggctccggcttctccggttaaaatggaattactgaatcatactttaccggaaagagattcccgtttcatagaaattttacagactggcaaatctgtagattatcgtaccattgaagaattgtataatacagaccttgaatatgaggaagaaacaaagcctcatttacaatcattgacggccaatcattcagcaatatatactttgaatgctgaagatttttctgttcagaagataaaagcagaatttgatattcagattgccggttatgagaagtctatgacttttgaactggaaaaattagcaggttaattaaaaaacacgattgaaccaactcaacacaaaaattatgtcagaaaatttatcagcacacgatggtaaacactttgtcatccaaaaaggcagagcctgctgtaatcagggagatttattccctcagtttaaggtaatgtcccatcagaagcattactggaatcatcatgaaacttcagaagataatcttgctgttacggaagaagatgtagagttcaacccttccggggcaagcttcggcaaatgcagattaaaacctacctccggagggtatttaccctgcgcttatgctccagccggaaaatggcagaaaacttatgaaaaagtaaagattatggggaaaagctgtctttctgaaatctctgagctgatgtgcagtaccggaggaatcattacagtgaaggaacatggacaaacctcaaccatgaaccggcaaaatataacgttggctgatccgaaaagctatcattttatcaatccgtttatggatttaaaagaatccaaggaagatctggaagaacccgatccggtctacgagtaacatgtttcaaaattaacagatatggcaaaattgactattaccggaagtacaaaacctgttgttggaaacgtagaggcttattcacttgcagtttttgataatctgatatcttccaattccttttcatttccacctgttaaaatacagtggaatatccatgtacaggaccggaaaggatggcgaactactcatggaaataaaaaagaaggcgagcagattacttataaattcacccataaaagtttacaatataaagctttaaaaattgaagtaacgagagggaaggataaaggtgaactgtatataaaaccaaagcatgccgaggaaccgaaaatactccgtatagatttattggacattaattctcagcgtttaaaaaaaggaaaactgcttcattatacagatgctttaatcgctaaggcttattgtgtggggatgttcggtcataaagtatctttcaccttatgggaagatgatgcaataggaaaagggcatgatccggtgattaatatgatgaacagaatcaatccggtacctcttgtaggtgaagtggatcatgaaggtattgctaaagtgattttcaggttacccagctatactatggctgtgcagattgccaatgctcaggtagctgaaggagataagaacgaagggaaagctcatgagtattatgtgacggcagaaatgatttccaaacatattctgaaggccagtcccaatgtaaatattgccaatcctacccatattcctgagcttcctgaaaagcaaaaatccaaggaaacttctcctcctcacaggaaatctccggttgctcctgaaaagaaagaggtaaagcctggtaagccaaaacctaaagaagatactcctaaatttcctcaaaccccagctgcaaaaaaacaggctgatcctgaagggaaaatcataagtgcagcatttacagatgcagcaggaaaacctttgaaaaatgctaaaacaggtgatgctgtatcgattaagatcgttactcaaagtatgaaaggtaaaaatgtaatggtaagaatctgggaagaagatttttcactatacagcaatgatcttatgtatgaaaaaccaataacactgacttatgatactaacaactttattaacggtattatcctgaccaaagctatgtataccaaaagctacgaatggggagaaggcaatgaacgggaatattttatagaagttgaacatttgaatacctctgtaacgtctcaggtgatccctgtaagtgctggtgcagaaccgatgaaggtggaggctaatgattctgttgtagtgattaacgagaagaaagaagagaaaaagataaactgtatatgtcaggaacaatataaagatttaatctggagtggtaaagtaagttgtgattttagaaaaaaagtagttgaaatatgtaaggatttatggcctaaaaattatatggtaatggctaataatctcatggcctgcatggcttgggaaacaggagaaagttttagcccttctgctaaaaatcctaagtctacagcaacagggttaattcaatttatggctgatacagctaaagacttaggaacaactacaagtgcacttgcaaagatgactgcagtaaagcaattggattatgtgaaaaaatattttgaaaatataagaaataaggattatgaatttgtggatttttatttaagaattctatttccagcttcaatgggaaagtctgatgaacatgttgtatttagtagagatggagaaggtttgaataaaggtgatagaaactataaagagcggataaatgcttatggagtaaattctgggtttgatactaatcctaaatatggtaatggagatggaatggtaaccaaagcagaaattaaaaaaggaatccaaaaatatattgagaaaggaaaattaaataaaggaaaattctttgactgtcaaaaaggtaatgctgttgcaactttattgcctgaaaaaggaacttggaatgtgatcattacagaacattatactggtaataaatgtacccacttagaacgaacgccaattagaaataattgcagaagaggaaaaatagaagttttcgatgataacagtaaggtggtatttacaatagttgattgtttactggaaggaataaaaggagaagatagaagtgaaacttcagctgatgttccatatggggcttataaaataaatgaaagtactcctttttatagttctacagccgcaaataaaattacatatggtccaaatccaagattagtttttgaacctattaagggaagtaaagatgaggctgataacagtggaagatcttctattagaatacatggaggcagacaggaaggttatcctgttaaaacattaaaaagaaccgaaggatgtataagaatttacgataaggatgcaaaagacttctataattggtggattgaatttaaaaaaacagatccaggcgtaaaacctggaaaagtaataattaaaaaataaattatgaaaatattcctattgattacacttctccttataacaggttgccagaataataaacaaaataatgaacttatgactcaaaaaactatagaactggagcaggaaagtaaactcattgataatttacatttagaaaataactacctgtttgataaaaataatattctgcttaaaaagattaaatataaagaagattatatcgaaaatattaagataaaagatcttttggataagaaatttagaagctcattcatagaatatctgactgatattaaaacagaagaagacgagctgaaatcttctttcatttgccagttactattgctaagaatagcagaattatcggatagcaatgctttttatatattatctgagatttcaaagaatgaaacggtttcttataatggaatcgaactctatgaaaaccttttgatccaaatgtttttaaatgattcttatttctttattcagcaaagtgtaaaatataatgattcttcattgttaaattatattcttaaaatgtctcaagggtactttattgatgaggattttttagatatgaatttaggttatataaagtctggtgaaaaagatctgttgcttttaaaatctgaggcacagaaagaaatagtatattttccattgatgaaaaagatggatgggatgccaaaagtaaaagtgcagcttggaccctctttttataccaattttgaaacgattaataaagattttgtaaatattaattctttttttggaaaagagctgatgcaaaagatgaatgtgccggaaatgaattattttaaacaacatgtttttcctatgatcgaaaaacttcaattaaactcaggtgaaattagtaataaatagatattacaaatgaataaaagtttctttcaatcaagcattagattgaggtatgttttattacttgtgcagatgttttcatgtacaaaaacggatagtccggtaaatggagaacgtaaaaactcaacattcctgacagatcaaagtgataatcaagaagaaaaataatgatatcacaaaattaggtgatgagttagaaggagaggatgaacttatttctggtgagttatttaaacaatggaaaggcttgataaaacctgatagttgtatatttaaaagctggttagcagataataaaaggaaaaggtatagtaaggatgataactataaagaatacattggaggaatttttgccacagccaataaagattctatagagttttttacaaaaagaataatagaagggaggaatgagaactgtcacctttattaacattggttaaacgaaagaatgaatactttatatcaagttttttgacctctccacctcataacgggattattgaaatgccgatacaaaagatcaaataaaaaataaatccgtcccacagttttgcgggacggattttaattaaatataattttttaaatcagaaaatactgaaatttgggcttcatgctgtttagaaagctttccaaatccatattcgcagaagataaaaggcaactcgttggaagcagcagaatcatagtcagtttgggtatccccaacatatacagaatcatcaacagataaactgtttctctccatgagaagctttatgttttctgacttcgttttttgagtgcgtccatgagattcaaagtctacaaagagattattgaactggtaatattctaaaaaagactcaatatatccgtcctggcagttgcttacaataaaaagattgtgggtattggccaggcttttcagtgtatcttccacaccaggataaagaataccgccttgtatacgcaataccttgttttcctgagctaccacttcagaaagaagttcctgaatctccagatccgaaattcccggaagcatatccttcagaatatcgtgggcgagtaaacccatatattgattcatatcgtcaggcttcagctcttgctggataagttgatgcttgcctaaaacatcattccatattttgataatcgttgctctggaatcccataaagttccgtccagatcgaaaattaaatttttataactcaaaatgtttcttgtttaattgatgaataaagacttttaacaagcaattatttaaccattaaggtcagttaagtaaaaatctttgatttttataaacaaatactttaaagagaagttcaacttaatattctaaacccttaaaatattttaagaattaaaacaatacagatcacatgcttacaaaatcatactcaactgcacccttttccttgcttcatccacctcagttacctttactctcacatgttgatgcagttttacaacctcattcacatccgatacaaatccatctttaagctgtgaaatatgaaccagtccgctttccttgatcccaagatctacaaaacaaccaaatgcggtaatattattgacgattcccggtaagatcatgcctgctttcaagtctcttatactttttacattgggatcaaattcaaatactttagcggctttccttggatccaaaccaggtttttcaagctcttttaaaatatccttgattcccaggattccgatgtctccggtaatatattgttcagggtttaccagggctattttttccttattggcaatcagctcattggttttaatgcccaggtccttggccattttttcaacaattccgtacgcttcagggtgtacggcagaattatccaatggattttttgaattactgattcgtacaaatgcagcggcctgctggaatgccttttctccaagtctcggaacctttttaagctgttttctgtcttcaaaagctccgttttcagctctgaaattcacaatgttttcagccattttctctccaatcccggaaacatagcttaataatgatttgctggctgtattcaggttgattcctacggagttcacacatctcatcacagtagaatccagttcatttttcaattgagtctgatccacatcatgctgatactgtccaacgccaatcgatttcgggtcaattttcaccagttcagccaatggatctgaaagtcttcttccgatagaaaccgcaccacgaaccgttacatcatagcttggaaattcatcccttgcaattttactggcagaatacacagaggcacccgcttccgaaaccacaaaaacctgtaaaggcttatcaaaagcaattttcttaatgaaaaattcagtttcacggcttgctgttccattcccaatagaaattgcttcaatattgtaagcattcaccatagaacggatttttttcattgccattccggattcattctgtggagcgtgagggtagagggtctcattatgaagaagatctcctttttcatctatacaaactactttacagccgcttctgtaaccgggatcaatcgccagtatccttttctctcccagtgggggagccagaagtaactgacttaggttttcagagaagatttcaatggcttttttatcagctctttctttggcttcctgtaaagcttcattggaaatagcaggctccagaagccttttataactgtcttttatcgctaatgcaatctgttcagaactttcattatcagatttgataattgctttctcaataaaatcgacggcttcttccttgtcaatccccacattggttttcacaaaaccttccgcttcagctctcaacatagccaaaagcctgtgagaaggaattctgctgaggttttcttcccactcgaaatactgagagaacttctgggcatcttcctcatcctttttagccttcacgactttagaagtaacaacagccttacgctggaataaacgacgcagattcttacggacatacatgttttcattgatccattctgccataatgtctctcgctccctgaagggcatcttcttcagaaggaacctcattattcaaatatttggatgccagaaactgcacttcattattcttctggctcataatgattttggctaaaggctctaatcctttttccttagcattatccgctttggtttttttacgctttttaaaaggcagatatagatcttccaactcctggatatcaaagctttcttcaattctttgtctgagctcgggggtcagtgcattctgttcttctatagattttacaatagattcctttctctttacaatttcatcaaactgcttgctgatctttgagatcttctcaatctgtacttcatccagatttccggttttatccttacggtatcgggaaataaaaggaatggtacagtcttctgctaataattgtaaagtattgttgatgctcttctcagaaatatcgagctgtttctgtataaattctacggtcgtcattgttctgttttcggaaggctaaaatagggttttaaaacgaaaaaaggcgagttgccccgccttgaatgttttcacaacggaataatccttattgtgaattgcttttcaaaattattactacaaatatagaagaaaacatctttactataattatgggaatccataatttgaatgttttttttatttctatttttatgtagtaccaaaaaataaaatgatgattaaaaatatacttggattagacttgggaaccaactccattggctgggccttgataagacagaattttgaaaacaagtatggcgaaattcttgggatgggaagccgaattattccaatggatcagaaggttcttggagaattcggtgctggaaattctgtttcacaaaccgcggcaagaactgattatagaggggtaagaagactgcgtgaaagatttttgttaagaagagaaaggcttcacagagttttgaacgttttgaattttcttccggaacattatgctttgcaaattgattttgaaaaacgatttggaaagttcaaagaagagtctgaaccgaaattggcttataataatgatggatttattttcaagaattcttttgatgaaatgcttactgattttaaaaatcatcaaccccaacttttagaaaatgacaaaaaaattccctacgattggacgatttattatctccggaaaaaggcacttgctcataaaatacaaaaagaagagctggcctggattctattgaattttaatcaaaaacgtggatattatcaattacgtggcgaggaagaggaagagaatccaaataaacttatagaattttattccttaaaaattatagatgttttggaagatgagcctcaaaaagggaaatctgatatttggtattctttaattttagaaaatggttggatttacagacgttcaagcaaaacgtctttattagattggaaagataaaacaagagattttatagtttctactgatttaaatgatgatggaagtgtcaaaactgacaaagacggaaatgaaaaaagaagtttccgtgcacctagcgaaaatgattggacacttataaaaaagaaaaccgagcaggaaattgataaatcccacaaaactgttggaacatatatttatgaaactcttcttaaaaatccgaaacagaagatcaaaggtaaactggttcgtaccattgaaagaaagttttacaagaaagaacttaaacaaattttagaaaagcagaaagaattttatcaggaattgaagagtgacgacctgtacaacgattgtgtgcgggaattgtatcgaaataacgaagcacatcaattgactttaagtaaaaaagaatttgtacacctttttatgaatgatattattttttaccaaagacctttgagaagtcagaaatcatctatttccaattgtactttggaattcagaaagtataaagatgcaaatggagtagaacatacgcagtttttaaaagtaatcccaaagtctaacccgttttatcaggaattccgtatctggcaatggatttttaatctgaatatttataaaaaagatgatgatgttaacgttacaaaagaatttttaagcaccaccaaagattttgaaaatctatttgaattcttgaataacagaaaagaaattgaacagaagccactacttaaatttcttttggagcaaaaagaatttaaaggaaaattactcaatgctgaaactgaaaagtttcgctggaattatgttgaagacaaaaaatatccttgtaacgaaaccaaaacaatgatttcattgagattggataaggttgaaaatatctctgatgattttctgacaagagacattgaacaaaaaatttggcatataatctattctgtcaatgacaagattgaatatgaaaaagcattgaaaacttttgctgggaaatataagctggatgaaaattcgttcttcgaagcattcaaaaaatttcccccatttaaaagtgaatatggctccttttctgaaaaagctattaagaaattgctgcctttgatgaggttaggtaaatactggaattacgaaaatatcaacgaacattcaaaagataggattcagaaaattattactggtgaatttgatgaaaatatcaaagataaagtgagagaaaaggcaattcatcttacggtagaaaatgattttcgaggtttacaattatggttggctcaatacgttgtttatggaagacattcagaaggatcaatgattgataaatggaattctgctgatgatttggaagaattcttaaaagggtttaaacaacattcgcttcgtaacccaattgttgaacaggtaattacagaaacgcttagagtggtaaaggatatctggttgaaatacggaaatggagctaaagatttcttcaacgaaattcatattgagctgggaagggagatgaaacaaacaaaagatgaaagggtagaggctacaaagagaataacggaaaatgaaaatacaaatctccgtatcaaagctttactggcagaaatgatgagtgataattctgtagaagatgttcgtccttattctcctatgcaacaggagattttgaagatttatgaagatggaattttaaattctgatatagaaattgacgatgatattttgaaaatcagtaaaacggcccaaccttcttcttcagatttaaagagatacaaactttggctggaacagaagtataaatctccttatacaggacagattattccattaaataaattatttacattggaatacgaaattgaacatatcattccgcaaagcaaatattttgatgacagttttagtaataaaattatttgtgagtcagcagttaataaattgaaagataattacatcggtttaggatttattaagcagtttggaggaacgattgttgagtgtagttttgggaaaagtgtaaaagtttttgaagctgaagaatacgaagattttgtaaaaaaacattatgccaataatagaggcaaaagaaacaagctccttttagaagaaattcctgaaaaaatgattgaacgtcagttgaatgatactcgtcatatcagtaaatatatctcaggtgttctttccaatatcgttcgacaggaagacggtactgatgaaggcgtgaattctaaaaatattgttccagggaatggaaaaattacgacacagctcaaacaagattggggtttaaatgatgtttggaatgaattgattttaccacgttttgaacggatgaatcaattgaccaattcaacagattttacttcctggaatgaaaatcatcagaaatttttaccaaccgttcctgtagagttttcaaaaggattttcaaagaaaagaatcgaccatagacatcacgctttagatgctttggtaattgcttgtgcgacaaaagatcatgtgaatctgcttaataatcagtctgcaaaatcagatactaagcgttacgatttaaaaaagaaactaatgaagtttgaaaaaattatttacaaacatccacaaaccggcaacagagtcgaaagagaggcttcgaaacaatttttgaagccttgggataattttactgtggatgctaagaataaattggaaaccgttattgtaagttttaagcaaaatcttcgtgtgattaataaggctactaattattatgaaaaatatgtagagaaagatggtgtgaagacgaaagaaagagtagaacaaacgggaacaaattgggcaataagaaagccaatgcataaagaatttgtttatgcaaaagtgaatttaccttgggtaaaagttggtgaaaaagaaatattgactgcaattagaaaaccgttggatataagtttcgatgagaaaaaaattaggagctcaataacggatacaggcatacaaaaaatacttttgtcacatttagaaaattataaaggtgctttcgatgaaaaaggaaaagaaattcctcctgaaattttagcattcactccggaatctatagaagagatgaataaaaacattattgaattaaataacggagtatttcaccagccaatttttaaagtaagggtatttgaaaaaggaacgggaaggttttctattggacaatcagggaataaaaaaaataaatatgtagaagctgctaaaggaactaacttattttttgcgatttatgaagataaaagtggaaaaagaagctatgaaacaattcctttgaatgaagttattgaaaggcaaaaacaaaggttgaattcagtgccattagaaaataaaaaaagagataaactgttattttatttatctcccaatgatttggtttatgttcctgaagaagatgagtttatggatagaggggtgagcttgaataatttaaatagggaacaaattaaaagaatttataaagttgaaaaaacttcaggtactgaatgttacttcgtccgtcaagatattgcttatctaataaaacaatatgattcaaaaactaaaatcggagaattggaaagccagaataagcttcaggtcacaatgtcagaggatagaatcaaaattgcagaggtttgctttaaaattgattgtgataggctaggtgatataaatattctaacaaaagaaaaagttaaaaaaatgtttgatggatataggtaatattgcaattgatacgaatgttcttttatatgcttttgataataaagatattaaaaagcaagataaggcagtagagatgttgcttatgacaccatttgttactcaattagttctttttgaatttataaaaattctcgaaaggaaagagaagaaggataagaaagaaattacacaacttactattaaaatacttaatgattgtactattttactatcagaagatatgtgtaacggaatgattgtcgataaaaaattaaaaatcataaattcttttttatgatcacccgctccatttatatcggcaatcctgcttatcttaaacttaaagatgaacagatgtatattttggatccttccactaaagaaatgaaaggcaaggttcccgtggaagatttggggttgctaatgttagaccatttccagattacaatctcacaccaattgattcagaaaatgatggggaataatgtggtggtggtgagctgtgacgggcatcatttaccacacggaattatgcttccattgtatggacacactgagcattctgaccggatcaaagaccaattagaagctagtgaacccctcaaaaaacaactttggaaacaaactgtcgaatgtaaaattgaaaatcaaaaagaagttttaaaacgtttagggaattattacgaaccaatggttgattatcaaaataatgtgaaaagcggtgatattaccaatatggaaggcattgcagcacaacattactggaagtatctcattagtttggattttttgagacagcgttttggagattcacccaatcagtttttcaatttcggatattcggttctcagaagcattgtggcaagagcaattgttgagaccggactgcttcctgttcttggaattttccataaaaataaatataatccttactgtctggccgatgatctgatggaaccttatcgtcctttcgttgatttactagtaatgcaatggcttacaatcaattcagagacggaagatttaactaaagaatttaaagcttttattttacagattgcgaccaaagatgtaaaaatagatgataaaaagagaccattattggttgctgtaaaaacaacagcaacatcactgtataaatgttatacaggagaaaagcgtctgatctcttatcctgaactgatatgaatgccgaaaggtttaatgcttaccgaattatgtgggttttagtattatatgatttaccaacagagactaaggccaatatgaaagatgccaatcgctttcgtaaatctttgcttgatgatggttttacattatttcagttttcaatgtacgtaaggcattgtccgagtcgtgaaaatgctgaagttcatattaaaagagttaagtttatgcttccaaaagcaggtaaagttgccattatgtgcattactgacaaacagtttggagatattgaaatattctttgccagaaataaagaagaacctcctccaacctttcaacagcttgaattattctaaattttaaatcctaaaaacaaaaacaatctgctgattttcagtagattgttttttgaggctgtgactaatcacgaagataataattcttgaaagcaattcccaactgacatacttacttagaatttcggctacttgctgtgactaatcacgaagataataattcttgaaagcaattcccaacagcttaagacttcaaatataacgaaatgcggctgtgactaatcacgaagataataattcttgaaagcaattcccaacgatcaaatcatctaagacactttttgtaaagctgtgactaatcacgaagataataattcttgaaagcaattcccaacttttggtattgaaatgtggaaagactttaagctgtgactaatcacgaagataataattcttgaaagcaattcccaaccaggtgatctttcccattaaaatagattccgctgtgactaatcacgaagataataattcttgaaagcaattcccaactttagatctaattgtatctgtttcatgattgctgtgactaatcacgaagataataattcttgaaagcaattcccaacaataccgcctcttttcttttatccgagtaagctgtgactaatcacgaagataataattcttgaaagcaattcccaactattgggatacagctcaagtgaattttaatgctgtgactaatcacgaagataataattcttgaaagcaattcccaaccaattgccgtcactttattaaagagggtaagctgtgactaatcacgaagataataattcttgaaagcaattcccaacataagccgctgccattttaatatcgtaattgctgtgactaatcacgaagataataattcttgaaagcaattcccaaccctgtttgataaatgaagacaggtcttgctgctgtgactaatcacgaagataataattcttgaaagcaattcccaactacttttcccactcgtaaccgtagatataagctgtgactaatcacgaagataataattcttgaaagcaattcccaacaattcttcctctctcattcttaattccctggctgtgactaatcacgaagataataattcttgaaagcaattcccaacctttgacacctgaatgaacattccgttttcgctgtgactaatcacgaagataataattcttgaaagcaattcccaacgttttaaaggttttctaagaattttttagcgctgtgactaatcacgaagataataatttttgaaagcaattcacaacagaaaggataaagaagggatcttagcattagctgtgactaatcacgaagataataatttttgaaagcaattcacaacagccaggtcattacgcattttgtcatacttgctgtgactaatcacgaagataataattttttgaaataaattcacaacggctcccggatacgatagaaccaggagacgctgtgactaatcaagaagataataatttttgaaagcaattcacaacatgctgaaataacccgacctatagatcctagctgtgactgatcactaagataataatttttaaaaaacaattcacaacttaatgatatatatgagaaaaatagaaactgtgactaattatgaagataataaatcttaagaccatatatataaaatccctctaaccgagggactttatttatgatacatatgggcatctgcaagtatgcaaaagccagctgggcagtaatcaattcttcctataatagattttagatgttcccttgtgatttttttatggtattatttttataggtaaagattgaatatgttaaatattttcacattaaatatttaacatgaaaatatttttgaaaatatcttgaaaatcaaataggaattcatgatgagaagtgtaaattcaaaaagaagactataataaactatactatttccacacctcatttatttcttcttatattacaaatcctaacattggtaacaaaatttacatttcttgatgtatgataagagatgacccataaggtttttctatttttgtatccgaaaacaataaacttttttaaacagttcaataatatgaaaaaaattagcgtaattgcattagtagcagtaggattgctggcaacatcatgtaacaataaagaaaaaacagatacatcagtagctacagaacagtcggttgctgagagtaaaggtgaagtattggcagtagatgctgcaacttctcttgtgaattggaaagctttccataaaggaggtttcgctcctcgttggggaactcttaatgtaaaatcaggagacttaagcattgaaggtggacaagtagtagctggaaacttcaatattgatatgacttctattaaagttgatcccgcttcagtaactgaaaaagataaaaaacctgcagagcttgaagctcaccttaaaaaccctgacttctttgacgtagcgaaaaaccctgcttcagattttaaaattacaagcgtagcggacctaaaagaagcaccaaaagatgctgtagcaggagctaacaaaacagtaagcggaaaccttacattaatgggaaaaacaatgaatgttactttccctgctaaagtagatgtagtagataatactgcagctatccaagctaaattcactgtaaacagaacagactggggaatcaaattcggaactactgaaactgatcctgcagaatggatgattagcaaagacatcgaaatcgcaattgatgtaaaagctaaaaaataatttttagatttatcaataatctataggctgctttcttttggaagcagcttttttgttttgtggaagtgaagtatttattaggattggagcgcagtgattatgctggcaaagaaatatagatctggcttatttgaatactctagtggaaatgataggctgcaacagctcctagctcggggggatgctgatttaattttgaaatgcatttgaaagtggtcgaaatttctttgtaattatgatattatttaagtctattcttactacttgaaaatatatctttccttatatttgaaggctaaaatcaaatatatcatactataattttttctgaattagaaatgtaaattagtatgtttcaaaattaaatgactcaaaaagatattaaacagctcgaagtagagctttgggaagcagcagatgaattaagggctaattcaaaattaactgctgctgaatataaagatccattattaggattaattttattgcgttttgccgaaaataaatatttagaagcaaaagataaactacaagaaacgttacctataaatcctcggacaggaagacgtcgtgaagccggaaaagatgattatgtggctattggcgcaatgtttttaccggaaaaagcgcaatatactcaccttgccaatttacctgaaagtgaagatttagcagaagctgtaaattctgccatgaaacttattgaagctgaatatgaagaactggcaggtattcttcctaaaaattatcaggaactgacccctgaagatgattctgataataatttactggcaaacctgatccgtatttttaacagtgactctgtacaaaaagcgaaaggtgatgtcttcggaagggtatatgaatatttcctgatgaagctttccatgatgggagccggtgcacaggaaggaggggaattctttacccctccgtcattggtacaactgattgtgaattttattcagccggatcatgggactattcatgatcccgcatgtggttcgggcggtatgtttgtacagactgcacattttatcaaagaccatcagaacaaaaaagttaacgaagctattcaagtttatggtaccgaatataaaagtaatacaactcgtctggctaaaatgaacttagccatccacggaataactggcaatattgctaataataactctttttacagtgatccgcacgaattatttggaaagtgcgatttcctgatggcaaatccgccttttaatgtggataaagtagatgctaagaataaatttttagcagaagataaacgtttaccttttggtgcaccattgactggtaaagggacaattggaaatgccaattatctttggatacagtattttatgtcatatctaaacccgacaggaagggcaggctttgtaatggcatcctcagcaaccgatgcgggaaatgccgaaaaacgtattcgtgaagaattggttaaaacaggaaatgtagactgtattgtttctatcgggaacaactttttttatacccgttcgctaccttgccatttatggttttttgataaaggcaagagaaaagagaaccaagataaaatactgatgatcgatgcccgtaatgtttatctaaaggttagcactactattaatgacttttctcctgaacaattggaaggattaactgctataatggcattataccgagatgaaactactgaagtagcagcagataattcttggtttaatcaacattttccagatggaacttatcgtgatgtagaaggtttgtgcaaggtagtggatttggaagaagtggcggaacaggattacagccttacaccaggaagatatgttggtgtaaatatcgacattgatatggattttgattacaaaacccgaatgcatgaattgcacagtgaattagccgaactgaatacagaagccaaccaattgatgaatcaaattcaagcttttaaattatgattttagatttagagacaaattgtaattttattaatggtggtagttggaatgagtctgattacagaaataagggaattcctgtattaaaagtttcaaactttaattcatctggcttttcaattaatgatatttcttacttagatgaaaacctacatttaaaatacataaagaacaagcttgaattagatgatattattatagcaactgtagggtcacacccctctcttgtaaactctgctgctggtagaacaattcgagtgaatagtttagtaaaggatttttatttaaatcaaaatgctattgcattaaaaacgaaagatcctgaagtgataaatcaaaaatatttatattatttaactgaaactcagaaattcagaaacttcattcagcagagaggtaaaggtgcagcaaatcaaatgagaattccaatttcaggaattaaagaatttgtgttcgactttcctactccagaaacccagcgcaaaatcgccaacattttatctggctatgatgatttgatagaaaacaatcaaaatcgcatcaaaattttggaagaaatggcacaacaaacctacgaagaatggtttgtgcgaatgcgttttccgggttatgaaacagcggtttttgatgagaatggtttaccggaagattgggtaaaagtgaagttgggtgaaaagataaaacttataagtggctttgctttcaaaagtaaagattttcaggacgtacaaaacaataatatagttgttagaatgggaaattttgaagttggaggagggctgaaatttatcaaaaacaaatatttagttgaaggaactaaagtgaaagaaaaccatattttagctccttttgacttgctgatggttttatccgatgtcacaagagaaggtttgttaattggtaatgtaggatttgtgccggatgatggtaaaagttactatttgaatcaaagagtttcaaaaattgtttctgatgaagatttgaaatattatttattcgatgttttaaattctgtagattttaaaaataattgtatagctaaagctaattcagttacagttttaaatctaaaaaatgaagatataacaaactatttagttacgctacctaataaaaatattcttagtaaatggaatgattattcaaagagtctaagatattcaatatttaaccttcaatctcaaaatcaattcttacgtgagtcacgagatattctgcttccaagattgatgacgggaatgattgatgtgaaaagtttagaagtaaaatcaaccaatgctaaaataattcctttagcacaacctaaaaaagaagcctccaaagaatttaaagaagccgttttgattgcttgtttaactgatagatttggaagtgaaaaatttcctttaggcagaaaaagatataccaaactttcttatctctttcacagatattcagacaataaaattcaggattatctgagaaaagctgcagggccttacaatccaaaaacaaaatacggtggtcctgaaaagattgcgcttactagtaaatacataaaagattggaaaggcgaaaagggaacaacaggatttgtcgttgccgaaaaaattgaagatgctaaaaaatacttttccaactactggcaaatcgcagatttggattggttgactacagagtttatgttcaaatctaatgatgagctggagcttttagcaacggttgataatagtttggttgagctctctaaaaagaatcttgagtttacgactactaatgttttgaacattataaaatctgaaaaggaatgggaagcaaagttagaacggacgatttttagtaatgcaaatgtagaaagggcgattagatttctaactgaaaccttacaatatgagaaataattaaaaaataaaactaataacctatgaacgaaataaaaactacatttgatgcaaaactatcttatggatatgatagtgtaacgcatttagaaggccttattcttgatgctggtggcggaggtagatataaggatcatacaatcttgtttaggcatattttggataaactaaaaacaattaaggctcataatattactatttatgttgctgcaaagccaactgccgccaatagttatcctgacaatgattatcgaagaattagatttgaagatcagactgaatttaattttgaaacaattgatttagatagatttaaatctaatgcaaatgatgagatcagagaaaaaggtaaagtcgatccagaaaaacctaatggtgcaattcacaaacgcttactgataacttcaaatttaaatgaaaatcattggaatgagctatttggaaatgtttcaactgaacaaattgaaaatgatgaattcataaatagtaaaaatgaggaggaattacagtacactttacaaaaaataaaaaaacggttacgtcaatcccaatttagaaaagatctcttaaaagcctatgataatacttgtgcaattagtagaagtaaagttttgtcattattagaagctgcacatatacagccatacaacggcattcatacaagtgtagtaacaaatggtattttattgagatcagacattcacgatttgtttgatatttatttagagggaaaaagattaatcaatatttctgctgattataagattgaagtacattcttcattgaaagactctgaatattgggagtataatggtaaatatattaagttacctacaaaggggaactatcctatattctaattaataagtaatttattatatgaaaaaggtagattacttaattaaacctaaggaattaattgatattgattataaagctctgtgtgcttttaaggaaagatatctcggttttttaaatgataatcctttccctaaaccacctgttaccggagcttactttgaaatgattaactatctgaaaagaaaggatatcaataatcctcaaaaaatagggccttatcaaaacattactatttttgaagctgctaatcgcatcgcttctgatttagtaataattaatggtatcattcaattggttcaaaataatccgtcattagaaaatgcacgttttactataagattaggaatattgcacgaaaagggaaaaggagattttactatttatttagattctgaagagtctgaaggagagtcttttaatgttgcaccatcctttttgaatgtgaaacttaggaatacaatttccaaatggaataaagaagagaatcaaaaaaagctaaaatatattttagtgaacgatgaggcatttgaatttgttacaaagtctgtagataaaagagtctttagagttaagaattgggaaatataataaattaagctatggatttagatactgtagaaaatgctacaaaactttttgaagtaggaacaatttgtatttacgatttatttgaatcagatacaaagcttattattcctgattatcaaagaccttatgtttggaataaggaacatattacagagttattaaatgattggaatgatcatttttttaaagacaataaatttaatgatgatgccatagaatattttatgggttcagtaatgattcataaaaatgatggtaagtatgaagtaattgatgggcaacagcgcttaacgactttattaattatggattatgtttggaatgaaaataattcggtgctaagtagaggtaattttgattttaattataaatctaaggtatcatctaatcacattaaagaaaatagaaatcttttaaaaagtatcagaggaggtttaattagcaagaacttcaataaaa

SEQ ID NO: 1180 - DNA, 24431 bp, synthetic construct
  variation 15850..15851: note = n is a, c, g, or t
  source 1..24431: mol_type = other DNA
  variation 16543..16603: note = n is a, c, g, or t
  misc_feature 1..24431: note = Synthetic
tccataggcagattttggaagttttgtgcctcgtaattagcaatctgttgaccttccggagagagtgtctgtgtgaaatagccgtaacgatacaggaaaccgattgcggtcatatccacgttgcagtccgaagcttctttgaggtagtcgccagccaagataccgagaccaccactatatattttgagcacatgtgtcaagccgtactccatggagaagtaggcgatagatggcttattgttgtcatgcggttcgtccatataagcgcggaatcgagcataaacatcatccaagcgctccatgaactctttatcttcgctcaactcagtcattctctcgaagctgatgatattgagcaacataattgggttggattgtgcgcgatgccatgcatcgatatcaatgtcacggaataaattcttggcatcggaattccaaacccaccacaggttataggctatttcctgcagttttctcaagttttttggcaaattagcatgaatagtcatctcatgccaagccggttgatttacttcactaacttttacttgcataaattatttttttattgatttatattctttttaggccttttatttagaaaaagcgcacaaagatacataaaaatttgcatatacacaaatatttttgtaattttgcagcggatttatgaaaaatgatactcacatacagcattttgttgtcccgaatatagatgcggaagtgattcgtcgtcgcgatatgcgggaagtgttcacctttactatcgacccgaaggatgcaaaagattttgatgatgctctttcttttgaagaacaagaagacggcacttttcaagtcggagtacacattgccgatgtgacgtattttgtgcagccggatacagatattgacaaatctgcatacgaaaaagcgacatctatctactatgtagatcatgtcgttccgatgctgcccgaagaactatgcaataatctctgctctctgcgtcctaatgaagataaactgactatgtcagttattttcactatggacgaaaacgcaaaagtattaaagtacaaaatctgtcgtaccgttattcgttcgaacttccgattggcatacgaagatgctcaaaacatattggacgattcagcagaggttgcgccactcttgcgctgctcttgcgagttggaaacggcactcaaaaagctcaacgcttttgccaatattttacgtcgtgagcgaatggcaaatggtgctttggacattgaacaggaagagttgcagtttgaattggacgaaaacaagcatcctatcaagattatcttccataaaccaaccgatgcgaaccatttgattgaagagtttatgttgctggctaacagaacgatagccactgagatgggtaaacgcggccacgaatttgtttaccgcgtacacgataaacccgataatgagaaattagagcaagtgggggcttttaccaagcgatttggagatattattcctgcttccatcattgagatgcttactatccgcgctatggcaaaagcggtatatgatacccataatatcggtcactatggcttggcatttgactactatacccatttcacgtcgcctattcgccgctatccggatatgatggtgcatcgattagtcgctaaatttattcttggagaacgcacgcgcggagcggttgcaccggaagaactcaaagaagcatgcttacattgttccgaaatggagcagtttgcgcaacaagaagagcgcaattccgtcaaggaaatgcaaacaatttggatggcagaccatctgggtgaagagtttgacggcacgatcgttaatgtgaccgacttcgggctatttgttcgcttggacgataactgctgcgagggactgattcacatcacagatctcgttaaagacgattacatgctctatgacgcaaagaacttccgtcttattggggagcgaacaggaaaaactttcactattggcgatagactgcatgtcaaactcagccgtgcagatattgataaaagacagattgattttacgttagtagaagataataattaaccctaatattcactcaaaatgtatttcttatgaagaagattttaactttatgcgttgtagctcttatggctatttccacagtttccgctcgttcgtacaaagtagcgcttggtttagcaaccggtttagagtacggacctaccgtaaaagttaactttaccgaccactttacgttgatgaacgatttgacttggaagtttgtgccaaatacggtagcaggtgtaaatggtcaaacatttaatttcggttacatgggcctcattgacaacgtcaatgtagcatatcagaccaaactcgccagcggacgaggattagacctccttttctatggcggtggtggtatgagtatcggttatgctgatcttgagaccgctggtggtaaatttggtattaatgcactcgccggtatcgaagtaacggctaatgtacctatcgctttcacctttgatttccgtccaggttacgcccttcttttcgctaatggaggtcaaatccacgctttagattggtcgctcgtacttgctgttcgctacgcgttctaagcaaacaacaaccatataaacaaaagtgcagtttcattacgagactgcacttgttttattgtatctgcaatagggctgaagaccacaactttcgcactttggttttcgcgcttggcaaatatatctgccatgtaaaagtagccaatgatgcgcttttggaataaggtcttgtggaatatacttaactaattgtttttccgtctgcagcggattcttactattggtcgtcaatcctattcgttctgagacacgaaaaatatgtgtatcaaccgccattgtcggctgattccatatcacagcgcaaacgacattagcagtctttcttcccactccgggtaatgtctgaaggtcgtcaatattgtccggcacttgtcctccatacacggccactaatcgttgagccatactgactaaatgcgccgcctttgcgtttggataactgaccgagtggatatactccaaaacctcttgtacgctcgctttcgataaagcttcagcagttggataggccgcaaataaaccaggagtaaccatgttcacgcgtttatcggtacattgggcactaagtacaacagctacaagcagttgaaacggattcgcataatgcaactccgactctgctattggcatgttcacagcaaaccaatcaagcaccgattcaaaccgctgtttcgttgtcataatacgtcttacttaagaaacgcagcaactgcgtcgcatctttcaccactacctctgtttccggtgtaatctctttcttttgcagccgcagcatcatcacttggtagagtaataccaagcaagcttctacgtccgacatattgggtcggtctgtctttgctttgagcacattgagagtcggttgcaagtgcataatcacagcccgataaggcgcttcggtatcgatgagttcgttatgcaaatcctccagttcagacaaggcattctgtgccaattgtaaatgtcctccgcccatgatgccttcgtaatgcatcatatcgtacagttccatcaactccgtattgctcgtcgcatgctcagggaaagcacgcaagtaatcttctaattgccataagtacagtatgtactctgcgatattttcttttttactcttcatcgtcgaaatcgtctaaatatgcatcataatcatcggacaggaacacttctatctcacgacggtctttctttgttggtcttcctgtgcctcggtcgcgaccggattgtccggctatcttagctaactctaacaactccaattggtcaggagctgttatatcacgcatataatcgggcactaacttcgcacctaatctattctcacttaatcgaagtacctcatacgaataggttatcggacctttgcgcaccgagaacttatcgccaatcttaaacgtgcgagacggtttaagttccacccctttcattgttacacgtccttttttgcaagcgtcagcggcaatcgaacgtgttttgtagatacgcatcgcaaataggtatttatctactctttcttccatagcttaatcatttatcgacagtcagtcgattgcttgtcattcgactgatatactgctgaatatatgcctgcaaatagcgctctatcttattggtagcagcgcgttccccgtcataaaggattacttcgttattcgtcataatctgatattggggatggttataacatattgcgtagggatgttccttttgcttagtgacggcgtcttctccaaaagcgaaatacggcttgtcatagttcaaaaagcctaatactgacggcattatatccacctgactaaccgcttgtttttcgtcgtaaggttcgtcccattctttgcccggataatagaatgcaatcggcacagcaaatagaccgcgtgcatttcggaacgcaggatctgcattctcatttgtatggtctgccgtgatgacaaagagtgtatggtcataccacggctgcgttttagcgaacgcgaagaactgtcttagcgcgtaatccgaatagcctatacattgatgaattggcagttcgccttttgggaacactccttcatatctcttcggtacgcggaaagggtgatggcttgaagcagtgaatacggctgtcataaagggttcgtgcatcttcgtcattgtgcgcgcgtagtattgcaagaactcttcgtcccaaatagcccaggtgccatcaaaggcctcttgtccatcgtactcgttcattccatagtatgcaccaaatccggcagcacgcgcgtaggcttgaaagcccatcgagccattaggcgctccatgaaagaaagccgtttcatagccttcatgagctaaacagtcagcaatagaggacacttgattagtagagtatggcgtcactataaacggctctatcagcatcggaatagaggataatactgaaggcattgcgtctatggacttgcgacccgacgcataggaataacgatatcgcttgctatgcatcatcaacgagtccaagaacggcgcataaccgccctctatatactccttaccgaatgactctaagattaagacaactacattatccttccgcatttctaatcgctcggcattaactgcgggttgatgaaccggagtaaagatttgttccatctcagcgtccgacatataatgcggattcacatacacttcgttctctaacgatttcatcagtgagaacggagtatttaggacaattgcagtctcgcgcggagaattcgtatattgtagtgcattagagatagttatggggcgtgtatatttaccaaagccgccacggatacctatcacaacgaaataaatagacaccaagaacaaggctaactcgcacaaataatacatgaccactggccgctggttattgaccacaaaatgttttctggtcaaaacgacaagtgcagcacataccgctaaagcgaataacgtgacataccaatactgcacgacggattggcagaagatagacaaaagattgccttcgttctcaaattcggaaaagaaggtacaagtcgttctcctatcggtaaagcggatataaaccatatcaatgcagtttaccaacagtccaacgatattaggtatccagtagcagtaattagcagctgtttgatagcctcttttattgcgaataaacggtggcagcggcaataacatgagtatcaggtacaacgagttgagatacaacagggcagtcaagtcaaagcgtacaccgcctaatagcatctcccacaaatgtgctgctgttatgtcctgatacagattatgattaacccacacaaagacgagtcgtgagagcgtatataacgccatcacaagcaggatgttacatgccgcaacaacccacggatgctgccacactttctttagaaggttcatttattgttatattgattcattgtccggtcaataccttgtaggcagaaggacggaatgatatctttcacgatattgagtcgttcgggcagtagtttctcctcttcatcggtccatttgccaagcacataattgatttgtgcgccacggttaaactcatttcctattccgaaacgtacccgcgcgtaatttggtgtacagagtacttgctcaatgtgcttaagtccattatgaccaccatcgctgccttgcttgcgaatacgaatggtaccaaacggcagattcaggtcatccactaatactaagagattctccaacgggattttctcttgctgcatccaatagcgcacagcattgccgctcaggttcataaacgtagagggtttaagtaataccaattcggcattcttaacgcgtccacgtccaataaatccgtaacgtttatcctcaaaagcaatgttggacgcctcagcaaaagcgtccaacatcttgaatcctatgttatgccgagtttcgcgatattcgtcgccgatattgcccaacccgacaatgaggaacttactcattactcagcagcttctgtatcagcggtagcacttgcacgagttgctttaacttgagctacgcaagcgtcttgcgggtccatcagtttgcagttctcaacaactacttcgcttacagctaatttcttaccaagacccaactcggttacatcaataactacgcgctcagggatattggtatagataccattcactttgagtttgcgcatttcgagactgagcttaccaccggctttcacaccagctgcgtgacctgtcaatgaaacaggaatctcaacggtaacaggttttttgtcgttaacctcaaggaagtcgatatggagaacgttctcagtaacaggatggaattgcagttcttttacaacagcggtgcattttgcatcaccgatggtcagattaactaccaacgtgtcaggcgtgtaaatgagtttgcgaacatcttctttaccaacggtgaaagttacgttcttgcccagaccgtagaggttacatggaacgagttcttctttgcgcagagctttagctgctttcttgccgtactcagaacgaggagtacctactaaatcaaaagttttcattgtttgtttttgttactttattcggacaatttatacatcatacattatacatcatacatgacgctcgtgactagtcctacttatcatcacataaaaaaagcggcagtggctttcggcctacttagcccgcttcttttgttgcctaacgaggagtcgaacctcgcccctcagaaccaaaatctgatgtactaccgatatacgattaggcaccattcgcatgctttcttttcaaaagcggcggcaaaagtactgcttttttttgaactgaccaaattttagagcaaaaaaatgcaaaaaaaatgtattttggggttttcggatatattatttggctattggcccaataaaaagtttcatctatcatctatcatctatgcggtttaccgcacttggttcatctatcatctataaatttcaaatctacaatctacaataaggcgtcagccgccaaatctacaataggctttagccgtacaatctaaaataaggcgtcagccgccaaaggttcatctagcatctatttattgttggttattcgttggttattcgttcgatatacgttagttattaggctaagaccatcgtaactccatcgtaactccaccctaacttctcccgctcccttcccgccggcataggtttcagataggtttcagataggtttctgataggttctcatgcctgactccactatgacttaatcgctttataatctccaaaagttcattttttttagtgagaatttgagaatttgagaatttcccctgcaacatactatatgataatgagttataaaattctcaatatttccaaattctcaaattctcattctattttttcttctccgtccgttagcccggcatctcatgccggctattgtagcgtctatgtcttgcgcatccattcgcaaccaaaacgtgccttaccgcactacacgccgcaggcaaaatattcattattcattcaaggcatcagccgttcaatctatgccgaaggcaaaggttcatctatcatctattatctatcatctatgccacaggcaaaatattcttagcccttgccgggcacgattatttcattattcattgaaaagatattcattgttcattgaaaagatattaattattcattaatcattattcattaataagcactacacaaaaagtgccgttcttaccacaatctgcacttttttcttgcatatatcaaaaaaaagcagtacctttgcagcgttttttattccgaaagttgtcgcaattgcgactaaatttgaaatagcgtcacattatggatatacaaagaaatgaatatgtagagcacctttacgccaagagttggaatggtaaggtgaagattattactggtatacgtcgttgcggtaagtcgtatctgttatcccatctgtacaagcaatttctaatcagcaaaggagtagagaaagattgctttgtagagatagatttagaaaatgcttataatgcaacctatcgcaatccgatggtcttatccgaatatgtaatgaccaagtgcaaaaacaagcagcgcaaatattatgtctttattgacgaaatacagatgtgttctaaggtattggctcctaatgtagatatatcacaagtagcagaaactgacagagatttgctctatatcacattctatgatattctaaatagtttacgtggtgagcctaatattgatgtgtatgttaccggcagtaacagtaagatgttgtcttctgatgtggttacttatttccgcgatagagggagtgaaatcaaggtctatccgctttcctttgctgaattttatgcatttgccggattggattcatataccgctttgggcaaatatctaacctatggaggaatgcctttggctgtattagagacaaacgaacaagagaaacgtaagtaccttgtcgacctgcataagaacgtgtacctgaaagatatcgtagaacgatataaattaaaagatgatgtggcgatagatgcgctaacggatgctgtttattcagtggtcggctcgctatctaatccctataaattggccaataccataatttccgtaatggggctaaagaccaccgataaaacagtaaaggcttacttgggttatctggaggatgcatatttaatctctgttgctgagcgttatgatgtaaagggcaaacgctattttgagaatatcaagaagtactacgccatggatcttggtttgcgcaatgctcggttgaatttccgtcagcaggagcgttcccatctaatggaaaacatgatttataatgaactcatccgtcgtggctataacgtggatgttggtgtggtggaagtagagaggatggtaaatagaaaacgacagcaagcccagtacgagattgattttgtagtcaatacaggtacagaacagatttacattcaatcggcgctcaatgttgacacaaaggaaaaaatggagcaagagacattctctttgcgcaatacacatgactctttccgcaaaattgtgattttggatggcaatgaactcccgtggatgaatgaagaaggagttacatttatgggagtgatacctttcttgctggagaaattagtataaccattcacgactcgtctacgggagagatacgggacgataacgagtaaaattttgccgataaaaggctacttttggcaaagggaggacattaatagatgaacgataacaacggagagtgccaacaaatctctaactctacattcgccaatccttaaacgtccgtagcacactacacaaaaagtgcagttcttgctacaatctgcacttttatttgtatatctcaattttttatagtaattttgcaccgcaaaattgtttgaataaaatataataccatatgacaaagaaaattctcggattagatttaggtacaaacagtatcggttgggctattgttaacgaagaagatggccaaagaaaattgtcaaaagccggtagtcgcattattcctatggacgctacgttgatgggagattttgagaaaggcaatagcatctctcagactgcaactcgtactcaagcgcgcggagtgcgtcgattatatgagcgacgcgcgttacgaagagagcgcctaaatcgagttttaaccatcttaggctttttgcctgaccactacctgtcagaattaaacagatacggtcaacttaataaaggtgcggagcctaaattagcttgggttaagcaagacggagaaagtaccttcctattccaacagtcatttaatgaaatgacccgcgagtttgcacaagtacatcctgagttgttatccaaaggcaaaaaaatagcctatgattggacaatatattatttgcgtaaaaaggcgttaacacagcctattagcaaacaagaattagcatggattttactgcaatttaaccaaaaacggggttacaatcaagcacgtggtgaggaggaagaaaccgagaaagagaacaagcgccaagagtatatttgccaaaaggttgtatctgtacgtgatacaggcgagaaatctaaaggaaaacctttatatgagattatcttagagaacggatggtcatttttcaaaccaagttcctctcctgttgattgggaagggaaagttaaagactttatcgtaaccactacacttaatgagggtggctctgaagctttggataaagaaggaaaagtaaaacgcacattccgagctcctgccgaagatgattggggactgcgcaaaattaagactcaacacgatatagatgtcagtgataaaactgtcggtgaatttatctacgctactttactgcataatcctgatcaaaaaataatcggtcaattagtacgtgttgtagatagaaaatattacgaggacgagctacatcgcattttggaaacgcagaaacaatttattcccgagttgcaagatgcagacttgtatcaagcttcaattgaagctctctacccacaaaacgaggcgtatagaaatagcatcgctaaaaaggattttacatatctgtttcaaaaagacattattttctatcagcgcgacctaaagaaaaagaaatcgttaattagtgaatgcccatatgaataccatgtttacaaagacgaaaatagcgaatggcaacgtaaatatctcaaatgcattcctaagtcacatccgttatatgaggagttccgtttgtggcaatttgtagagaatatggttctttatcgccaaacggcaaatggtatgggtaaagaagattgtacaaatgaacttattcccaataaggcagaacttgttcaatggttgttgacgcaaaaggaagttagtgagaaatcgctacttactcatttgataggcaagaagtacgttggatattcttggaaatacgtgcaagataagagttatcctgctgcaccagtcaccacactcataaccaatatcctcaccgaagctggtggtagtgtgacaactgaaaagattgaacatatttggcatatgctttattcaatttctgataaggcacaacttactgctgctctaaaacattatgcagaagaaaataatttatctgagatttttgtagaaaaactaggtaaacaaaaaccctttgcgtctgattatggtgcttatagcgaaaaagctattagaaaattactaagtcttatgcgttgtggagaatattggagcgaagataatatcgatgaaaagacaaaaaaacgcatagaacatattcttactagtgaagtgaacgagactatcagtgaccgcgttcgagaaaaattggcagaaaagaacgaagtatgtgattttcaaggattgcctctatggttagcggaatatgttgtttatgatgtgcgcagaaatgacacaaaatgggagaaacctgaagatattgatgcctatctgcaagcattccgcttacactcacttaataatcctattgtcgaacaagttgtgatggaaactttgcgtacggtacgcgatatctggaaacaagaaggacgtattgatgagatacatattgagttagctcgtgatttgaaaaagaactcagatcaacgaaaaaaggccatgctgacgaatcaaacaaatgaaaaagctaatctacgcgcaaaactattgctgcaagaattcatgaacccggaatatggaatagatggcgtacgtccttattcaccaagtcaattggaattgttccggatttacgaagatggtgtactgagggctaacaataccgaagaagatatacaacgcatcataaatgaactctcagaattaaaacaaccatctcccgctgatgttagaaaatatcgtttgtggttagaccaaaaatatgtatccccctataccggtcagattataccattggcaaagctcttcactcctgcttatcaaatagagcatattattccacagtcgcgattcttcgatgactctatgtcaaataaagtgatttgcgaagctgaagtaaatgctcgcaaggatagaatgttagcacatgagttcatatctgcttgcggcggagaaaaaattacattatcaggaggaaaagttgttcctattttaactttaggagaatacgaggatttagttaagagaaattttgcaaatgatgagttcaagcaagaaaaattgatgttggatgatatcccacaaaaattcatagaccgtcaaaagaacgacactcgttatataagccgtttagtgatgttccttctaagtaatatagtacgtgaaaaaaatgaaaaaggtgaatacgaaccggaagctacaagtaaaaacgtcattccatgcaatggtaatgttactgcacgccttaaagaggattggggaataaaagatatttgggatcaaattattctacctcgtttcgagcggctaaatcaattaacaggtaaagacatctttacctataataaagacggtcatatagctcctaaaattcctattgaattaacaaaagtaaataagaaacgtattgaccatcgtcaccatgcaatggatgctatcatcatcgcttttgctactcgcaaccatgttgccttgcttaataacgaacatgctttagatgggaaagataagttgcgatatgacttgatgatgaaactacgtatgaaaggtaagtttattgcaccttatgaaggattccaaaaagacgtgcggcaagttttggaaaatataatagtcagctttaaacaaaatttacgagttattaataagagtaataatcactacactcatttcaagaatggagaaaagtgtgtcgaaaagcaaacaaaaggcgataattggtctattcgtaaatcccttcataaagcaactatttttggcgagataaatttacgccgaaagaaatatgtcaacttagcgtatgcattacagcatgttgatgatattgtagaaaaggatttacgtgcgaaactacgtgaattagttgcagagggaaaagacgagaaacaaatcaaaaagtactttgtttctgaaccagatgtttgggcagatgttaacctcaagaaaatagaagtttattactttacgaaagacaccaaggaccatttctatgctgtaaggacagatgtaaatgaagattttactgctgattatattcgtaataaagtgaccgacgaggggatacagaaaatactccttgcccacattgagcgttgtaataatgatccgaagttagccttttctcctgatggtattgagcagatgaatgcagatatcgtacaactaaataacggcgttccacataaacccattcgtaaagtgcgtatttttgagaaggcagaaaagtttgcaataggtcaaattggcgcgaaaagcaagaaatttgttgaaggcgataaaggaactaatctatttctggtcgtatatgcagccattgcttcggatggaaaagaagagcgctctgttgtttctgttccatttagaagtgctgtcgaatgccagaaatcaggtttgacggattggaagatcgtaattgacaattgggtacgtgataataacttggtcgacaataaagcttctttaaaatacattctgtctcctggagatttagtatatgttccctcaccggaagaaatagaatgtggagaatatcgtttatcaagagatagaatatataagttagtttcattcgcagaccaagcagtgtattttgtacctgcatcggtagcatctccaatattggataaagtagaatatacacaattgaataaggtttctcgcactccaaacgaagagttgattcgagatatttgtattcctattcagatagatcgattaggtaatattctcaaagtattagtatgataaagcgcgtcattggatttacaaacccgacttatctcagcctcaagcagggacaagttgtagtcaaatatccagagattgaaaatagcgaacatctatctgatgccatcaaagccgaaagtgttcgcactttgccgatagaggatatcggtgttatcgtcttagaccataagcagataactattacaactgcattaatggcggcattgcttgataataatgtagctattataacatgtgatgacatgcatttgcctattggccttacacttcctttggacgcaaaccatattcagtccgaacgatttagacagcaaataaatgcgagcgaaccgttgcgcaaacagatgtggcaacaaaccatcgcggcaaagattgccgggcaagcacaattattaggtaagcaaggtgttgaaaatggaaatatgttagcatgggcaaagcaggtcaaatccggcgatacggataacatggagggacgtgctgctgcctattattggcgaaatatatttcataacccgaatttcatccgcggaagagaaggagaaccacctaataacttactcaattatggctatgccgtcgtgcgcgctttaatggcacgtgcacttgtagctgccggactattaccaactctcggtattcaccatcataatcggtataatgcctactgtttagcggatgatattatggaaccatatcgaccatatgttgatgaaatagtcattgatttaatacatcgcgccgcagatatatcacaactgacaacagagataaaaagagagttattggcaatcacaacagtagatgtgatgattgatggtcaccgaagtccgttgcaaatagcagtgcagacaacagcaaacagcgtgcagaaatgtttcactggagaagcaagaaaaattatatatcccgaatggtaaaagcgtgtcctcgtgatacgctttttctttatggaccgttttagtgaatatagaattatgtgggtgttggtattttttgatctaccaaccgaaaccaaaaaagaacggaaggcctatgcgcaattccgcaaaaaattggtttcggatggttttacgatgtttcagttcagtatttacttacggcactgccccagtgcggaaaatgccgatgtacatatccgacgagttaaaaacatgttgcctcaatatggcaaagttggaataatgcgagtgactgataaacaatttgccgatatggagttgttcgattgtcaacatcgggcacctttagaacaacccgtccaacaattggaacttttttagaacaagaaaagtggacaaaagaaaaatgcagacgaaatcaatcgcctgcatttttcaatcctaaaacattacgtaatgttgtgatatataaccttttagacaaactaagttgtcttaggactttatcgattannacaaatttgaaggatatacacaacttttgctgtgtaggtcgttttttccgacagttgtcttaggactttatcgattacaaatttgaaggatatacacaacccgaagacccctttaattatgctgcaactgttgtcttaggactttatcgattacaaatttgaaggatatacacaacaaccgctacagtataaacaaagaattcaatgttgtcttaggactttatcgattacaaatttgaaggatatacacaacaataggtgaggtttccataattgtttgattgttgtcttaggactttatcgattacaaatttgaaggatatacacaacaagttcgtttgtgcttgtcttattgttgtagttgtcttaggactttatcgattacaaatttgaaggatatacacaacgacttgccaactacaatgaaaagtaaaaatgttgtcttaggactttatcgattacaaatttgaaggatatacacaactgcaggtctattctcacgaaccgaacactggttgtcttaggactttatcgattacaaatttgaaggatatacacaactactccgtcaggctcatgccgagaatcttgttgtcttaggactttatcgattacaaatttgaaggatatacacaacatgccgttactaattccctcaatcgcgtcggttgtcttaggactttatcgattannnnnnnnnnnnnnnnnnnnnnnnnnnnnnnnnnnnnnnnnnnnnnnnnnnnnnnnnnnnncaaatttgaaggatatacacaacccacctgggggatatgcgaaaccccaccgtgttgtcttaggactttatcgattacaaatttgaaggatatacacaacattttctaaacggcgccggaggcgcaaaatgttgtcttaggactttatcaattacaaatttgcgtatttaatatgtcaaagaacgaaaaacgctgcaaaattactatttttttgccaaatacacaaaaaaatgcttaaaaaatttgcacgtatcaaaaaaaagcactacctttgcaccacaatttgaaggatatacacaataaggattattccgttgtgtaaacattcagagtggggctcatgtctcgctcttttttcttcatttcccatcgttcaccttgtgtctttcccaccttcctgtctttccgcattccatcgcttataccgttctcacacaaaaaaatagacaacctatcacccaccttcctacaaatttgctacatacatagtagcctgtatctttttttcttcttcacaacgtcacacctccatacaaaataaatacatgctactcccaaccccttctatttactactattcttactagtagcctgtatcttttttcttcttcacaacgtcacacctccatgcaaaataaatacatgctactattatctttctctcctctactctacagcagcttgttataacagtaccctgtatttttttatctaaaatcatctagcatgtatttttttgcccaatcgcttgtgcatgtcaaaatattgttgtacctttgcagccacaaagagaaataaaccatgaatatcaaaactaccaatctaatccgcacatcgcagagttgggatggtgcaccattacctgacttccctcaaggcaaaccggaactgcaagtaatacgcttggattttcctgtcggagcgaaaacaggttggcatcatcataccgttgttaactacggcatcatgcaacgcatccccggtggtcccgctcactggctattccgcaaacaagtcatcaaagatatacaagatacgttgaagaaataatatcgttttattttcgctgtaggtatgaaaactataaaatatcacatagtaaaattttgttgctgcttttgtctgctcatatatagtctttcggtaggagctgctaatgtaggttttcttggtatatcattagagcagaattttgcatcgtaccgtagtgccctcgaagcaaaaggatttgtctattttgctaaagtagatgactatgtgctgtttcaaggagattatatggggtataaggaagtgcaggtacttgtgatggaagcatctaacaagcgttccatcacagacgtgtacgtgattataccgacctcttcttcaaaaaatgatgcgatgcgcctgtttacctacttctgcgatgattttcgcaaacaatatggccaacctttaacgaccgagaaagggaaatctgaaatttggcaagtgggaccatatgttgtagcaacgcagatatcgaaggaaaaggaggtggtgcttctctatatgctacatggcgaagagaaagtaaatgatttccaactaaccaaagaagccgaacgtgagatacaacatgcggttagcaaagatcatttcttaggaatatctaccaaattgaaccttacggattttggtgtggaattggaagaaaagggttatatcttcagggaggaagatgaagaaatgaagacctatgtcggagaagtagcgggagtgggacaaacaaccattgttgttacttcgttagatgatcagcaaactatttcggcaggactcttttattttcctcctatttcagattcgcaacagaggcgtgctgtgtatcaacgcgtacaggaactattagtggcacagcatggagaaccttcgtatgtcaataaagatgacaatagttttgtctggttcaaaaacgattttgccattattttgtacatagctgatgggaataaaatcgcctttatggacatggtgtctaaaaacggagagtcttgggatgatattgaaaaagcagcaaagaaatccgaaccgacagcgaactatacacaacgtatggtatctgcaatcaacgaaggtcgttaccaaacggcggctgaaacggcggagaagatttttcatattgacgccatccctgccgtatcctatctggatattgatagaatgattgcgtatattcaatggttgcgttcgtcgcatatggagcatgagaacagtatcgttctgcgtgccgctcgcgttatgcaattacaatgtcgtcaagagatatcaaagaacaattatatcgatgcccaactatggggcgattttgcggatttgatctataaatcattattgagcaaagcacacccatggagaaaagagatggagcaggatcatcaagacttctttactcccgctgatttagccaaaagtcaacaacccttagcggctattgcctattatcagcgtagtttacaaatagctcaaatacttcgtggttcgcgcagttgtgagtacagtcagacactatttgatatgggcattgcttacaatggagtcggtgattttgaaaaagcggagcagtattgtaaacaagcattggacttaggtgatgtatgtgacattccgttggcctatattttgatgcttagaaatatagctaatatctatggtcaaaacggtaagtaccaagaggccgaagaaaccgatgctatgatgcgtaaagaggtggcgaaactatatgatagtcagaatagtgatgaatatatccagaccctgcacaatatggcagtgcaagcaatcaccattgctgattttgaagaaggagatctctatctcgatcaagaattgcaggtgctccgcaaaatccatcccgaaccgtacatccaatatgtgattgcttatttgggaaaagcagcggtgtgcacacagcatagcaagaaatacgaccaagccttggaatatgcgaaaaatgcattgaagaacttagtgagtgataatccgatgcataataagatatacgagtgcaaatgttacgagatgatgagtgtcacctatgccgagatggataattccgaccaggcaatcctctatgcgcgaaaagcaatgaatatctccaaagagctctattctgaccaacatgtaaattatgccaagactctgacttatatgtcgtatgcactctataagaaaaaagattatgcgcgtggattagagtataatctgcaagccctccgtatttatcaggatcatttggggaatgatcatccttctatcagctatatactttttaatataggaggtgcttatacccgactccaacaatatgacaaagcggagccttatctgcggcaagccgtggaagcggtcaagaagaattatctgacggctctcaattatatgtccgagcatcagcgtgagaaatactgggagaattccagagaaatctttgagcatgaggagattcctaacttcatctatcaaacttatgcgtctcatccctcttcggtcatgttcgcttatgataatgaactgttcaccaaaggtctgttgctcacttcttcgacgatattacgccgttctattcaagaaagtggagatccacaactgaaggcagatttcgcagagttgacacgacttaaaaatgctatcaatacgttggagctgaacggtaacgcacccgaacaagtgcgagcctatacccaacgtgccgactcgctggagaagagtatcactaaacgcagtgccgctttccgacaaaatgaagccctatggcatatcaattggcaaaaagtaaaggataatcttaaacctgaccagttagccattgagttcgcccgtctaccgctttctaaagatacaattcaatatgcagccctccttcttcgcaaggaaaatacacagcccattttggtgccactctttgaagagaaacagatagagaatgagtatccatatatatgggcgaagttgcaaccttatctcaatggcatcacgcatatttttttctcgccagtaggaggattgcaccaactgccgattgaatatgccgcatatgattctcttagcacatgggcagaccattatcggatgatacgtctctcttccacccgtgagatagcgatggatcatacaccttctacctcttcctcagcggctctcttcggtggtatttattatgatgtggatgtaaatgaattgactgcacagagtgagacctaccatcatagcggcatacgggcaacgcgtagtatagtggatgagagtttgcgttcgggagttcggtatttgccaggcacaaaacgcgaagtggaagagatacaagccattctccacccccaacatatagtgaccgaactattctcaacctcggtggcaaatgaagaagcgtttaaagctctgaatggtgaaaaacgcaatatcattcatgtcgccacgcatggtttttattggtcggaagacaaagcgcacaagcaaaaatactttgcctctcaatcaaatgctattgatcctcttaatcgcagtggattgctctttgcaggtgctaacttggccttgcgcggacatagcgatgatctgccggaggatgtgcaggatggtattcttactgctaaagagatctcactcttggatcttcgcgaagccgatatggtcgtgctttccgcatgtgagacggcaaaaggagaaatcactggtgaaggtgtatttggactgcaacgagcattcaaaatggcaggtgtacaaacaattcttatgtccttgtggccggttgatgatgccgctacacaactcatgatgacagagttttatcgccattggatagagaaaaaagaacccaaacgcgaggcgttcgagcacgcacggaatatagttaaaaaacaatattcagacccaaaatattgggcggcatttatattacttgattaagaaaacaatacttatatgtgtaaaattgattggcaaaaacaatattcgacacatccactttggttgtgggtgcttgatatagtagcaatctcgcttctgaccattcttttctcatggttattagttcgcagtacttttactggagatttatttacctctgcggcaaagattgaaacacctcagcttatagacctttatacccttagtactgacaatgccaaccttaagaccgtaagcgatgttgtactaatgcctactgatggttgttcgcggcaggatatcgcaactgttctccaaacattacagtcccttcccgttgcggctataggtgtggatgtcacttttccgtatcatgatagtgaggatgagccgttgcttgatgcaatcaaggcagacccacgtatcgtgatggcctcaaaagaggatggctcgtactttgaacaggaactatcaggacagggagtcctatttggctctattctactcgatatcaatacccgttacgatattgttcgcacttttacgccttcgcttgtcggcatagaggatacatttccttccttcgaagcacaattggcgcaactggtacagcccaatacatgtgacttatttcctatggacgagtcctcttatattgcctatgcgcaagtgaagtttgataccatacctgcattagcgttattgtcagaagatgtccgcatggatgagataacagaagtgctgaatggcaaagttgtgcttctgggcgacttggaaacggtgcaagatacttaccgcacccccttgcagccggatatgcctggagtcgttattcatgcttacatactcaatactattttgcagcatcgcctaatcaatgaactacctacctgggtgagttggctgctcgcttgtcttgctgctttcttgtttgcatggggactgatttttatcaaatggaagaactttgatgatgcagagggattggtgctacgtaccgtccagatatttcttgcgcttattgtcgtgatgataggcgttcttgccttcaattttggcgattactatattaatgtcgaacccatattctttgcgctggccgtacaagctgttacgctagatatatggatgggtataatgaaactaatttataagccgaaatgaatatacttcttgcgattacaaccgcactctgtgcgatttttgtagagtccttctctggacaggtaactgttaagccgcaagggactgaacaatggatgactcccactaaacaacaaacgttagataggagagattctattcaattaccccatggggcgaaactaattgtagttgataacgaaacaggtcgactctacacgttcagttcccctgagaaaggtaatatcaatcaatgtctcgttagtgcaaaagctagtgttcatgccactttacgtagtttggcgtatcaaatgaaagccaatgcgatggggcaaaacaggcaagctcactctcaatctgtgtatggaggcactatacgctctatgagtcctgaacttcgggattattataatgaacgaatagcttgcgctatgttggcggcggcaaaacaaaataaaccaatgatgcccgatgtacaactgcgctctattgataacgacggatttatttccttcgcgatagataacaatagtaacgactcttgttacatcaacatcttggcggtcaatgatgcaaacagtacggtaagtctctgtatcgttccaacaccggatatggacgaagatatgcttctgcttcctccttcacgaacaatggagctgcctatgtttcagtttgttccgcaaccaaatgtgcgctacgtgctgattgcactgtcgctcccctacattcctgctgaggaggaacaacttctaaaacatcccgaagacttagattgtcagtaaaattaatactatgtatcactttgaattagtaaatacccgtaccggagaaacgggtgaaatgacccttcccgaagaactgaccatcgaggacttctgtagagagctgcgcggcgagatggggctgccatacaccctcggctcgcgagaccaccttatgatcgacaatcagaaccgcatctttatgcaggacgaagaggtcatcgagaatcatataacgatgctgtggatgggaggggatgacccaaacgatcctgaccataaaggtgccatctaccacagggaatcctattttccggaagaccaacataccctccaagacctcttcccgcaagtcggcgcaaatgtcctctacggccaagaccacgaccatattggctgcaagttgatagagataacagacgactccgaggagtaaatggttaatatcatcggcgacatacatgggctggactgctggaaacagttggtgcgcgaggatgcaacgaacatcttcgtcggcgactatttcgactccaaagatggaaaatctcaggaacagattattgccaatttcgaggatcttgtcgcttataaacagacacatccggagaccgttctgctctacggaaatcatgacctaaattatcttctcgacaaagattacaagagtcgcttcagtcatcccgaacgccgcgaaatataccgacagttattcgctgaaacggagtcgctgttctatggtgttgcctatgcgatagatgataagacgctggtatctcatgccggcgtgaccaaagagtggtacgagaaatatattggtctgtatcacggcgagaatccgcaagtcgtggcgcaacaaatcaatgagctgtggcagacgaacaaaacagccttcaccttcagcgcgaacgtctccattccacgtgacgtatatggcgagtcccctacgcattcgccactgtggattcgctcgtggatattacctaatcacaatctgtttgctgatactgaca

SEQ ID NO: 1181 - DNA, 24425 bp, synthetic construct
  misc_feature 1..24425: note = Synthetic
  source 1..24425: mol_type = other DNA
tcctaaaggcatcggatgatatttcttttattaaattgaaggctaaagttgagacagtatcattggttggcatatcttttcgtatattctcaatgtttgatactcctaaaggcgcagatacaaacatatctacagaagttataatgtctttccatttttcccaatcggggaacgcaaaattgtaatttaatgttgcacgatatcctcctacaaaaatttctgaatcaccggttaatcttcctcccgaaaatttataaattatatttttcgcccttattatgtaattagtaggcataaataaaattggtgcagaatgtttaaccaatgtaccatcgaataacctgaatgcatatcttataagacatgcatcaaaaaacatccatccataacctttatgttcaataccacttgaaccagtccatccattgactaatttattcattccaatgttaaccaatcctttagtcgcatcaataaatgagtcttttgttattgttccacttccatactcatcatcgaatctaaaccaatgagtctgtcctctgcttgtgacaggcatcgatcctatcataattggaggtaattcgggaatttctcctaaaaacctatattcggagttatgatagaataggtagaatacattatcttcggtaacaagagaaatagtattacctgtctgttgtatactgtgtattttatcctgaatgttttcttgtataagtttaggtttatcactgcgtatatcccaatataccgaagaggtttcttcgttatttacaactcctatccagttcttatagtcattgttttgatgtacgaaaacaatgctatacttctgtgatagttcctgcacaattttacgtggtgctaccggatgtaatgctccgtttttggagcgtaggtttacgagtgaataacaatctccatcgctgtatgttgatgttgttgttattccattaatgggtgtttggattctagccatactgtaaattagttggtttgtttttgattataaaatgatttaataagttctttgtactgctcaactagcggatgatttgtttctatgaggtttctgattgtcctgatcccgcttagtatagtttcgggtttacgcccatccagttgtgatatttttcgataaccttttccatttttatagagatataaccaatatagttctctagcaatggcaatactctcttttcttgaccttccttttatttcatcttcgggaatacctaccttttgtgaaaattcagctaatgacatttgctccataactgccttgtgttttgattagtaagacaatgataaaacaaaaatcagcccatgtcaacaggctgatttcaagatggaacaatgtgggaaaatgtgggaaaaggaatatatgattatttacggattattaactaatcatcttcatcattttcttcctcgtttttaagcaactttgctttcatttcattgatagcagtaactcctaacatacgagcataaagaagtgattgcttcatattagtatgtcccataatcttaggtatagcctcaatacttactccattatttatgagatatgttccgaatgtatgtcttccggtatgtgtggtaacatctttttcaattcctatataactaataagtagttttagatagtcattgtatttttgattactaataactggtagtttataattgtatttatccagtatttcctttgctttaggaagaacgaagataacatatggcactcctgtcttttctctattaccatgtatttgttcttcgccattgactatattaatatcctcttttttgaagcattgagtatccttataggataatccagtgaagcattgaaatataaataaatcttttactctttgtagtctttctttagaaactccttttggctcataatcaattatttgttttacttctgattcgacaagataaaccggatcttcggactttcctttcttgaatacaaaatcatcgtatggattacgctctatgagtccacgccttcttgctttttctatatatcctttaaacagagagtgacgtttgtataaggtaggttgagacttgattgttttctttaagtgaagatcaaagtcttcgatattggcaaaagttagatctctgaatgtttttattttcccaaactcattcaaacgcttaatgaaggaattgttatattctaatgtagtataggacacatcacgtcttttcaggtcagcccggatgaaatctacaacattggttgtcatattctcttctgtcttatcccaattctttacatcatcgatactttggcattcatcagaatatatgaatgcttctaccttattgtagatattatgcgcttttgatttcactacggcagcattgggatgtttctttactgaaaatccggaatctgaagaatattgttcccgaataatttttacaccggtagatatataaactttcttacggcttaccttatcgaaaacttccacttgtaccaatgcttttttcttagcatcattctttgtctcccctttgcggtcaaaaacaaaccttatagacagtccatccataactaattaatgattagcgtttcagacaaaggtattaaaaaatatgatacttgttctaccgctttttctaccaactacgattttggtagaactttaatgaaaaaacgtgggaatttgtgggaaatcgtgggaaagtaaaaatagattgaaaaacctgttttgaaggtattaaaaaagggaaaacagcgttttaaaccgttttcccttatattactcagcggagaggaagagattcgaactctcgatacagttacccgtatacatgctttccaggcatgcctcttcaaccactcgagcacctctccaaaacatgtgggtgcaaagataacaggatttttggttagagcaaaagacttaaagaatagatattaataagtgttgtttaaaatcgattataagaaattagactaagctgaagagggttgagaaaaagataaacgacgtaagtcgcaattgattaatgcatatatatttttatatttttgtagaagggaagccttgttaatttgatatagagagaaacaaaatatgtttataaagtcatcgtttttttgtgatataataaaaagggcagggagcatattgcttcttttaatgttaatttataccgaagtgttagcattagggaataactttatctttactccggtaaatacatcgagtggtttaagcgataatcagattcgatatatattacagctttctgatggacggatggtatttacaacgagtggaaacgttaatatttacgatggttcgcatttctcatatattcatcggagtaccgagcatatttatcatttgaatgggtacgaaggacattaccgcatttatcaggatggagattctcttttatggattaaagaccagtataaattaatgtgtatcaatctttatgaagagaaatatgaggaaaaactggaaattcgttttcgaaaagtaggagttgaaaaaacggtagtagatatgtttttagacaatcagtcgcggatgtggttgcttacagttgacggactattgcaaacttataattctgattcttttgatttatcttttagtagagggaagttacaagatttacagacgacagataatcatctttatcttttctataataccggagaggttgtgtgctacgatctgaaaacaagggaacgtttatataatattgcagcatatcccgaaacggaacaagtgtactttgaaaaaacttcccttgttgttaaaggagaaaaaggattttatcaactacgcaacggcacgcgaggcggttttttctttttcgatcctcagaatcgagtgtgggagaaaatacttgatgtagattatgtactgaatactcttataattacgcctcaggaaactgtctatattagtacagttaatggcatttggcgtattgaggaggaacaaaaacaatatattccggtattgagaacaacaaccggggataatatttctacagaaataagtacattgttttacgatcgtcaaggagggctttgggttgggacttttaataaaggactattgtattatcatccatcccgatataaatttatagatattggccgttcttcttttcctgagcagcagggaggcgatttaattatagaggcgtttgccgaggataataatggtaatattttttttaaatcgcagtcaaatatttatcagtacgataacaatactataaatgaaaaaaaagtagtatcagtttccccgttttctttatcgggagatgtacatcgggctttgtatcgacaaaaggagcgaatatatcagggaaatttatataatgcgctttgttttgatacacgaggttgggtttgggctggaacttcggatggattggagctttttatttcggaaaagcagaaaaagcaaaccttttatgtcgaagacggattatccaataattttgtacaggcgcttttagaagataaaaacaataatatctgggtaacaacaagtcatggaatatctcatattcaggtcgatagcgtaagtaataagcttcggtttattaattataatttattagatggcacattagaaggtgagtatgctataggttcagcctttgaagcaacggatggaaaactgtattttggaggagtagatggatttaatgtgttaaatccggatcaattagcctcttcctatttaccgtttaaaccggtacttaccgaatttagcctgtttggagaaaagatagaacaaggaaaaaaatatggaaatcgtatattattaacaaaaacaacaccttatacaaccaatatagaattggcatataatcagaattttttaagcttcgatttttcggcacttaattacagaaatcaagcgcaaacattttatagttatcagttggaaggcgttgatgctaattggcaggaaatatcagttggtaaacaaggtcgtgaaattggagcaaatggtattttgcacttggtttatacaaatttgcctcccggtaaataccaattaaaagtgaaggcttctgataatgctacccaatgggatgatcgggttacggaaataagtattacaatatatgctccttggtggaaaacaactatagcatatataatttatagcgttcttttcttatttattgttattgcaggagtaaggatttatatttctattacaaagaaaaaaatagagcggcagcataaagaagatattctgttattgcgtattcgtagtctgattgagcaatgtaatcaatacgaaaaagaagggaagcatcgttcttatacggaggattgtactctacttgtaaacgaagaatcgtcatccgattcagacaaaaaacaggagaactcggctgattctgtgttcatttctaaagcaatggatttggttgagagaaacctgaataattctaattattcggtcgaacaactcagtcgcgatttatgtatggagcgcacaggactttataggaaacttattacgttgttagatcagtcgcctagcctttttatccgtaatattcgcttgcaaaaagcagctcagctaattttggaaaacaagctcagtattacagaagtatctgaacgggtaggctttagtagcgctagttatttaagcaaatgttttcaggaaatgtacggttgtaaaccttcggaatatggaacacagtataaacaatcggaatgaaacatagtggcgatatttaatttaacggttaagagttttagggctgtgtttaagtccacatgttttcatatatgtcagaaaaacagtctacttccaatacttcaatgccaactttttctaagaagaatttcttgcctaaatctgtatcgttacagcacttgggagtaagataccagccattctgttttctgtcatcgaactttctgaaatactttgtgcgctcaattaatagccagcgcaggaatacttcattttcttcgagcccaatgccgaaaatgaataaagatttattgaatattatgtgtaaccaacttttattgcctcgccaacaatttgcgcttttgctgaaaaacagactgtcttcgttccctttgtgtaataatccacgtgtgcgttctacactgcccatataatggcttaaaccaagacgaatgctgcgatgatagttcatcattccgttaatgtaccatattccaaaaccatctgtagggaattccaattgtttgtctccatggtaactagtccaagggtaaaagtctgtaaatcccttgtcctcagttttgtacatattgtagttccccgttttagcgaatgtttcttcgaagttggtggttaacagtggtgcatttatattctttatataatcggttatttgtttgtgatggggtaatggctcccaatcttgtagaagcttgacaacttctttttgcagattatagttgtttcttttttcgagctccagaatatcatagaattcagtgatggatattccttgtggcttttgcttaagtgtttgagaggatacttttttccacagttccattaacagatcgtcccacgacagggctttcggattatcggggtagcggttaattccgttgcctattatgaaggctaaattttccctgttcgattcgatgatttgtttgatttctttggtatttgccatagggttggttctgtttcattcatatgtttccattctttcaaatgctatttttagtttttttgaagcatttgctatcatgtcatgtgtgccgctgccgtctcctacatatttcacaaccatttcggtgtattctatcgcttctataaatgttttgtccgatgagtcggtcttctttgcgcgttcgagtaaaattagcagttcgtccaaatcctcaagctcaggaaggttacccggcctcattgtattgatagccgcattgagggcaacagcggctgcattaacttcgggttggctatgagtttcattttcgagcacttttgcggcagaggtaagctgcttgataaggcgccgatagccataaggtgcccaaggtgagtgctccggtacttttacaacaagtgtattccatacttcctgagccgtttttctttcttcggctaccagtaaaagctctttcaatgtagctatatctaccgacgaaagttgattatcagctgcgacattcgagccgtcggtaacattgatcctgaaatagtgggtcgagttcttgtggcgataatagtcggggaggaatgttttcccatcgagagtgagggaataaacattgccttcagcgccttgtgaatttttatcaggtttgttggctacaacattgttcaaatgagaatcgatattgataattgctttatgccaactgtctacatcggttgcagtcattgctaatggaccatacataagggttcctgcccacatcggtgtaaacagggtgtttgtttcgttctgtgctgttgcggcaatttccatcttatcgggtccgtagtcgatgtgttttgtaaaaggcatggtaatttccacaacatctttgtttgtccaattgcgcaaaggaatagtagcataggttcctggtttatagtaagaagctatcgaaactccgttgagctttatgtcgaagccttcggttgcccagtaaggaacacgcaatttcatgttgaatttacccttgcctttggttactttaatagacgattgttcagcaggccacaggcattcttgttgtattgtaatcttttgggcgtcccatgttaatattgtcggcatatacaaagctacccaaagtgtattgttattctcggaaacaaaataggccgattcctgatatttaacatgattctcggaaccggtaccgccacagcaagtcgattgcggagtatgattgccccatgcttttgaagcatttaatcctactgcgtagtgataagttgtttgataatgagtatgatttaacgaaccaactaattggttgtaaagaatacgttcgtaatagtccatatatctggcatcatcggggttaaagcagttgaggtcttttgttagttttgccaaattgtaagcgcaacaagtctcgttgatatgtggtgacggatgcaggttgcgctgactgtcggaagtgacattcgtagccatactaagaatttgcgtatagggttggcggaacatttcgccattacccacacctcctgaagagtagcggtaacggccttgtatcatttcccagaaattttcggccaaattataataataaggatcttgatttcctctgaaactacggagtgcacttgtgattttcggaatgtgttgattggcatgacgtgtacgaatgtcatcgatgtttttagatagtggatcgtaaaacgctggactgtcgaaataagtagaggcttcgagtaaacgctttttttcggtagggttgctaaccatctcagataggcgcgctaaagattcgccggttcctccatcttcgccggcaatgtagatgttccacatttcgtaacggttaccggggcgtgtcctacgttcatcttgacttccatcggtttttacataagtccgatagtgtaaccggttccaaatccataaacccatatctttggctataagaagggctttatctgcaatctttttatcatcaatgtaagtagcaatatcaattagtccggccaattgtttatgtatggagtaataaggtgcccacacccagtctgaattgttgtaggcacggtacatttctatcaaaacaggatgttgtgccggaatagcgttaaggtagccgtagccgtattttttgtattgtgtcttgtaagtatcgaaatcttcccatgttcctttcatttgccgaagctcttcttccggagcaaaatcgcgggcttcccagtatcgtcctaactcttcatcccaaataaaggttcgctcctgacattcacgtaattcgtttaccattcgggtaatattgttgcgtaaaagatttttttgttcagggttggttgtgcttgcaaaagcaaaagccaacgctgacatgtaatgccccgaaccatgtcctttcagtttcgttgttggagaatcccagccatcggcttgggtatagccgtcggtactcaaaccgtaagcatcacggtagttataaagttgttgagaaacatcccagctcataatctcacggatagcaagttcacggttagaagtaagtctattgtctcctgtaatggttactttgttcaaaggaatcggctcggcaatcacagttttggatggaatatggtatggttcgccaactactctgactttggctgtaatgggatagccgttgggtgttttattgtcgccggtaataaaacctgttatggtgtattcatttccgaccggatgcagagccggatcggcttggcttagttcggtggtcagcgccgaattagaccatttaacctgacgatattccgatttgccgtctgaataggttgtccagacctgataaggaagtcgtggtactgttcctttcggacattcgatactgatcggttcaatttgagcgattgtccgaacacttatctcagttgagaaaacaggacaaaatgagatcaataacaggaatgatattaatgtatttttcaaaaaggacatgttcgatcttatttatttggtggctgtttataattgtgtataaaaataagtcaaatcgagcaaatttcataattcgagcgcaacagcccaaaaaggttttacgctctgttgttaatcagaggatttttggatcaagttcaagggggagatgttctgcttcggatttcaggacgggacatttagaaaaaaagaagacggaaattactttccgccgccttatttgttttcacaacggaataatccttattgtgattagctttcaatttgacaaaaatagttctttttatgttaaaatcaaattattttcattaaattggtcgaaaaaacaaagaacttagattatatgagcaaaaaagttttaggtctagatctcggtacaaattcaataggctgggctttagtaaactacatagaaagtattcaggaaaataaatttcaaccctctgatattattgatattggcagtcgtatcatacctatggacgctgccacattaagtgattttgacaatggtaatctgaaaacgcaggctgccgagcgaacaagatatcggagcgctcgtcgtcttcttgaaaggtatttattgcgacgcgagcgcttgcatagagtgttacatattttaggctttctgcccgaacattatgctaaatgtattgattttcaaaaaaaacaaggtcagttcttacccaatactgagcctaagatagcctattttctaaacgatgaaaccgggaaatatgaattctattttaaagaatcatttgcagaaatgatacaggattttatcaagtgtcagcccgaattagtaaaagatggcaaaaaagtaccttacgattggactatctattatttgagaaaaaaagccttgtcggaacaaatatcgaaagaggaattagcttggctgattctgcatttcaaccagaagcgaggctactatcagcaaagaggagaagaagaagatataaacgaggctaaagaataccaaaaactacgagttgttaatgtagaggattcaggagataaaaaaggagatgctatatggtataatgtgcttctggaaaacggagatacttacaagaggttgagcagaatgcctctcgattggataggtaaaacaaaagagtttattgttacatccaagatagataagaataataacgaaagacgcacttatagtatcccgaccgaaggagactggacactggtgaaaaaacgaaccgagaaagaaatagacgaatcgtacaaaacggttggttcttatatttatgacacattattaatagatcctgatcagaaaataaaagggaaactcattcaaactatagagcgtacattctatcgaaaagaacttaatcagatactaaataagcagaaagaatttcattctgagctaaataatccccaattatatagtctttgtattgaggatttatataaaagtaataaggcttattgtaacagtatccgaaacaaaaactttgagtatctctttattgatgatattatcttctatcaacgcccgctcaagagtaaaaaatcattgatcgaaaattgccaatatgaatacagaacgtataaaaacccaaaaacagaagaagtcgaaaaagaatgtctgaaatgtatttccaaatcgcatccgttatttgaagaattcagactatggcaatttctgaaaaacgtgagaattatcagaaaggaagatcgtgtggatgttactgctctgtatttgcctgatgacgacagctatgttgcattgtttgatagattgaaggaaaagaaagaagtagcagagaagtctttattatcattagtgaaaagtgctaaacttaaagatactgaatatgcttggaattatggcgatcgctcattgccaatgtgtcctacacatgccgaaattgtaactcggcttaagcatgttaagttggatgaaaattttcttacaccgcaaatagaagaacatttgtggcatatactgtattctgtaagcgataaacaggagctagagcaggctctagaatcttttgctataaaatatgaaatagggcatctggacgaatttgttgcagaatttaaaaaagttaaaccatttgataaagactatgcttcatattcgtcaaaagcgattaaaaaactgcttccgttgatgaggataggaaagtattggaatgaaaatgccattgataaaaagacaaaagaacgaatcgataaaattatagatggagagcattgtgaaacaataaatgagataacccgcgaaaaggtgaaaaaagaactgggtgaagaattaaatatcacttactttaaaggattaccactctggctggcttgttatgtagtatacaatcgtcattccgaagcaagcgaaacaacaagatggaaatcgccggaagatatagataagttcttgaaagccttcaaacaacactcccttcgcaatccggtagtagagcaaattattacagaaaccctacgagtagtacgcgatatttgggtaaaacatggtagtttatcagaaatacacatagaattagggcgtgagatgaagaaccctgcaaataaacggcaggaaataacccgcaggaatctagaaaatgaaaatacgaacctacgtataaaagcattattatctgaattaaagaacgagggaaacgatgtgcggccagagtcattatctcaacaggaacgcctcaagatatatgaagaaggagtattaggttcagatatcgaaataccggaagatattatcaaaattacccgtcagaaacaaccctcacaatccgagattgtgaggtataagtgttggttggaacaaggatattgctctccatacacgggaaagcctatccctttggggcgattattcactaatgaatatgatatagaacatattattccgcaagcccgttattatgatgattcgttcagtaataaaataatttgcgaaagtgctgtcaataaagataaaggcagcatgctggcctgtgaatatatcagattgcagggagggaagaatattgaacttggcaatgggaaacaggtacttgttctttcttccaatgagtatgaggactttgttaaacgtaatttcagaaactctcctctaaaaaagaaaaaactgctgatggacgagattccagacgattttattgagcggcaaatgaatgacacacgctatatcagccgatatataaaaggattgttgtcgaatgttgtcagggaagaaaacgaacaggaagccacatcaaaaaatataatttcaattacaggagccgtaacatcgaaactaaaagaagattgggggcttaatgatgtgtggaataaaattgttactcctcgtttcgagaggctaaacaagctgactaactccgatagttatgggtattgggttgataaacagatattcagagttcaagtgccggaagagaatcagagaggattcagcaaaaaacgtatagatcatcggcatcatgctatggatgcgcttgttgtagcatgtgcgactcgctctcatgttaattatctgaataatcagtcagccaaatcgtcttttaaggaaacccgttacgatctgaaaatgaagttatgttcaaaaaacaagcagggaaagtggttgttcgataagccatggaatacttttacgcaagatacgcaatcggctctgaacaatattattatcagctttaaacaaaatcagcgtataattaataaatcgacgaataaatatcaaaaattcgaagatggtatcaagaaattggatccacaagcaagtggcgataattgggccatccgtaaaccattgcataaagaaactgtttatggaagagtgaatctgcagttaaagaaaatggttagtttgtctgtcgctttagacaattggaaaatgatcgtagataaggatatacgtgataaaataaaattgttgtttgatgaaaagtttgataaaaaacagattctagtctatttcaaaaaagttggaaatagatacaatcagagagatatatcaaagcttgaggtatactattttagtgatgaaaaagaacctttagttgcaacgcgtaaggcgctggacagtagctttactgttaaaaatataaatgctgtaacagatacaggtatccgtcaaatattgttgcgtcatctcgaacaatatcaaggaaaagcagaagatgctttttcgccagaaggtattgatgaaatgaataaaaatattcgaattctgaataatggcaaagctcataaacctatttacaaagttcgcgtatcagaaactttaggtaataaattcaatgtcggcaatcgagggaatagaaaggtgaaatatgtagaagcagcacaaggaacaaatttgtttttcgctgtttatcagactgacgaaggtaaacgcagcttcgaaaccattcctctaaatgttgttattgaaaatcttaagcggggagaaaatgccgcttctccgacaaatgagaaaggtgagagattgttatttactctttcgcctaatgatttggtatatgttccctccgaagatcaattggaaaataaggtcagcatagaggatgttgaaaagaataaagataggatatacaaatttgtgagttgcacaggaaacgagggacattttatcccttattacattgcatcggctatcgttccaacaacagaactgggggcaaataataaagctcaaagatcttggactggtgaaatgataaaagaaatgtgtttaaaaatagaaatagatagattaggtaagataacggaacgtatttagtaaataaccttgaaagctaatcacaactaactctacatgtgtatagtgagttcgagctttttatttactaaatacgttaacaaactgtctctctaatgggaagagaagatgttataaatgaattgtaaatgaacgcatcatccatccgactcttttatttaagtttcgtaaagatatataaatttatatatgtagagttataaaagttaaatttatttatatgtaatatttaacagcatcttataaacatgatatagtaatgtgtaatatactaaaaacgtatttttctttatttttaacgaaatacaatctgattattagcttaatagttttttgatgttttttatttaatctaaaaccttagtttatgataaagaaaacactatactttggtaatcctgcatatttgagtttggcgaacaaacaaatgataataaagttgcccgaagtcgaaaatgcgaatgttccagatttattcaaagaacaatctaaaagaagtgtgcctatagaagatgtcggagtggttattctagataataaacggatcactattacacatggactgatagaagagcttctggaaaataatgtagctcttgttacttgcgattcttcacgaatgcctgtaggattaatgcttcctttgtgcgggcattctacgcagaccgaacattttcgcgaacaaatggaagctacactacctcttaagaagcaactttggcaacaaacaattaaagcaaaaattaagaatcaggctattcttctagaatcaacaagaaatattgattcaaccccaatgttcaaatgggctgacaatgtaaaaagcggagattcggataactatgaagcgcaagccgcagcctatttctggatgaatattttttctgatattcctgattttcgccgccatagggaaggagtccctcctaataacttgttaaattatggttacgctattttgcgagcggtcattgcccgtgctctggtttcatcggggatgctgccatcgttaggcatttttcatagaaataaatacaatgcttattgcctggctgatgacattatggagccttatcgtccagtggtcgataaggttgtaattgatatagtcgacactcgttctgatatatcagagctgaatatcgaattgaaacaaatacttttatctattcctgctcaggatgtaatgatgaatgggaaacgacgtcctctattagttgcggcatcgcaaactgcggcaagtttatacaaatgtttttcgggagaattccgcaaaattgtatatcctgatataattgtttgattgcaaatgagcttatccagattaaacgaatacagaattatgtgggtaatggtattttttgatttgccgactgagacgaagaaagagcgaaaaatgtatgcggattttcgaaaaaaactaatacaagatggttttactatgtttcaattttcaatttacttacgacattgtgttagtagagaaaatgcagctgtacacattgctagagtgaaaaaaagcttaccaccaaaaggctatgtcggaattttatgtgttacagataaacaatttgaagcaatggaactcttttatgaaaaaaaggaaaagaatatatctaccccataccaacaattggaattattttagaaaacaaagaatcaggaattttcctgattctttgtttggatatacacatttttttaaatctaaattttgttgtaatcttttgatatatagcacttatattgagggtatactgtatatcctcagctaatatactaatttgaaagctaatcacaaccgccggttgtagggtcttcgtatattatcaactgtatatcctcagctaatatactaatttgaaagctaatcacaaccgccgggtggcaaagctgcgaaagcaaaagactgtatatcctcagctaatatactaatttgaaagctaatcacaacttgttgaacgaacctttgagtggtcgccaaactgtatatcctcagctaatatactaatttgaaagctaatcacaacgtcaagccaaacaggatttggaggatttgaactgtatatcctcagctaatatactaatttgaaagctaatcacaaccatgccttaaacctgtcattgtaaaagtcgactgtatatcctcagctaatatactaatttgaaagctaatcacaactctctgtggtaagcgcttgttatcccctatactgtatatcctcagctaatatactaatttgaaagctaatcacaactgaaatcccgtacagattcacattatttatactgtatatcctcagctaatatactaatttgaaagctaatcacaactgagaaagaacgtaaaaaaaatggttggaaactgtatatcctcagctaatatactaatttgaaagctaatcacaactgagcggttacgaagcatttatgaccgaatactgtatatcctcagctaatatactaatttgaaagctaatcacaacaatcccgtacagattcacattatttatttaactgtatatcctcagctaatatactaatttgaaagctaatcacaacacatggcttctgctgcttgtgcgtcacgcaactgtatatcctcagctaatatactaatttgaaagctaatcacaacctctattatacatgattcaaaattttaataactgtatatcctcagctaatatactaatttgaaagctaatcacaactgcgttcgtttttatgccgggggttcacatactgtatatcctcagctaatatactaatttgaaagctaatcacaaccccgcaccgcttaaaccgtctcttattgcacactgtatatcctcagctaatatactaatttgaaagctaatcacaacttagatttttcggcgtaaaattgtatattaactgtatatcctcagctaatatactaatttgaaagctaatcacaacgcttcgcttgatgctgttgcatttgctcctactgtatatcctcagctaatatactaatttgaaagctaatcacaactgatctgtgatactattctaaatacagtccactgtatatcctcagctaatatactaatttgaaagctaatcacaacctcttatggctttttcacattcttttttcgactgtatatcctcagctaatatactaatttgaaagctaatcacaacataacctactctctcgcttctctcttgtagactgtatatcctcagctaatatactaatttgaaagctaatcacaacttaaaagctatacacaccttacttgataaactgtatatcctcagctaatatactaatttgaaagctaatcacaacctagagtagttattactctagtagatttatactgtatatcctcagctaatatactaatttgaaagctaatcacaactagtcgatttttgagactttttccacttacactgtatatcctcagctaatatactaatttgaaagctaatcacaaccagttttcacacattgacatgagggtttgtactgtatatcctcagctaatatactaatttgaaagctaatcacaacgttttttattttcttccattccaataaaatactgtatatcctcagctaatatactaatttgaaagctaatcacaacggtgtgtcgtccattcctaaaaatacccctactgtatatcctcagctaatatactaatttgaaagctaatcacaactaaaaagctatacacaccttacttgataatactgtatatcctcagctaatatactaatttgaaagctaatcacaacattatattgtaaatgtattgatttttttatactgtatatcctcagctaatatactaatttgaaagctaatcacaaccgttagttaatttagcactatactacttgaactgtatatcctcagctaatatactaatttgaaagctaatcacaactttgtttctactgcctctctttctgcttcgactgtatatcctcagctaatatactaatttgaaagctaatcacaaccgttgccgaacaggccaaagctgcagcaatactgtatatcctcagctaatatactaatttgaaagctaatcacaacacttttcatcatttaacctttgttcttcttactgtatatcctcagctaatatactaatttgaaagctaatcacaacttcaatccattcatcacttttactttcatcactgtatatcctcagctaatatactaatttgaaagctaatcacaaccatccaataatgggtcaagtatattttcatactgtatatcctcagctaatatactaatttgaaagctaatcacaacgctgcatttggttgtccttccgttttggttactgtaatccgcgtcaggaattcccttcgtttcgatctggaggaactcgatacatggatgagatcgggagcaccaaaaatcataaaccttgggcttcaaaaactcaaagaaaataacgatagtcaaacaacaaataacattaataattcattgtaatttttcgttcgtcgggaggagtggcctctccgctgggtgattcccgaccgatgagttatttgtattttctatttctcaattttgggactctttagatagctgattaatcccgattattgatccacattgtattattttacttcctttgtaaaacaagcaaatcattgtatcatctgctcaaaagttttttcctttattacgattttcctccttttctaaaaatatcattatccttcaactctaactaactctgttttggctgtaatcatcagaggaaaatgtaaaataaggaaaatatttaagcaattagttctgtatattaaataatatttatattttgcaataattaagttaattaatccatgaatagaatattatgaaaatcaagttttactttttattgataggaatattgttcctgatcacaggaaaaaatttcggggcctctaactttgaaaagatacaaaataatgactctataactctaattcaatcaacagataaggttatcgaaatatggaaacaaaatataaccttgactgcagagcaggaaattctgatgcgacaaaatacaatagagtatttggctaaaagaaaaaagatactgggagacgtaaagaacgatagcaaaaaaaagttaaccgaagatcaaaaaaaatctttaagtgaagttgggcgttcctatcgggagggtattgatacgcttttgaccgaagaacaaaaagccaaactggaatataacagggaagtaaagaaagctactgtaaataaaattgcagaaaaaagtagtccaaagtaatatgaattggaatacttctcataaatacggttgatttttatctttattaatttcccaattctactagtttacctaaaatgatctgattatgaaaaaaataataattctttgcttttttactttctgtattcaaatatcaatacaggcacagtcggttataagaaattttggtttattcgaatatgagtgttccgactctgaaatagtgtgggatatagatgtagttactacaggacatctttttctgatgctttatgtagatatacaggagtattgggacggtatatatgtatacagcatcgacaatttgggaaatgctgtcctgcaaacaaccctaaccggtaacgatacaggtataatccgctcattgtacccaaacggaaaaatgcggatagtattcctgcccgaatatcccgagtatagggatgagaacttctgggggcttatagaaataggggtttatgaaaataagaagatttcttattcttatgatgcctcaggcaaccggataggtcgtagcatagttcttgaaacatcacccggtttacgatccgctgcatttgatagagaatcgcaagaagaaactgtttatgaagaaacatttgaataccaaatcgataatgaactacaagatgccaacatattgatttatccaaatccgacccatggacaacttgctgtcgaaataaacaatgtaccacaagaaatggtaggtgaagtttatttaataaaaggcaataatcaattaataagtaaaaaaactataagagcagatcagaaaacagaatttgacttaactacgcaaaatccgggagtttacctgttaaatatcaaaataggcaatagtatttccacttggaaaatcattaagcattagtataaagcattgttttcaataaataaagacagattatccttcttctaaattaaaatagctatgaaacacaaatatatattacttgtattcttttacttggtatttaatatcgttaactccttaagtgttctacaaggacaggattttaattaccccgttaatccggatttatccagtacagcaacagaggctgtcggttctttaaacggagaattaaatgtttcgaatataggagccgcaacatattcgatgcctatcgatgtttcattaggtgttggcggtatgcaaccgtctttagcaatcgcatataatagccagggtggtaacggtctggtaggatggggctgtaatttatcagggctttcggttattagccgtaccccgaaaaccatttatcatgatggtgaggctaaaggaataacataccatgctgatgatgcttatatgttagatggacaacggttaatcctggtttcgggaactgccggacaggagggagcggtatattcacccgaagccgacccgtttacaaccgtaaccgtgtatggagcatataacagttctactgccagcacttggtttgaagtaaaatcgtcaaatggaatgaaatatcgtttaggcacatcttcttcatctaggcaaacttatagcatagatggctctccgaggattaatgcttggtatttaagctatgcagaagaccctttggggaattatatagattacacatatacaaaaaataactactttgtataccctaatacaataacttacggaaagaataaaaacggaacaaatagccttcaaaatactgttacctttaattatgaatcccgtaatgatgtaatgccttttgttatggaaggaattaaaggttctgtatcacgacggttaaaaagcataacatcaaaaacaggaaatgaaacatatcgcatttatgaatttgtttataacactacgggagatgccggaggtacaaaattctcccggttaacagatattgtaataaagaacagcgagggacaggcactcaagccaacaaaactgaattgggaatatttgcccgctttttcttcaacctctacaactatacccagcgtacagaacaacccttttcataataaaccttttgatgaccagacttttacggcaatggatgtgaacggcgatggactgactgatttggttggtatatatcaatatgaaggtatatttagtgccagtgcatattgtgcttcattggatgaaaacggagagatccgatttacatatgataggtcatggcttctaggcacaagtatttattgtaattttcagggattctcgccaattgatattgacggtgatggaataaatgaaattctggttcctacattatatacagatttgaatgcagaagttgttgaattcgtattatttaattcccaacgcactataccatcaagttttagccacgcaataagtaaaggccgccagatgcctgtttatgcaaccggagatatgaataacgatggaaagactgatgttatttttattgaaaaggaaaaaaataccgataaatatatttgtaaaataacaactttttcgggagctaatttcagtagccatcaaattaatttgacgataccatctacacctgaaaagatgtttatatccgattacaacggagacggattaaacgatatgttggttttctacaatggtgggtatactattttctggaatcagggaaacgggatatcgcctacgactctttccgacaataataaaaccgcaggaacaaacatcggcaacgtttggatgatacgtgatggggattttaatggagatggcttgtctgattttataatgaatgcctcgtacgaaaataaatggtatttcgctttaaacaacggggacggtacatttactaaaacattagcctgtactttggaaattttcgatcagggaacaagtgcagataatgataaattcacttgcttagtttatgattttgattttgatggaaaatcggatgttgttataagcaaagctatgtacaacactacaatgggtactacaaatgttcctattactattgttactacaaatactcattggatgcgttcgacaggaaatacacttacggaaatagtggcaagaacttctaacaaagaatatcatgcgaaagcatctcgttatgtattaggagatttcagaggaacggggcaattgcaactaatgaattatggatacgattgtgcctcttccgtaggagattctccaactactaataaatggaggttgtataacaataactatgacgcaaatcagggtaaagtggtgcggattacagatggctatggggccacatccgaaattacatatactacacttgccaatgacattgtatacacaaaacagaaagatggtgattctaatgctcaataccctgtagcaaactatcaattacctatccatactgtttatatggtaaaagataaaggggtaaccacaacctatcaatacggaggcctcaaagttcatttgcagggaaagggtatgctcggtatgttctatagcaaaatatataatacaactcatgatgtagcaactgaatcgaaaacttattttgacaataacttttatctgcctgagacagtatacaccgaaactacagaatcaagaattaaaacaggggaaaccgaaacatattttacagcagtagataagggaaataaaaaatacttttattatcctcgtgaagtaaccaagatagatgagtataacaatactgtatttaattcgtatgcttataatacagattatggctatctggcatccgaaagttcctatatccataatcaagacatgtataagaaggtagaatacggcaaccatgtattggcaggaggcacatataaaccacgactgataaccacgacacagaaacatgatgacgaaaacagtgtttttactcaaaaacaatatatattgtacaatggcacctacggttacccgatacaggtcactgaaaattatggttcgtctttgccattttcgacctattatacatacgatatctttggtaatgttttaacaacacggacaaatgaaccgttgatcgagtataccgaatatgatgctacaaagcgatttgtaactaaaacctatactgttccggcatcggaggtagctacattcacttacgacacatgggggaatgtgctgactgaaaaagacgagaccagcagtactaatatactgacaactacccatacctacgataattggggaaaccctgtatctaccgtttatgcggatggaagaagagaaacttttcattcgggatggggtattaacagtggtagttatagtagtaaaagttatttctcagtagttcaaggcgacggtaagccctgggtgaaaacatggtatgatagttatggacgcgaagtggaaattgagactataggggctaaaaatataagcataaaacaatcgaagatatataacactaaaaatcaacttgtaaatgaaacttcccagcgagggaatcttacaacttcgatgtcatatgcatacgacacacgagggcgtttgcagcgtactacaagcagtaccggaaagatagaaacatacggttatggaaaccgcacaaatacggttacatccaatggacggtcatatactaaaacatacgatgcatgggggaatataaaaacatctaccgatcctgtatctaccgtcagttacacttatgcatcgttaggaaaaccaaagactataacaacaggaggagctactctttcgatgacatattacgatacaggaaaccaaaagacatta

SEQ ID NO: 1182 - DNA, 24425 bp, synthetic construct
  source 1..24425: mol_type = other DNA
  misc_feature 1..24425: note = Synthetic
caagatggttctaatggaggagaaggtatagatgtaaaagaaggagcgaaaagaggtagaatttttggaaatagaatacatgatttaaagcgtcaagcaggtatatatctagatgcaggtgggttattagggtttacgcctccagaaattgaagatattaggatttataataatatagtatggaataatgtgaatgctggtgctggaggaggcgcttttactatgggaacagaaggagacggaaatacttttaatattttattagttaataatgtggcttataataacgaagaagatggctttatggtttataagcatccagcgggaagtggtaatgtttatgatattaaggcaattaataacacattcgtaaataatggaagatttggtatattacttaatttttctactgcagaaaatatggtttatagaaataatatttgctataaaaacggcagaaaaaactttaatttatcaagttatactagttttgttgaaacgaataatttaacagatggaacagatccaaagtttgtagatcaagctaatgctaattttagacttaaggaaggttcgccagccatagatgcaggaactgtaaaaaatagcttgaatagagatattgaaggaaatcctagatttggaaatgttgatataggtgcttatgaatatcaaaaaagtatgcgattgtctaataatagcttaagagctaaaaataatattccaatcacacggatttatcctaatcctttaagatctggaggtaaattgaatattaatacgatatctaatgaaaatttaatacttaaaattagcaaccttaatggacaattattaaaagagacctcaattaaagataatttgactttagatttaaaaccaggaatttatatagtatcaataaatgatgaagagggtaagcgtgataatgcgcattatcaaaaattaattatctattaaattgtcaatttaaaataaataaaacaaaaagctacctttttaaaaggtagctttttgttttataaccattgataaataagatatatataataagtaatgttcttcatgtatcattattacagctatattctgttttaggggtatatataagtgcttctacaattttttagaattaacaatttcctcctaaatgcaagcaaccttttaaattctgcatacctttaaaagatacagatgttttttcatagtgaaacattctacttagtcctttagaaagactatgatcgtcaacattcatttcaatatcatccattttaaactggcaagggtgttcatatccagcagcatgtgttatttctataagttcttttctaaatgttttaaaatattgagctaaacgagcggattttagagtaggatctatgccattttgtaaccatttgttttgggtagctacaccagcaggacatcgatttgtatggcatacctgtgcttgaatacagccaatactcatcatagcctcacgagctacattaatacagtcaactcccatagcaaaggccatggctgctttagcaggaaagcctaatttaccgctaccaataaaaacaatacgcttagttaatcctttttctttaaaaagtttatataaatcactaaagccataagtccaaggtaaagacacatggtctgcaaagctaggaggtgcagctcctgtaccaccttcaccaccatcaacagttataaaatcagggccttttcctgttttttgcataatatttgcaagttcttcccactgttctaatttaccaatagcagcttttataccaacaggtagtcctgtagcttcagcaatggcttcaataaaatcgatcatttcgggtacgttagagaaagctttatggtttggaggagataagacatcttttcctatttcgactcctctaatattagcaatttctttagttatttttgagccaggtagtacaccacctttccctggtttagcaccttgagatagtttgacttcaatagcgcgaataaatggattgtttttaactaattttatcatttttttcatagaaaatccaccatcttctgcacgtacaccaaagtagcctgttccaaaatggaatactacatctccaccattactgtggtaaggtgataacccaccttctccagtattatgatacgcaccagccatttcaacccctttatttaacgattcaaccgctttagcagaaagtgatccaaaactcattgcagaaacattaataatggaagctggacgatatggtcttttacgtttgctaaattcccccataacttttgcacatggtaaaaaacttttgtcaattttatttggatgattgtcaggtagtgtatagggcatcatagcattattaataaagatatgttgatgctggtgtatatctctatttgtaccaaagccttcgtagttattttcttttttagcagaagcataaatccaactacgttctatacgattaaatggtaattcttctctgttattagcaacgaaatattggcgcatttctggaccaatactctcaaaaatataacgaatatgtccagcaataggaaagttatgacttatggtatgttttttttgaataatatctctaagcgctattattagtaatactattataatccatacccaccatgaaatatttgataaaaaaattaatactgtattcatattttttgaaaatcgtttaagtcaaaagtaaacataatctgtttttatataaaaattaatgaagtctttttagattaaaataatctgaattagaataaagacgctttaatttataattaggtattaaaatttggttttcgttacaattattattcaagtttttttggtttcattaaaagaaaatatgatgaagctaaatgcatgattttgtttttttttagataaaataaaatcgaaatttttcttatacctataatttagatgtattaacctacgtagtgttgtctattaaatacttaaacgtgacatttttgtcttacgtgttttaattagtgtttttgttatttgtgtaatgttttattatttttattgatgatataataatataataagctatttgttaatgtttggttaattaattagaataattagtgcattttagtttttgtctataaatttgattattacaaaaaatttaaagtatccctaatctattattaacacatttaattaaaatgagaataacaaattttaaaagtttatgcctttttgctttttttttattaggagcagtaagttctaaagcccaaaattttccattatcagatcctggtaatacagaaggatggatttttaatccagaagtgagtgatgaattcaatggttcagagttagataaagctaaatggtggattcttggagagaacaatgattatagacaaaaatggaaagggagagctcctggtcaatttgtttcacataatgtaaaagtagaaagtggcgatttaatattaatgtcacaatgggagccaagttttacttttattaatgaatctcatgaaggaacaccttatggaggagtggggaaaagtcatcctattactcaatcttgtattatgagtgagaaatttttcaaatacggatatatggaaatacggtgccaatctgccgatgctcctgttaccaatgctttttggactacagggtatcaatctgaaattgatatgaccgaaaattatggaaaaagacctattggaaaccctaaaaatagagtagaaagccttgaaagacgttatagaacaaatttaataacaagatacccagatagaactgttgatagttataagacagaacatactttagttgaaagaacagcaagtgattattttgtttatggttttgagtgggataaagattacatgaaaatatattttaatggtatcttattagaaactaaaacaagaacagatatagagaataacgaaaatataaaatggatctgggatttccctcaagaactatggttagatagcgaggtttttgaatggtatggtttacctgttcaacaagacttaacatctccagcagagtttaaaattgattacgtacgtgtctggcaaaaagaattattatctggtagcgattttgatgctttaggattcgaagggccttttcatttcagtggtagaagtagaaactggtttcctggaggaggaagttctacatggagaatggaggatgaaaaacctaatactggagactttagccttcgttataaacaaacagctgcaataactgtaaaccaaactatgttttcgcctcctggatcactagatattcctgcaggtgctaataaaataaatatgaatgtttggattgatccaggtacaactgtaaatacacttacagtattgcttgaaagaccttttaggcgaattgatgttgatcttacaggtgtagaaaaaggtaaatgggtttctgtttctacatcattttcaagaagtgcagcttcagataccaatatctcaaacggagaccgtataagattacaagttaggcctgctaatgttgtaggtactaacgctttattttatgtagatgatattagttttgataacactaatggatcactttctgttaatgaaataaaagctttcaattttaacgtttacccaaaccctacaactgaagatattactataaaatcaacagaaaatagtactattaaaatagtaaacagtttaggtgtagaagttaagtctgttaagaatgcatctcaacttcaaactatttctgtaaaaggattagcttctggtatttattttgtaacagttacttcaagtaataaaaaggctgttaaaaaaatagttattgaatagtatataaataaaaaacgttctaaaaaacaaaaattttaattgttttttagaacgttttattacctaattttttgttgacttatgaacttttaattccaagattaattaaacgagctatacttctcatttaattaaccattaaaaaaaaaggataaataataagctttagtatatcaaaagtaagaacttctctttttggatatgtaaattaatatatccttttccataaaaacacaggacactttgtttcttcaatgatcttccatcaatttaattatatttaaggaaggttgcgttctaaaaaatgcagttttaccttttaaattttatgattttttatgtttacttaggattatttttaagttattctatagcggaactcgagtagcaccaactttaattataaaatattttattaaggcaaaattgatttaaatctaaaaataccgtaattaaatggcatgacatcgttacagagttcatgaacaagggatttagacttaaaaagaatgcatcagcatgcagcattttatagttaagttggtattaaattaattgtttataattattaataattctacttaataaaacgcgtaacaatccttaatttcacatcataaaattagatgtagtttggagaagtatttaagtcagttaaacgaagcacaattagagcccaccattcagaaggatggaccaatgattattatagcaggagcaggatctggtaaaactagggttttaacctatcgtattgcctatttgatgaatcaaggtgtagatgcctttaatatattatcattgaccttcaccaataaagcagctaaagaaatgaaagagcgtatttctactattgtaggctctggtgaagctaaaaatttatggatgggaacgtttcactcagtatttgcaaaaatattgcgttttgaaggacaccatttaggttttccaagtaatttcaccatttatgatacacaggattctcaacgtttaatgggatcgattattaaagaaatgggcttagataaggatatctataaaacaaagcagatatacagcagaatatcctcttataaaaatagtttaattacagtaaaagcttattttaataatccagaattaaaagaagccgatgctatggctcgtagacctaaaatgggagagatatataaagaatatgtcgatcgctgttttaaggcaggctgtatggattttgatgatttgttattacgaactaatgaattgttaacgcgtttcccagcagtcttagctcaatatcaagatcgatttagatatatattggttgatgagtatcaagataccaaccattctcaatatttaatagttagagcattagcagatcgctttcaaaatatatgcgttgttggagatgatgctcaaagtatttatgccttccgtggtgcaaatattagtaatattttaaatttccaaaaggattatgatggtgtgaagcttttccgtttggagcaaaattaccgttctacaaaaaatattgtacatgcagctaactcagttatagaacataatgaaactaaattagataaagttgtttggacagctaatgatgaaggtggtaaggtgaaagtacatcgctctttaacagatggagacgaggggcgttatgtagctagtactatttttgaaacaaaaatgaataaccagctacaaaatagtgactttgctatattataccgtaccaatgcacaatcgagagcaatggaggatgctttacgtaaacgagaaattccatatcgtatttatggcggtttgtcattttatcaacgtaaagaaattaaagatgtcactgcttatttaagattaattttaaacccatcagacgaagaagccctaaagcgtgttattaattacccgccaagaggtattggacaaaccactatagataaattaatggtagctgctaatggttatggaaaaaccattttcgaattattagaaaacctagataaggttgatattaaaattaatgcaggtactaaaaggaagctaagcgatttcactactttgattaaaagttatcaagtaatgaatgagacggcaaatgctttcgatttggccgaacacgttacgaaaaccagtggtttaatgcgtgaatttaataaagatggtacaccagaaggaattactcgtttagaaaatgttgaagaactgttaaatggtatcaaggattttgttgaaggacaaatggaactagcagatgcttccgattctttagctgagtttttagaagatgtagctttagcaacagatttagatgccgacaagggagatgtagatcatgttgctttaatgaccattcacttggcaaaaggattagagtttaatcatgtatttatagttgggttagaagaagatttatttccaagtgctatgagtatgaatacgcgaagcgaactagaggaggagcgtagacttttttacgtagcactcactcgcgccgaaaaacaagcctatttaacctatgctttatcgcgttaccgctgggggaaactagtggattctgaacctagtcgttttattgaagaaattgacgacgaatttttagagattttaacacctaccgaagaacgtcgtattaaccctatgctaagtgccgatatatttggagactctaaaagtaaaatagttaaccctaataagattagatataagccagcaaaaaagcctgtattaaaaaagggaggtactgctgcaaaaaaagaaccagaaaaattccaagttaccacacctaaaaacttaaaaccagtggcaaaaactacagctattgatgctagtaataccaatactaatttatttgatagtgaattagctgtaggaagtctagtaaaacatattaggtttggtaatggagaggttttaaaaatagaaggagctggtgccgatgttaaagctgaaattaattttcagcatggtggagttaaaaaattattattaagatttgctaaacttgaagttataggataatggccaaattttttagaatatacgaagataaccctaatcctaaagagatagatagggttgtaaaaattctaaaaaatggtggacttattatttacccaacagataccgtttatggtttaggttgtgatataactaatataaaagctttagagcgtattgctaaaataaaaggcgttaagctagaaaaagctaacttttcctttatatgtcatggtttaagtaacttaagcgattatgttaagcaaatagatacttcggtttttaaaatattaaaaagggctcttccagggccctatacatttattcttcctggggcaaaaacattacctaacccttttaaaaagaaaaaaacggtaggtatacgtgtaccagataataatattgctatagagattgttaaacaactaggaaaccctatagtttctacttccatatacgacgaagatgaagttttggaatacaccacagaccctgagcttattttagagaagtggggtaatttggtagacttagttatagatggtggttatggggataatgaagcttctacagttatagatttatctgaagatgaacctattattgttagggaaggtaaaggaaatttagagattttttagtttttgtgtaagcaggagctctattaggaaaataacgtttattagattgttgtttttatttttatacccaaagaaaggagcttctttatataatatacccattagtgaaaaaatcgtgtttttttgtattaatttactgatacattagtttttaggtgtttgtactggtgttttgaaatgagtatatccactcatacttctggcttatattaaaggtagatttgtaatatatacatttactaattttaaaataaaatggcacgtaataatacactttttatttacaatactacgcatcctacacaaaatcaagaatggacaatttactcagaaggagtaattaatgaaacatttacagttggaggagtgcgaaagacctttacattgtccttatcaggtaatgttaccattcaatttggagtagacgatgctgtttatcttagagcaagttataattatagtgaagatgtttgggaaactcacacagatacacctaacgatataagcgctgttactggtccaaatgccttaagtgtttcttccaattttaggattgaagtacttcaagattaaagaatagtaatgtataagggaattggtgataaaataaaaactcagtattgggttatctgcaatttaatactgagtttttatttattcgtatcctttttatcgattattctaaatttatagaatagtattatattaattaaaaacacgaagattttcggtaagaatttgaattgtgatctatcgtgaaattaaatttcttaccatcttttcctctaatatatttaacgtaatcccaatttccagagtgtgttaatttatattctccatttaacttgccatcatgtatttcgttgtaatatgttataatggtagggtgtgcaccgcccttaataaattcttctttaacgaaaactaaatcaatagctgtgttttgtcctttgtattttacttgaatagctctacttttttctgtaaaacttatccaaattactctttccgcttttttgtcgtctttataacaaatataatgatctaccgcatccttttttaacgcatctgttccaatagaattttcaggttcttttttttccaatgtatcagatgcagtggttttgtttacactaatggactcctcttttttgttaaaatcggttgtgtttttttgtgcttctttacatgagaaaagtgaaagtacagatgcaaatatgatatattttagtttcatgagatttgttttttaataaagtaggtggtttttatataaataaaattatagaattttctattaaaaaaatgaaatgacttgaaagttctttcttatattgtttttaagggtttttatacaacataaaaaagcgattcgttaagaaccgctttgtatgttttcacaacggaataatccttattgtgaattgcttttcagaattgttttacaaatatataaaaaagataataacctaattacggttttacgtaatagaataattattaaagaatttaaattagataaaaatataaaaatgaagaaaatattaggacttgatttaggaacaaactcgattggttgggcgttaatagaatctgatttcgaaaaaaaacaaggaaaaataaatggcttgggtagtcgaattattccaatgagtcaagatatactagggaaattcgattcaggagtttcgatatctcaaacagcagaacgtactagttaccgtggtgttcgtagattgaatcaacgtaacttgcttagaagagagcgactccatagagttttgaatattttagattttttaccaaagcactattcaaacgcaattgattttgaaaaaaaactaggtcaatttaaagaaaatgttgaagagaaattgaattatgctaaaaatcaaataggtaggcatgaatttatttttatggattcttttaaggaaatggtaaaagagtttaaacaaacccaaccccaactattttataaaagagaaaatggtatagaaaccaaaataccttacgattggacgctttattatttacgtaaaaaagcattatctcaaaaaataaaaaaagaagaattagcatggataattctcaatttcaatcaaaaaagaggttattatcagttaaggggagaagacgtattagatgaaagtaaaattgaagatttttattcattgaaagtagtagaggtccaagaaactgaagataaaaatgccagaggaacttggtacaatgtgattttagaaaatgattgggtttataagaggcagagtaaagagtcattagacaattggattggaaaaaataaagaatttatagtaacgactaataaagaaaaagatggttcgttaaaattagataaagcaggcaatgttaaaagaaattttagggcagtagattcagaaaaagattggattgctatcaaaaagaaaacagagcaagatgtagagatttcaaaacatactgttggacaatatatatatgagacacttttacaaaatgctaaacaaaaaattaaaggaaaacttgtaaaaactattgaaagaaaattttataaagaagaatttattaaaattataaaagaacaattaaaacaccatccagaattacaaagcaaaaccttatatgagacatgtatccaagagctatacccaagaaatgaggcgcatcaaaataatattaaaagcaaaggttttgaatatttgtttaccgatgatattattttctatcaaagacctttaaaaagtaaaaaatctactatttctggatgtcaatatgaaacaaggctgtttaaaaaaacggtacttaataaagttaccaataaagaaaatgaaatttggcagaaggaacctctaaaagccatttcaaaatcgcaccctttgtttcaagaatttagattatggcaatttttaaaaaacctaaaaatttaccaaaaagaagatgtaaaaggaaatcttatagaccatgatataaccagtgatttattaaagacggaagccgattgggtagaattatttgattttttaaacattaaaaaagagatcgaacaaaaacaaatcattcagttttttattaataataaacagatagaaaagggaaaaaaaaataattatagatggaattacgtagaagataaaaaatatccttgtaatgaaaccaaatcacaacttatatcaagattaaaaaaagtaaaaaaccttgatttaaatctattttttacttcagaaacagagttaaaattatggcacattatatattctgtaaaagataaaatacagtatgaaaaagcaataaagaattttgctataaagaataacatagatatagattcatttgtagaaaattttaagcgatttcctccatttaaaaatgagtatgctgcttattcagaaaaagcgattaaaaggctattgcctttaatgcgaatgggtgaatactggaatgaatctgagataaaacaagaggttaaagatcgtgcttatagtattatagagcgattaaaaggtatcgattttaataaagataaaatagatgaaaagattacagatgatgatattaaaaaacaattattaaaaagctttatagattttaaagataaaaaccctttaaaagggcttaatacttatcaagcttgttatttggtttataatcgccattctgaagtcaatagtatagcgtattggaaatctccagacgatattaataaatatcttgaagggtttaaacagcatagtttgcgaaacccaattgtagaacaagtggtcaccgaaacattaagaacagtaagggatatttggcaatattatggaaaaggaaaagcatccttttttaatgaaattcatgtagagttaggacgagaaatgaaaaaccctgcctacaagcgtaaagcatcgactaatcgagttacagaaaacgaaaatacaaatcatagaatcaaagaaattttaaaagaattacaaaatgaaggtgtccaagaggttaaatcatattcgcgaaatcaacaagaaattctgaaaatttatgaagaaggtatatatcaaagcatagatgtagttgatgatgctattgaaaaaataagaaaaaatagttcgccaactaaagcagaaataataaaatacaagttatggttagaacaaggttatacttcgccgtacacaggaaaaactattccaatgagtaaattatttactaccgattatcaaatagaacacattatacctcaatctctttattttgataattctctaagtaataaaataatttgtgaaagtgaggtaaatcaattaaaagataaccaaacagcctatgagtttataaaaaaacacggtacagagaaagtatctttaggtaaaaacaaaacggttgaaatatttactttagagcaatatgaaaaacattgcaatcaatatttcaaaaaaaataaaaataaacttaaaaaattattaagtgaagagattcccgaaggctttataaatcgtcaattaaacgatagcaggtatattagtaaatttataaaaggtcttttaggtaatttggttagagaagaagacgaacaggaagtaactacaaaacatatagttccagtaacaggtgctataacttcaaaacttaaacaagattgggggttaaatgataaatggaacgaattggtagcttcaaggtttcaacgtttaaataccatgactaattctaataattttggatattgggatacaaaaataaatgcttttagagtacaagttccagacgaaatttcaaaagggttttcaaaaaagcgaatagaccatagacaccacgctttagatgctttggtaattgcttgttgtactagaaatcatatcaattatttaaatgccttaaatgcagaaaaaaagaattatggattaagagacttgttgctaattaagaatgataaaaaccattacaccaaattttttaagcatccctgggatggttttcctgtagaagcgaaatctgttttagaaaaaaccattattagttttaagcaaaacacaagagttattaataaaaccaataacaaaacatggcaatgggctgaaaaggaggggcaacttaaaaaagtattagtaaaacaaaccaaaggcgataattgggcaataagaaagccaatgcataaagaaactgtttctggtaaattaaatattcccacgccaaaggggaaaattgcaacagcttcaagagtttctttatctgaaataaaaacgagaaagcaacttgataaaattacagatattagtattcaaaaaattcttgaaaggcatttaaataattatttagacgataaaggaaaagaaaaatttgatttggcttttaatgcagatggcgtagaagaattaaataaaaatattaaagttttaaacaaaggaaaaaatcatcaacctatttataaagtaagattatatgaaataggtagtcgatttaaagttggcaattcaggaaataaaaaagataagtatgttgaagcagctaaaggaactaatctgttttttgccatttatttgaatgaaaaagataaaaaacgagtgtatgaaacaatacccttaaatgaagttatagaacatcaaaaacaggtatctaatttacctaaaaatgagcgaacaccagttcctgtaaaccatacaaaaggaaagttcttgttttcattatcacctaatgatttggtatatgttccaacagatgaagaaatagataatccatcattagttaattttaataatttaaacaaaaagcaagtagaaaaaatatataagacagtaagttgttcaacctatcaatgcttttttgttcataacactatttcaaaacctattcaaaataaagtagagttttctgctttaaataaaatggaaaagtctattgatggcattatgataaaagatagatgctggaaattaaaaatggatagattgggtaatattataagcgttataagatgataaagcgaaccctcttttttggtaccccagcctatttgagtacaaaaaataaacagttagtagttagttatccagaggaaagtacaccacccaaaacagtacctattgaggatattggcatattagtgctagaacatcaacaaataactataagtaatggtttgttggctaagcttattcaaaataaagcagcaataattagctgtgatagctaccatttacccataagtttattacaacctttggtagggcatagcgaacagacagaacgtattaaacatcaattgcaagctagtatacccttgcaaaaaaacttatggcaacaaactataagttcaaaaatagaaaatcaagcaagctttatggataagcagggaattcctgctagaaaaatgtataaatgggctttagaggtaaagagtggcgatacagaaaatcatgaaagtcgggcagcggtttattattggaaacatatttttggtattgaaaattttataagaggacaacatggtttagcccctaacaacctattaaattatggatatgctattttaagagccttaactgctcgtgctttagtaagtagcggtatgttaccatcggtaggtatatttcatcataataaatataatgctttttgtttagctgatgatattatggaaccctatcgtgtttttgtagatgttttagtctatgatattgtaaaatctaatgaaccttttgaagtgttaacaacggcattaaaaacaagtttattgcaattaccagtaatggatgtgcttattgatggcaataaaagcccactaatggtagccatgagtagaactactaatagtttataccaatgtttttctggcataagcagaaaagtgctatacccagaatttgtgtgatttaagcccgtattttaaagggggatggttttttatgtagatatagtattatgaaaagtgacaggttttcacgattaaatcaatatagaagtatgtgggtattagtattttttgacttgccaacagaaacggctacagatagaaaacgggctaccaagtttagaaaaaacttgttagacgatggttttactatgtttcagtttagtatttatatgcggttttgtgctagtcgtgaaaatgcagaagtacatacaaaacgtgttaaaaagagtttgccagaatatggtaaagtaggagtcatgcaaataacagacaaacaatttgggatgatgcaattgttttatgggcaaaaaccaacagaactggagaaaccttcacaacaattagaacttttttagaaatttaaatatttgattaaaaagcgtttaagcctataaaaagcaataaaattgtagattctaattaaacactcaacattcagtatatcagttatttaagtgtcgatatactgtgaatgctaagtaaaaatacaattctgaaagcaattcacaaccgtttccagatgttccagaattaaaggaaactgtgaatgctaagtaaaaatacaattctgaaagcaattcacaacagcttatatgattttagttccgctatagaactgtgaatgctaagtaaaaatacaattctgaaagcaattcacaacaaatcccacaccacgaactgagctgttttaactgtgaatgctaagtaaaaatacaattctgaaagcaattcacaactattctcgctagtgtccttattttgtgtttactgtgaatgctaagtaaaaatacaattctgaaagcaattcacaacaggtcgtcgctagtcgggaggttttccttactgtgaatgctaagtaaaaatacaattctgaaagcaattcacaacttacgttcttaaggtgctacgtaaccctgtactgtgaatgctaagtaaaaatacaattctgaaagcaattcacaacagtacatagctgtaggtacaaccgcaaaaactgtgaatgctaagtaaaaatacaattctgaaagcaattcacaacaataagcttaaaggacaagaagtttttacaactgtgaatgctaagtaaaaatacaattctgaaagcaattcacaactatctattccgagtagatcaaacataagccaactgtgaatgctaagtaaaaatacaattctgaaagcaattcacaactctgtagcacgttgtaagtaataattttaactgtgaatgctaagtaaaaatacaattctgaaagcaattcacaacatacccagaatttaaatgtattattacagcactgtgaatgctaagtaaaaatacaattctgaaagcaattcacaacaagcagcagtagcagttttcttttcagatgactgtgaatgctaagtaaaaatacaattctgaaagcaattcacaacatctgttccacgttgaatatccacagctacactgtgaatgctaagtaaaaatacaattctgaaagcaattcacaactatttgattgccttaacggtggcgtatcaactgtgaatgctaagtaaaaatacaattctgaaagcaattcacaacacgaacggaaaagataacgcctatccagagactgtgaatgctaagtaaaaatacaattctgaaagcaattcacaacgatttggctagttggaatccaatagacccaactgtgaatgctaagtaaaaatacaattctgaaagcaattcacaacctccagaggtagctttacagcaatataatactgtgaatgctaagtaaaaatacaattctgaaagcaattcacaacgtattctgaccccaatcaatactcttgtatactgtgaatgctaagtaaaaatacaattctgaaagcaattcacaacaaattgaggaagcactcgaagaggaacggaactgtgaatgctaagtaaaaatacaattctgaaagcaattcacaacaccattaggcaatgaagcttatcaattaaactgtgaatgctaagtaaaaatacaattctgaaagcaattcacaactaggttggtagcattttatttctgctatctactgtgaatgctaagtaaaaatacaattctgaaagcaattcacaaccgttatagaatctaacattaaaggtgaagtactgtgaatgctaagtaaaaatacaattctgaaagcaattcacaacctatttcctcgctagaatagaaaagccaatactgtgaatgctaagtaaaaatacaattctgaaagcaattcacaacaatgtagtggttaattccttactacaatgtactgtgaatgctaagtaaaaatacaattctgaaagcaattcacaacttcactcccaatatgtagcatttgaatacattttccatcagttattttatcaaatttaacctcgtttaaaaggctgtgaggctttttatttttgtaaactctaacatatcgttaaagtatttgtcgctaacaaaatggggttgtcttatcattaaattaaatactaactcgtctttgtttatttgtccgttaaaattttgtttagctttttcggtaatgtcccaaatcccttctaatgggtatactgtccaatcgttatagtttttaggtgcttcttttaaggttttcagattcatttttatagcataagcgactctgtataatacgcctatacattcagagaaaaaaggactgttgggatttccttttccgcttaatgttataaattgatattctggaatagtaattaacttaggtttgttttttggtatgtaaactgttttttccttttttctccattcgtgtttcatatgatgtatagttttgattagagacaaaattaaaatgaaggactgacaacctatgtcagctatataattaatatttttatagaatagggaagaaggtgatagtttgaattttaggcataaaaaaagcccaacctttaaaagttgagcttttctttatgaatattgaagtaggttagttattaccagcttcaaggttcttcatttctttttcaaccatgtcgtaaaactgatcgatttttggaagtactacaacacgagtacgtctgttttttgatttgttctctggagtagtattttctactaaaggtacataagaactacgtccagcagcaattaattgacctgggtttacaccaagttcttgtaatactctaataatagacgtagaacgttttacacttaagtcccagttatctaataatggggcttttctgtaaggcacatcatcagtatgtccttcaatcatcgcttcaaattcaggcttactgtttattaccttagcaactttagtaagcacacctttagctttatctgttacgttgtaacttccacttttaaataataatttatcagcaatagaaataaatacaacacctttttctacattaacttcaatatctggatcgttaataccaacttcacgtttaaagcttgttactaaagctaaagtaacactgtcttttctagtaagggcatcttgtagacgtgttatttttaaatctctttctttaagagtttctaaagatttttctaggttagtagctcctttagatgttaattctgtaaaagcgtcattacttttacgtaaatctgaaaggcgctctttcatagattctaatcgagcattagcagctgcagcatcagataaacaagaattaagtttaacagttgcagaatttaacaaatcttcagtttctttttgtttcgcttcaagatcggcaaattgcttttttgagacacatgagcttaataatatcattgcggatacgctaagtaataaaacttttttcataattattttaaggattaatttttctattctacgttaggcaaaaatatataaaaaatagccagttttaacattttaacaaaactttctaacggcttattataaacttttgtaatcgttttttttatttacgaagtaatcaaatactacggatgtcgtgccataatatttttttttatttgtattagattttctttgatttagtaatcgttttaaatgataataaaaactaaaatgtgcttttaagactgctaacatatgttttggtttaaattcaattaaaaattttattccagcaataccatctaaaattagacgtgttagtatgattctgaataatagtcctttagcgtttttagtgagagagaataaactgtttctaaaatttaggtatgtttttctagggttaatagcatttaatgtggcaccacctacatgataaacttcggaatctccaatatattttatagaataccctaaattttttgcccgccagcacaaatctatttcttccatatgagcaaaaaagtactcgtcaaatccgtttaactgtttaaaaacggtgcttcttatgaaaaaacaagctccagatgcccaaaatatttcggtggtatcattatattgtccagtatctttctctatggtgttaaaaactctacctctacaataagggtaaccatatttatctaaaaaaccgcctgcagcaccagcatactcaaaataatctttctttttaaagtctaataattttggctgaataatagttgtatttaaatctttattaaaaacattaataataggaggtagccagtttttagtgacttcaacatcgctatttaaaagacaaaatacatcggcttctatttgttttagagcatcattatagcctttagcataaccaccattttctttattcttaataatttgtatagacggataagttgcttttacaaaagcaatagaatcgtctgtagaagcattatcggcaatatatatagtggcttctttagaatgtgttattacagatggtaaaaactgttctaataactgctttccattccagtttaatatgactacggctaatttcaattttagactaaaaatttattggtttatttattgtactttattattcaggtgactgcaattggtaagctgaatattcattgttttatgttataattaggtatgtcttttaaaaactgataacattcattttcaaaatccatttgacaatagtaatgatttaatccgtttgtaaccattaaataggtggcgtttaactttaaattataacgtgctatttgatcgaaagtattttgattaatagttgtttttggagctttgcattctaccattaaatgtatacttccatctggattatagataacaatatcatagcgtttttttaaattgttaatggttagttctttttctacatttattaaagatttaggaaatcctttttcttcaattaaaaactgaacgcagtgttggcgtacccattcttcgggttgtaaaatcacaaattttttacgaatgctatcgaaaatagaaattttattttcattatttttgaatcgaaacgaaaattttggaaaattaagctcttgcaaggtgcatctatttatttttcaaagttaaactacaaaaccagaaatcgcaatattcaaacgctaaatcctaataaattatcattcttatttggagcttagagtttataatttgaaaatttaaaatagtttggacgaagtcaaacaattagttacagatataaaaaacggcaatttaaaacctatttattttttaatgggagaggagtcttattatattgataagatttcaaattttattgaaacaacagttttagcagaagaagagcgtggatttaatcaaatggttttgtatggaagagatgtagcaatagatgagattgttagtaatgctaagcgataccctatgatggcggaatatcaagtggttattgttaaagaggctcaagatttatctcgtactatagagaaattagctgcttatgcgcaaaacccacagcctactacggtgcttgttgttaattataagtataagaaaatagataagcgtaaggccttatataaatctcttaaaaaaacgggagtggtttacgagagtaaaaagctttatgaaaatcaggtagccgactggattcgtagagtattaacaccaaaaaagtatactatttctccaaaagcagctcaaatgcttgttgagtttttaggaacggatttaagtaaaataaataatgagttagaaaaacttcagattattttaccaaaaggaacagaaatcacacctgagcatattgaaaagaatataggtattagtaaggattataataattttgaattacgtaaagctataggggagaaaaatattattaaagcacataaaatcgttaattattttgcagataacccaaaagataatcctatggtagttacggtatctttattgtttagttttttctcgcaattgcttcaattacatgggttaagtgataagtctccaaggcatgtagcttctgctttaaaagtgaacccttattttgttaatgactacttaacagcagctagacattatcctatgcgtaaagtaagtatggtaatttctatattacgagaatttgatttaaagagtaaaggtgtaggagctagtgctgtacctcaaggcgatttattaaaggagctgttagttaagattttgaattgaattcttgatttatataaaaatagctgtgttgaacaattggttttaattggggcattaagcctaaataaagtgtaatattatagtaggaatatataatccttccatctgaagaattttctgttttttatacaccaaatttatctttgtattttactagatattttcttacttaagtgattatgtttatttggaataactataagtaaacagacacagttaagaccaacatcgtaaacacagttaaaataataaccaatggcattacgaattttagccatttattaaagcctacttttacaatagctaaagaagctaatattaaacctgttgggttaataaaagcgaataagcccataccatattgatatgcatttataactatttctctaccaactccaacaccatctgctaaaggtgccataataggcatagttaaaacggccattccagaagaagatggaataaaaaaagataatccgctataaataaatagcatggcattggcaaataaacctttattcatgccattagtaatattactggtataatatagtaaggtgtcgcttattagcccgtcgtccattaaaacggtaacacctctggcaattccaataataatagcaacacctaataagtctccagcaccttttacaaaggtttcaacaaaatggtgttctttaattttggctataatacctattaatatagaaccaaccaaaaacacggtagtcatttcaataaaccaccaatctagttgagaaactccataaatcataaccacaaaacataaaccgaatatgataagaataaaccgaaaacgatttgttaatttaaggttagaatttgttgtattaccaaaaagtttttcaatagcttctttttggtcgtaaataatagattttgttggatctttttttactttttgagcatatctaataatatatagaatacaaataagcgtacctaaaagcagcataataaatcttcctgttaatcctgttgtccaatttattccagcagcattggatgctataatagagctaaaagggttaatagtagaacacatagtgcctatggatgatccaatataaatagaagctaaagcaacaatagcatcatatttagctgctaaaaatatagggataagaatagggtagaaggccatggtttcttcggccagaccaaatgtagtaccacctatagctataaggagtgtaactagaataattaaaatatattcgcgcccctttaatgtatttgctaaccaagaaatacctgcctcaaaagcacctgtttgattcataatacctataagacctccaataattaaaaccagaaaaataatatctgcgctctcaataatacctttaacaggagatttaagataagctaaaacaccttgtttctgtggtttaagttctttataagtatttggaatacttataggtttcctaatatcttcattagtaaatttttctaatggaattttaatatttaaggcgtttaaagtttcttgtgtagcaggaagtgtagttgtttcttttgtattaattctaaaaaaggtattctcacttttgttataagagagtgaatcatattttccagaaggaattaaccaagttaaaagcgctactaaggcagcaataattaataatatggtttgggcggttggaaattttaattttttcaatgtatatattttaccaagattaaagatagtcttattttagtatgattttagattttatataaatggatgtaagtattcacgaaagttggaaaccttatttagaaggggaatttaataaaacctattttaaaaatttaatagattttgttaaatttgagtataaaaaccacatttgttttcctccaggaaagcaaatatttaatgcctttaaccattgtcattttgaaggtgttaaagttgtcattattgggcaagatccatatcatggtcatggacaagctaatggattgtgtttttctgttaatgatagtattaaacatccaccgtcattaattaatatatttaaagagatagaatctgatttaggagtggtatatccaaaaagtggtaatttaatgcgttgggcagatcaaggggtattattattaaatgcaaccttaacggttagagcacaccaagcgggaagccatcaaaagaaaggctgggaaatttttacagattcagttataaaaacgattagtgacgaaaaaaataatattatctttttactttggggtggttatgctaaacaaaaaatgaaattaattgataataagaagcataaaatattaacatcaggacacccatcacctttaagcgctaataggggttattggtttggtaataagcattttagtgagtctaattctttgcttaaacagaataatgatactccaattatttggtagtttatgttatttaataaaaaaacttattttgtaattggattgttatctatttatataaataacaattaagggtgagttaatacaaagttaag

SEQ ID NO: 1183 - DNA, 24425 bp, synthetic construct
  misc_feature 1..24425: note = Synthetic
  source 1..24425: mol_type = other DNA
tattgcttttagtagattgagaaataaatatgctgttactgagttatttaaagaggtttcagtaaaggtgggcgatagaccaggaggatatactcgtattatcaagttgggaaatcgtttgggagataatgctgaaatggcattgattgagttcgttgattataacactacgtacaacgtagaaaaatcagcagctaaaaagaaatctacgcgtcgtagtagaaaaaaagctgagacaacttcagcttctgagactgaaactactgcaactgaagagtagttaaaagtgtaaagaaaaaacaagccatctaattttttagatggcttgtttcgtatttgaatgttttaagcgttttggatatgataagatacagggcttaaattcgttcttttactttgtagcgtttttctttgcgtttgttacgtaggataatttcgcctaaaaatcctgcaacaaagaattgggttccaataatcattgttgttaatgccatgtaaaattcaggtctgttagcaatgagtcggttgctagggtttatgaacagtttgtctactcctaggtagaaagcaaataaaaaaccaataaagaacattaaaactcctaaagcaccaaaaaagtgcattggtctcttaccaaagtgggaaataaaactgatagtaattaaatccagaaatccgttgatgaatcggttcattccgaattttgtttgcccgtattttcttgcttgatggataacaactttttcagttatttttttgaatccagcattttttgctagtacaggaatatagcggtgcatttcgccgtttacatcaatatttttaactacttcatttcggtaggctttcagtccgcaattgaaatcgtggagctttagccctgatgtttttcgtgctgcccaattgaataatttagaaggtagatttttagttaattttgagtcatatcgttttttcttccaacctgaaactaaatcaaatccatcgactttaatcatttgatataattcgggaatttcatcggggctgtcttgtaagtcagcgtccattgttatgactacatcgccttttgcttttttgaatccgatgttcaaagcctgtgattttccgtaatttttgaggaaacgaataccaacaacacaagggtcttgggattttatgtctttgatgatctgccacgagtggtcggtactcccatcatctataaaaagaatttcgtaagaaaattcgtaagaaatcattgtccgacgaatccattgatgtaattcaggcaatgattcttgttcatttaagaggggaataacaattgatatgtttggagtttgattcatacagacacagattacttaaacacgaattcctacggaaagcattccttgatattctttgttttttctgaaaaaggaaaccgcttttgagcaagttggaactacttttaatcggcgttcggctatgttttcgagtacttttttcatgaagtcatcaaaaaaagtggcttcagcattttcaggaatatatattcttgttaaaaaaatcttgatgtcttgcaccgagtattcaatgaaggcggtttcattgttaacttttgtttgaaactggcgagaaaattcgctgtcaataatttcaatcatatttattttaattcgtatgattagtgattaatgaagtgtcaatgttgtttttgattttggtaaaaaaaaatagtatttttacgtcctgaaaaaaaaacaaaaagccaacttcggcacaaagttacaaaataaaatttaatttagaatggaaaaaaacaaaaagcatatttatctaatgccaggaatggcagcaagtcctaaaatttttgaatttcttgaatttccatcgaattatgaaactcatttattggactggattttaccgattgaggaggaatctctttcggaatatgcttttcgtttggctcagcaaattacacatccgaaacctactttattgggggtttcgttcggaggaattattgtacaggaaatcgctaaaattattgattatgaaaaaattatcgtagtttcaagtgtaaaaactaaatatgaactgcctaaaaaaatgctattggcacgttatacaaatttgcataaattgttgcccgttggtttagttaattcattggaatattggaagcaattttcttttattgattccattacaaagcgtatagaactttatgaaaagtacattgggatgcgatcaatctcttatttggactggagcattgataaaattgtaaattgggagcaaacagagcctttaccgaacacaattcatatccacggagataaagatgcagtttttccaatgaaatatatttctgatgctattgtagtaaaaaatggcacacatattatggttattaatcgttacaaatggtttaatgagaatttttcgaatctgttgtaataatttccgtataccatttctacttcaattttgctgagataaaaggaatagtaaacgctttgttttaggatgtttattattatggaagaatattttttgtagggaagttttgtatattttgtttcatagtatcaacggtatttcacagttggtttgtgtttagaaatattctattattctgctgtagttttaaaaatctgtgaaaataaccctttttttcttgcaaatcttcaaaaaaaatagtaaacttgcacaatgtttcgagattagaaaaactcgaatttaattcattaatcaaaaaaacttcttatattttgaatgaacttgttttagaactaaccgatattcatccacagcagttcttcggcgaagatgaggtaaatattaaaaagataaaatcttgttttccgaaattgaagattgtagccagaggtaataaaattttagcttttggagaggaaaacttgttaaaagattttgccaaaaaaatagaattattgcaggcgtatttcagtaaatacaaccgattggatgaacgtagcattgatagtatttgcaatgctgatgatactgagcctatagaaacaataaatcagaaggaaaccgacgtgattgtccatggagtgggagggaaggttattcgtccgcagaccaaaaatcaattcaagttggtagagttgatgaaaaagaatgatatggttttcgctgtgggccccgcaggaacaggaaagacctatgtaggtgtagcacttgcagttaaagcactgaaagaaaagcaagtaaaacgaattattcttacccgacctgcagtggaagcaggggaaaatttagggtttcttccaggggatttgaaagagaagcttgatccgtatatgcaacctctttatgatgctttgcgtgatatgattccttatgaaaaacttagtggttttattgaatcaggggtaatagaaattgctcccttggcgtttatgcgtgggcgtacgcttgataacgcttttgtgattttggatgaggctcagaatactacccatgctcaaatgaaaatgttcctcacacgtatggggcgtaatgctaagtttatgattacgggtgacccgggtcaaattgatctacctcgaaaggtatcttcagggctgaaagaggctttgttgattctgaaaaatgtcaaggggattggtatgttacatttggatgataaagacgtggttcgacatccgttagtacgaaatattattgaggcgtacaaaagtattgaaaatatagaataaacgtaagtgcgattcagtaaatgacatcagaacatttagatattaaaattcagaatgttatttcacaacgtgtaacataaatttttctgcaccttaagagctaaataattgaaaaataatataaaacataaatatattacataaaaatatgaatacaacattagtaattttagcggcaggtttggggagtcgctttggttccgacaaacaattagaggaaattcataacggaaatgctttgtttgattatgggatttatgatgcgattgaagcggggttttcggacgtagttttgattattagaacccagattgaagagcttactaaaaaacatttagaaaatcgtttcaaagggttgcctgtttccttcgtatatcaagatttacaaaatccagaaggcattgtgcgtcaaaaaccttggggtacaggacatgcaatgctctgcgtaaaagacgtggttaagaatccgtttttgattatgaatgctgatgattattacggaaaagatgcgttttcatacatggtaaaagccttaaaatcaggtaaagaaaaaactttttattcagcaggttatttgttgaaaaacacattgagcgaaaatgggacagtttcaagaggagtttgtaatgtgaatgaaaataatcatctgcaatcgatagttgaggctacgaaactcagaaaaattgacgaaaatatggctattgatgaagaaacaggcgaaaaatatcctttaggaacgttcgtttcaatgaatttttggggattcacaccagaaatttttccaatggcacagaaattatttgctgaatttgtagaagctaataaagaaaatccaaaagcagagtttttcattccgttagtggtacaacatgctattgaaaaagaagggtatactttggaagtattgcctaataacgatgcttggtttggaatgacctaccgcgaagatttattgaaagtacgagaagaaattaaaaatttgactgtagcaggaggatatccagagaatttctaattaaggaatcaaatttcttatttgctcaactgtgaaggtttcacgagattttgacttattgagataaggagtttattccattttgctaaaattagagattttttttaactctcaactagtgttacaatctctgaatgtcgaatttacatagatttttttgttatacgcaaaaatcttcatatacatttgatttaccaattaaaaatataaaataaaatgaaaaatacagctgaaagaattgctcctttgtttgattttaaaggagatatcgtttccgttgagccttttggaaatgggcacatcaattatacttttttagtgaaaactactgaacaagagtatgtacttcagggaattaataccaatgtattcaaaaaaccacatgcaatcatcaaaaatattgaattgctttgggaaactgttgctgataacactattattttgaatatgttaccagtcaaaacgggaggtttttcggtagaagcagacaatgctttgtggcgtgcggttccgtttgcgaagaattatgtggcatacgaatttgttaaagaagcatggcaggctgagaaagctgcatcggcttatgcaacgtttatcaaaacatttgaaaagatagatacttcaagattggaggatactattcctgattttcataacgggatgaagcgttttcaacaattagaagatgcttttgcacaggcgaagtccgaacgcatcgaaaaggcacaacatctctatgattttgcaaagtcgcacaaggtaatatttgatgaagtacagaaagctgtggatgaaaaacgcatccctattcgtgttactcataacgatacaaaaataaataatgtattgattcacaaggataatccgaacgatttcaaagttattgacttggatacagtaatgcaaggaattttattgtatgactttggagatatggtgcgtacctctgtgagtcctactaatgaaaatgaacctgatgattcaaaaattgtgttcaatgaaactttctttgaagccatttgtaaaggattttcagtgatgaaagacgtaatgacagagaccgaaaaacgtatggttttggatggtgctaaatatatgatttttattatcggagtacgtttccttacggattattttaataatgacatttatttcaaaacttcattccccgaagaaaattttgttagagcaagaaaccaatttgttctattacaacgtttagaagataaagaacctgcattgagagcagttgttgataaatggtttaaataaaataaacaataaaaggtaaaaactgtctgaaaaaagtgtacatttgcaacttggttcagacagttttttttatgataagaaatatttttgtactcctattaaccattcttcccatttatatttattcccaaactcaagtttcaggtaaagttattgatgatcaaggaaaaccacttccttttgcgaatatcatttttgtgaattctacgaaaggagtagtgtcggatgcttcaggaaaattctccttatactcagagaaaaaccataattatattgaagtttcttccttagggttcacatctaaaaaaatacgattacaacataaaatcacaaaaaatcttattatagaacttactgaaggagaagagcttgaagaggttgttgtagtaggaaaaccaacgaagtcactttcgaaaaaagaaaatccagcctacacagttctacaaggtatttggaaaaataagagtaaaaaaggacttaaaaattcacaggcatatgagtataagaaacatagtgtctcagagttgggtatcaatcaattagatacgattttcctaaaaaaggttttaggaaatgattatgctgagtttgaacaaactcttatggaacgaaaaaacaggggctttttttcaatgccgatttatattaaagaaaacgtacaaaaggtctacggtaacaaccaaatcaataaacaacgagttgatacagaagcagaacgctcacaaggagtagctcaaaatggttatggtttagagcgaatcaccaaggcatttgatgaatttgatatctacgaaaattcatatttgattttaaatcgcccatttgtaagccctctctcggaatatggctacgggacgtatcactatgttttaaaagatactttagtagaagagaatcgaaatttctatcgcatttatttttttccaaaaatagatgctgatttggctttggaaggaaattttattgtggatactaaaacttttattatcaaaagtatagagatgaaaactactcccaaaaccaatttgaatatggtgcggggattgtttttcgaaaagcattttaccattgaaaatgatagtatttattatcttgaaaaagaaattcaagaagctgattttacgattctttctaaggacatagaagagaaaggcttgtacattcgtaataccataggatactctgatgtggtcctgaatcaaccaaaatcgactcttttttatgaacaaaaaatagttcaaaaatatagggatcaatttgttaaaggggatacatattggcaacaagcaaccgtaaagtcggcaaatatttctaaaacaactcggttgattaaggaagtggctgataatccgaaagttaaattaattactacacttgcagatattataggtacagggtatgtatcgttaaattcaatccctttgggtaaaggactgcaattcggtacatattggcaggtgtacgaatcaaacgatgttgaaaagcatcgacttagattaggctttagaacatttaattcaattgaagatcgttttcgctcttatttttacggagcttatggcattggagataagcggtttaagtatggattaagtgctaaatatttactttcggaggaacctcgagtgacgtttggaggtgcttatcaggatgactatttgcaattaggaaactatttgattcacgatgatggtaatttcacattccgaagaggaagtaacgccattattaatcgaggagaaaactattttttgaccagaaatcaaaagacatcagcggctataacgtatgtgccgttaaaaaacattgaagttagtgtttttggagtatatcagcactcacaatctgccgatcctgaacattttttcatagcctttcgcgatttgaagaataatcaaacatataccaattataccgatttcaacacagggttgaatatcaaatttaccccaggaagaaacgtctttggctatggggtggagcaacgttatggagagaaaatacatgatacttacgtgttaaaatatactaaaggagcatcaggagctttaggaagccaatttgactatgataaagtacaggttttaatcaaaaaacctattactgtttggaatttaggaatgctgaacacaacttttgaggcagggaaaatttttggtaccgtaccgttgactattttgacaccaacgcctgccaatcaagcctattcgattatacctcagtcgtttgcgttgttagattattatgattttataaatgatacctatcttaatggttattttgagcatcattttaacgggtttattttgaataaaattccacttgttgacaaaacaaaattacgaagtttattatttgctcgttttgcttatggtactataagtcagcaaaatagagatgctcaccaaacgaatctaatatacaatacgcctgaaaaattgtattgggaatacggttttggtattgaaaatataggttttggaaatattcgcccgtttcgtttagattttatatggcgtggtgattttaatgatgttaacggtactcggaatcccaagtttggcattcgttttagtgtcatgcctaatttttaatgtcagcagtacaaaaattatttttcgactaaaatactcacagcatttcctccaaaaccaacagcgttaatgagtattttttctattttttcaggtttcttttgtttttcaacataaggaacgctataaacttcctgtttttggagcatacatattgccatttcaagactcaaagcaccacttgcaccaaatgtatgtcctattttccatttattattagtcataaaaggaacagattctttgaaaacttctcggatagctgtgatttctgctaaatctcctttaatagtacctggagtgtgggtgataataacgtctatatcacaaacgtctgtatttcgtaaagccatcagcatagatttttgtaagcattcgccattggccgaaagagatacattgtgagttaatttctcagaagcaaatccgattcctgttattcctgctaatcgattgtctttcaatccattttctaagcaaaaaacagaagctccctcacctaaaaccatcgtatttagctttttgtgtacgtccattgctcggcagggaaaatcatccgttaggctgctgtaaatttttaaagctttggcttgagctatagtaaagggagttaacggagcttcgcttccaccgactaaaaatcgctgttccataccactttgaagccatgcaataccattaacgacagcgtgtaaagatgttgaacaggtgatggaatgagacatttcaaaacctatactccctaaatcttgaccaacccacgaagcaatatttcctaacgtagtagttggagaagctaaagtttcacatgctttattttcaatgaaataggagtgatgtttttcaaaaagagttgtcgctccgcgagaagaaccgatgtttacaccaaaattaccatcacaccaattagcctgtttgactgcttgtcgggctgatataattgcaaataaaactgtatcgtccaagttggtatatgccggtgatgatagtcgtaagttgtttacagcagtcagaccgctttcagagagttttcccataggaacctcaccataaggcttcaataaagatattggattttgatatgacaggcagacttctgtaaaagaatttcctaaagcagaaatcgaacccattccgacgattgatatgttcacagtttaaaagttttatatgcaaaagtaaggaatttttattatttaggatttgaaaggtgtgatttttcccaatttcaaaggcttaataggaaataattaagaggatgtaaaataaaagccccgcagataggcgaggcactagatgttttcacaacggaataatccttattgtaaaatcctttcaatggtgcaaagttaactaaaataatttgaataaacaaaatattttttataattttacctcataaaaatttaataagaataattatgaaacacatacttggtctcgatttagggacaaactctattggttgggcattgattgaaagaaatatcgaagaaaaatacggaaaaatcattgggatgggaagcaggattattccgatggctcaggatattttaggaaaatttgatgcaggtcagtctatttcgcaaacggctgaaagaaccagatttagaagtacaagaaaactatatcagcgagataatttaaggagagaacgactacatagagtgctaaatattttaggttttttgcccactcattatgctaatgtcattgattttgaaaaacgattgggacaattcaaggaaaatcaagagccaaaacttccgtatgctaaaaatgaggaagataaattcgagtttatttttaaatcaagttttgaggagatggttgctgatttcagaaaacaacaaccacaattattttatacaaaacccaatggaaaggaaagccaaattccttatgattggacaatctactatctgcgaaaaaaggctctcagtgagaaaatatccaaagaggagttggcttggctattattgaatttcaatcaaaaaagaggttattatcagttaaggggcgaagatgaacaagcagacgaaagtaaatctataaaattctatgcccttaaagtggtaaaagtagaagaagacggcaaggataaaaaaggggatacttggtacaatgtgcatttggaaaatggttggatttatcgtcgcacaagcaagaattttttggattgggaaggaaaaataagagaatttattgttactgaaaaactcaatgaagatggcactattaaagttgataaagaaggtaaagaagacagaagttttaaagccgtaaattcagaagaagattggattgcaattaaaaaaagtacggaggataaaatcaactattccgaaaaaacagtaggtgcttatatctatgacacgctactgcaagaacctaatcaaaaaataagaggaaaactcatcagaaccattgaaagaaaattctacaaagatgaattgataaaaatccttaaaaaacaaatagaattacaacccgaaatttttaccaaggatttgtacaaggcttgtattgaggaactatatcctcacaatgaggctcataagaaaaatatttcagaccgagggtttgtatatctttttgtggaagatattattttttaccaaagaccactgaaaagtaaaaaatcgctgatagcaaaatgcactttggaagagagaagttttgttgtagaagaaaacggaaaacgaaaagagaagactgaaggaataaaatgtattgctaaaaccaatcctatctatcaagaatttagattattacaatggtttcataatttgaaaatctataagaaggacgataaaacagatattgatattacggatgaacttttacctacaatagaagctaaagagcaatttttggaatggctgaatgataaggctagtatatcccaaaaagaattgttgaaatatccaccttttcaattggaagaagcggtgagaaaaattttggttcaaaaattagaagaaaaacccaaaaagaaagatattgaaatgggattggaagaatattttcgttggaattatgtacaagataaagtttatcctctgaatgaaactcgtggtgaatttttaaaagtattgaaaaaaaataagttatccccaaactttttaaacaaagaaacagagtacagactttggcatttgttgtattctgttgaagataaagtggctatcgaaagtggtttaactaaattcgcccaaaagtataatttacctaaggaatttgtacttgctttttcaaaatttcctcgaatggaaaagaattatggtgctttctccgaaaaagctattaaaagactattgactttaatgcgttttgggaaattttgggattttgaaaacatagatgataagacaaaagaacgcattgataaaattcaaacaggagaatatgatgaaaaactcaaaaatagagttcgtgaaaaagcaattcatttaactcgtgatgaacactttcaaggacttcctctgtggttgacaagttatatcatttataaccgacattcggaagtctcggaaattaaatattggaaaacagccgaccaaatagaattgctcaaacaacattcacttcgtaacccaattgtagaacaaattataaatgaaaccttgcaaactgttcgcgaaatttgggaatattatggcgaaggcaaagaaaatttcttcgatgaaattcacatagaattgggaagagaaatgaaaaatcctgccgataaacgcaaaaaaatgacagaacgcattactgaaaacgaaaatactaatatccgcataaagcttttattgtcagagcttttaaatgacggagtggaagaggtgcgtccgtattcaccgatgcaacaagagcttttaaaaatttacgaagaaggtgtttatgaaaatgaacaagatgaaaaagttttggaggaaattactaaaattcgcaagaaaaaccaaccgacgacaaaagaaatcaatcgttataaactttggttagagcaaggctacaaatccccttacacaggtgaaatgattcccctttccaaattgtttacttcagcatatcaaattgagcatatcattccgcaatcacgctattttgatgatagcttgtcgaataaaattatttgcgaagcagaggtcaatgaattaaaagataatcagttggcttatgaatttattcagaatttcggtggacagaaagtacctattggcagaaatgaaacggtaactattctcaaaaaagaacattacgaggattttgttcaaaaatacttttcaaaaaatagtttaaaacgaaaaaaattattgatggacgaaatccctgaagattttattcaaaggcaattaaacgatagtagatatatcagtaaagtcgttaatctgttgttgtctaatattgtgcgagaagatggcgaggaagaagcaagagccaaaaaagtaattgtttcatcgggaggagtaaccactagattgaaacaagattggggcttgaatgatatatggaacaagctgattacgcctcgtttcgaacgattgaatcaaatggcgggttatgaaaaatatggttcttgggaaaataaagagggtaaaaaagttttccaaattaacacgaccgaacaagaattgatgaaactcaataaaaaacgaatcgaccatcgccaccacgcgttggatgcgttgattgttgcgtgtagtacagccgaccatatcaattatctgaataacgaatctgcttcggaaaataaaaaatccgaacgatttgacttaagaaaaaaacttcgccgaattgaaaaatacattaaagacggcaaggagcgagaggctgcaaaagaattttacaaaccttgggaaacctttacacaagatgccaaagaggcgttggaacagattattgtgagtttcaagcaaaacaatagagtcattaacaagtcggtaaattattaccaaaaatgggaaaaacaagccgatggtttgatgaaaaaagtttttgtaaagcaaaagaaaggagacaattgggcaattaggaagcccttgcacaaggatacgatttcaggtaaagtgaatttaaatagaataaaagttcctaaaggaaaaattctcacagcaacaagaaaagcgttggatgccacttttgatgaaaagaaaatagcatcaattaccgatacaggtattcaaaagattttgctaaattatttgaaatacaaaggtagttcagaattagccttttcaccagaagggattgaagaaatgaataagaatatttctcaatttaatgatggtgtggcacacaagccaatctataaagttcgagtttttgaaatgggtagtaaattcaacttaggaaattcaggcaataaaaacaccaaatttgtagaagctgctaaaggaacgaatctattttttggaatttatgtcaatgataagggagaaagaagttatgaaaccatacctttaaatgttgtcattgaacgccaaaaacaaggtttaccttcttgtcctgataggaatgaaaaaggaaatagattattattttcactatctcctaatgatttagtgtacatacctaccgaagaagaacaagagcatccgcatttggtagattttagcaaattgagtaaggagcaagtgaaacaaatttacaagatagtaagttttacagggaataggttatatgcagtgcctaataccgtagcaaaatcaattgttgataaggttgaatttactcaactaaataaaatagagtttattaaagagaaacagatgtgtattaagatagatgtggatagattgggaaatataattaccttaacatctaaaacgattcgtgaaaaatttgataagtacaaataaaatttttgtagatactaatattatcctttatgctattgaaaatcaacatgaaataaaatctaaaatagctatagaaatattagagaagagaccttatatatcaaataaaatattgaatgaactaatgaatttgttacataacaagagaaataatagtaagtttcaaaaatcaaaagaagaaacaatagctattattttagaattattaaaaatatgtccactaacgataaattcaaaagatacatatttcaaagccagatatttgatggatagatataggttgtcacttcatgattctatagttgtttctgatgcctttttagaaggatgtgatattctatattccgaagacatgcatgatggattattagttgataagaaaatgaaaattataaatccttttaagtaaaaaattatgctctaccgctccatttatattggcaatccagcgtatttgaagttgaaagaccaacagatgaaaatcgtttgtcctgaaaccaaagcagagaaagggagcgttccggtagaagatttgggtttgttgatgctcgaccactttcagattaccatttcccatcagctgatacagtggctgatgggaaacaatgtggtgattatcagttgcgatgctcatcatctcccacacggacaaatgctaccgctccacggaaatgcgattcattcccaacgcataaaagaccagatagaagccagcgaaccgctcaaaaaacagctgtggaaacaaaccatagaatgcaaaatagccaatcaagccgctgttttggaacgacttggaacttactccagtccgatgtatgagtatctcaaccaagtgaaatcgggcgacaccagtaatatggaaggcatcgctgcacagcactattggaaatacctcattcaccccgattttttacgcgaacgctacggcgattcgcccaatcagtttttcaattttggttattccgtattgagaagtatcgtggcaagagccattgtagaaacaggtttactgcccgttttggggatttttcacaaaaataaatacaatgcctactgtttggcagatgacctaatggaaccttaccgtccttttgtggatttattggtcatccgatggttggaaaagaatcctgaagccgaagaactgaccaaagaagcgaaagcccattttttgcaaatcgctaccaaagatgtgaaaatagatgaacaggtgcgtccgctattggttgcggtaaaatctaccgtttcctctctttacaaatgctatacgggcgaaaaaagacaaatttcttatcctaaaatgttatgaattccgaacgatttaacgcttatagaattatgtgggtaatggttttatacgatttgccaaccgagaccaaggcaatgcaaaaagcagctaatctcttccgaaaacgcttggaagatgatggattttctttatttcaattttcgatatatacgagacactgccctagccgcgaaaatgccgaagtacatataaaaagagtaaaatcgtgtctccctaaatacggtaaagtagcaattatgtgtataacagataagcaattcggagaaatcgaattattttattcacaagtcaaagagaaattacctcccacatatcagcaattggaactgttttagtaagtagattaagatagcttctaaattacgtgtagtatctgtatttaagacgtgttgtactgatttatattttgtttgtatacaaggtaaattcggtatagaagggcttatttatgtaaatcaaaaggacaaaataggaataaaaaaatgtagaaaatatacaatttttagatactttccatgtgttttttttattgaataaaaaggggcaatcctttgatttttagtagattgtcccttttgaggttgtaactaatcacaaagttacagattttgaaaggattttacaacaatttccaaacaaagcacctttgaacctacgttgtaactaatcacaaagttacagattttgaaaggattttacaacattgactttgtaacttagcttttttcttgtgttgtaactaatcacaaagttacagattttgaaaggattttacaacttgtattcctgaacaaaatattcttttgaagttgtaactaatcacaaagttacagattttgaaaggattttacaacataatagaaaggattttaaaaaataacatagttgtaactaatcacaaagttacagattttgaaaggattttacaacatacatattaacgtacattttccaaatgttgttgtaactaatcacaaagttacagattttgaaaggattttacaacagaataaaaaaagtacccgttacaatactcgttgtaactaatcacaaagttacagattttgaaaggattttacaacgacgctatgaaagtcagtgatgatagtttcgttgtaactaatcacaaagttacagattttgaaaggattttacaacacggtcaataatcttctgaatgcggccagggttgtaactaatcacaaagttacagattttgaaaggattttacaacctttgttaaagacgggcttcattgccaagggttgtaactaatcacaaagttacagattttgaaaggattttacaacagttgataggtgtatgcctgcccgacaatggttgtaactaatcacaaagttacagattttgaaaggattttacaactgttagttttcattttagatacgttgttgggttgtaactaatcacaaagttacagattttgaaaggattttacaactatcaagaaacagcaggagttggaggatgaagttgtaactaatcacaaagttacagattttgaaaggattttacaacggcggacaagatgtatctcgtccctacattgttgtaactaatcacaaagttacagattttgaaaggattttacaacactttgcttctattttcttgtttttttagtgttgtaactaatcacaaagttacagattttgaaaggattttacaactattgttttccacatgcgctggtattttatgttgtaactaatcacaaagttacagattttgaaaggattttacaaccgctgcggcagcgcgcaaggccgcaaggccgttgtaactaatcacaaagttacagattttgaaaggattttacaacatattaaaagcatttttaaaaagatgtaaagttgtaactaatcacaaagttacagattttgaaaggattttacaacgtctgcaagaacttccacaatttgagggacgttgtaactaatcacaaagttacagattttgaaaggattttacaacccataaagctccgttaagtgcagggtctatgttgtaactaatcacaaagttacagattttgaaaggattttacaactattattaaagacatatgaagtctattttagttgtaactaatcacaaagttacagattttgaaaggattttacaacacagatttatttttcaccatcaagttcggagttgtaactaatcacaaagttacagattttgaaaggattttacaacaataatcatagtgccgtggcggtgggctttgttgtaactaatcacaaagttacagattttgaaaggattttacaactaaagttgatgagtggcaaatttactttccgttgtaactaatcacaaagttacagattttgaaaggattttacaacaatgggggtttgaatacgaagaaaagcccggttgtaactaatcacaaagttacagattttgaaaggattttacaacggcggaatggatatatcctttccctacgtggttgtaactaatcacaaagttacagattttgaaaggattttacaacttggtagcgtcaaagtcacaaaagtaagttgttgtaactaatcacaaagttacagattttgaaaggattttacaactccgtatagtcctaaatatgcggggggcaagttgtaactaatcacaaagttacagattttgaaaggattttacaacatacatattaacgtacattttccaaatgttgttgtaactaatcacaaagttacagattttgaaaggattttacaacgttatggatttcacattattgtctattaaggttgtaactaatcacaaagttacagattttgaaaggattttacaacgcacttctgcgttgatgacttttattgtttgttgtaactaatcacaaagttacagattttgaaaggattttacaacaaaatagtcgtagtcgtttcatcgccctatgttgtaactaatcacaaagttacagattttgaaaggattttacaacctcagcacttgcaaagttagcaaccacagggttgtaactaatcacaaagttacagattttgaaaggattttacaacaaaaacaaacattttgtaaacaattttagagttgtaactaatcacaaagttacagattttgaaaggattttacaacactactacgataagtttttcagcagtctgtgttgtaactaatcacaaagttacagattttgaaaggattttacaacataaactgggaaataaagtctttggagaaagttgtaactaatcacaaagttacagattttgaaaggattttacaaccaatgtctggttcgtcagatgctaaaccaagttgtaactaatcacaaagttacagattttgaaaggattttacaactaaaaacgtaaatgtcactgatttttctgggttgtaactaatcacaaagttacagattttgaaaggattttacaaccggctttccaaatgtattttttgacattgtgttgtaactaatcacaaagttacagattttgaaaggattttacaacggaaagacaaaagagggtatcattttggaagttgtaactaatcacaaagttacagattttgaaaggattttacaactatattttcagacaaaaatcaatcgtatggttgtaactaatcacaaagttacagattttgaaaggattttacaacatctgttttcaaggctcaaaaggtcggggcgttgtaactaatcacaaagttacagattttgaaaggattttacaactgttcattactgcaaagcaacgaaaggtaagttgtaactaatcacaaagttacagattttgaaaggattttacaacgcaaaaattccgtagcacacaaaataatgggttgtaactaatcacaaagttacagattttgaaaggattttacaacattttgacctacaaatatagggcgcatattgttgtaactaatcacaaagttacagattttgaaaggattttacaacttcaaatctgaagccccataaaccgtttgtgttgtaactaatcacaaagttacagattttgaaaggattttacaacgcaaggagcagacccttacatcttgatgagttgtaactaatcacaaagttacagattttgaaaggattttacaacaatcgagaatttatggtttcattcatatatgttgtaactaatcacaaagttacagattttgaaaggattttacaacaaaaaataattacatatgatacttattccagttgtaactaatcacaaagttacagattttgaaaggattttacaacgtattcaataaagacgtaatacttgcaaaagttgtaactaatcacaaagttacagattttgaaaggattttacaacagcagcactatcgacaatagccaaaggatggttgtaactaatcacaaagttacagattttgaaaggattttacaactgtatttatggattagaaatagaagccgaagttgtaactaatcacaaagttacagattttgaaaggattttacaactattgcgttattataatcttgcgctatttgttgtaactaatcacaaagttacagattttgaaaggattttacaactaaatattaaaactggatatgtttcttatagttgtaactaatcacaaagttacagattttgaaaggattttacaacatacggatttacgcaagatgttgattatcagttgtaactaatcacaaagttacagattttgaaaggattttacaactggatgtgaaaaggataaaaaagaagattagttgtaactaatcacaaagttacagattttgaaaggattttacaacaaaaaaagtatcccaaaggattcccttaccgttgtaactaatcacaaagttacagattttgaaaggattttacaacatgagaagagtatgataactaaaacagaaggttgtaactaatcacaaagttacagattttgaaaggattttacaacgttttacattacaaatatataacatttattgttgtaactaatcacaaagttacagattttgaaaggattttacaactcaaagtagttcaggacgttgttcaagttggttgtaactaatcacaaagttacagattttgaaaggattttacaaccaacataagcattgattggttattaacagggttgtaactaatcacaaagttacagattttgaaaggattttacaacacaggtttattttttaccattaggttcggagttgtaactaatcacaaagttacagattttgaaaggattttacaacggttcaataacattcataatcatcttagattcaacccccaagtgcaattttttatgccacgaatttataaaataaataggagtatcccataatctgtgtaagttgaaaagttattctgaaattttttgagcccttaaaagctcaaaaaaaatttcggaaataactttttaactatttttgacccataatttaaacagatatgattaacaaggaagaattgctcaacagcaaagaattttacaagtcatttaagactgctgaggacttgacaggtttctttaaagaactccacaaaaaagcggtggaacatatgctcaatgccgaactcgacgttcacttggacaacgaaaaacatgacaaaaccaaagatggaaattatcgtaacggacacacttccaagaagataaaaacttcctttggcgaagaacaaatccaagttcctagggatagagacggtagttttaacccaatgttagtccctaaacgcaagaacgttatcgatggtttggaaaacatcatcgtatcgttctatgccaaaggaatgagcgtaagcgacatcgaagaacaaatccaagaaatgtacggctttgaagtatcaacttccacaatatcaaggattaccaatgcggttaccaatgaaatggtcgcttggcagaaccgcccgttggacgagctgtatctgattgtttggatggacggcatcgtttttaaagttcgtgagaactcaaaagttgtcaacaaaaccatttaccttgctgtgggcttgaatcgagagggaaaaaaggaagttttaggaatgtggctcggaaagaatgaaagttccgccttttggatgagcgttctcactgatttaaaggctcgtggagtggaagatattctcattactgccaccgataatttaaacggatttacgcaaaccattcgcacggtttttccccaatcacaaacgcaaatatgtgtggttcatcagattaggaatgcttgtaagtatgtggtttacaaagacagaaaagaatttacagccgatatgaaacacatctatactgcccctaacaaggaagctgccaaggttgctttggaagattttgcccaaaaatgggagtcaaaatacggctatgctatcaaatcttggtatgacaattgggacgaattgaccgtatttttcgattttccgttagagataagaaaaattatttacacaaccaatcttattgagaatctgaatggtaagattcggaaatacaccaaaaacaagctgtctttcccaacagacgaagctgtgcaaaagtccgttttcttggctttgagagaagctaccaaaaagtggagtatgcctatccaaaattgggggattgtcttgaaccaatttatgcttatatttgcacaaagactcaaactataaaaacttaaccccaactttttaacttacacacttagagggatagtgtcaaataaatttttaggttcttcaaaatctaatgttaatctcggtcttcggttaattttatgttgaatttctttaatcttctctttgctaattttctcaaaataagtacccttagggatatattgtcgtacaagtttgttggtattttcactcaatcctcgctcccaagaacaatacggattggcaaaataaaaatcacaacttaatttcttgctaatatactcatgttcagaaaattctaatccattatcactggtaatggttttcacataatctttataagggagcaaagcgtatatcattgctttggctaaactttttgcatttttaccacttaacttcctcattattagaaattttgtttttctttctacaatcgtcagaatcgctcctttatgttctgcccccacgattaaatctacctcaaaatgtccaaattcttcattagtcaaaacgatttcagggcgtaaacgaattggttttcggttttttatcacttcttttttgcctgaaacggggcgttttcgatgttttaactgatgtcttaaatattgatataaatctcctcctttttccttgtcttctcggatatattgataaatcttttcagtacttaccatacttatttcgtgctttttacagtaacctacgatttgctgaggagaccactgttcccgccttattttctcttctacaaaagctgctacctttggggtaaacttcctgtttacggcaaatctttccttgcgaatattggcttgttcctgagcgttttgagggttatacccccctcttttgagtttgttcctcttaagctctctactgatagtgctttctgaaacgcccatttgctgagcaataaatttttgtgatttattacatttaagatatgcttttatttcgtatctttgctccaaagttaaatgtttatatttcattgtcttatttggttatttgacaaagaaataacatttttttgaagggagaaagtttttttactttctctcttttttctttgggctagcccaaagaaaaaagagagaaaaacgatcccaaaaaattgcacttactaatggaatttaagcataacagtagttgtaactaatcacaaagttacagattttgaaaggattttacaacaagaagcccattttgattacacgtgaattggttgtaactaatcacaaagttacagattttgaaaggattttacaacatctcggacgaacaagctaaaacgagtgcagttgtaactaatcacaaagttacagattttgaaaggattttacaacatacttttgattggggcataatagaaggtggttgtaactaatcacaaagttacagattttgaaaggattttacaactagattgcttatgttttacgataacttcttgttgtaactaatcacaaagttacagattttgaaaggattttacaacgctgtgaaccaaacagcagtacggtaagaagttgtaactaatcacaaagttacagattttgaaaggattttacaaccgtatagcttgtattagtgtctttcactaagttgtaactaatcacaaagttacagattttgaaaggattttacaacaggtgtatccaccctccgcaaaaccttcctgttgtaactaatcacaaagttacagattttgaaaggattttacaactatccttaaatatatttacataaggtaacagttgtaactaatcacaaagttacagattttgaaaggattttacaaccactgcggttctcctcccattccaactcttgttgtaactaatcacaaagttacagattttgaaaggattttacaaccaattcattgaggactgcgaacttacgctagttgtaactaatcacaaagttacagattttgaaaggattttacaactgtgttgcaaacttgcctttcatttctactgttgtaactaatcacaaagttacagattttgaaaggattttacaacgatcggaa

SEQ ID NO: 1184 - DNA, 24422 bp, synthetic construct
  misc_feature 1..24422: note = Synthetic
  source 1..24422: mol_type = other DNA
ttgagcctgaaatgaaactagacttacttaatatcatttcaatatatgccaaacacgtgaatggtgataattatgaaacctggcataaaggtaaattcattgaaaaatgggcagaccctgtaattgttgaaaaactgaaatcaatttacggtgaatataatgttatgagttcatggagatcattaaaatcgactactgacttatttatctatatctcagatctgctctacagcagtaataaatttaataccataaataaaccacaatctgtttttagtaaatggattatggaaatcgaacaaaccaatacagctataaccaattaaaaagaaagtggacaaatcttacatatttaactttttaaacagcatgttttataagttaattcttcgcagcctgattatttttttatctcttttgccactgagctatgttatattttcgaattcaacccacaaaataatactttttccattactgcttatttcgactccattttcgataatcattcttactggaattttattaaaaatacatccaacgatcaaaaacgaagcaatcgaaccgggtacaaagaagttcttttattggttaaacaaaaacttcattcatgaatttgtttgcagttcttcattcctgaataatttgacaaatagaattgattttttaaggatattttattacaaattatgcggtatcaaaaaccccttacttgttattattgctcctgatgtaaagtttttagacccttatttgttggtcttaggtaagaaaatttttattggctacggcactattataagtggacacataattcaagggcgaaaacttcttgttgattacgttaaaattggtgataacgtaagaattggagcctcttgctttatctcttgcggagtagaaatacaagaaagcacgatgattggttttggagttaaaattggaagcaattgtaaaattgggaaaaatgttattatctcttcggaaacaactattgatgacaatgtcataattgaagacaatgtaataataggtaagttctgtattgttggtaaaaactcaattataaaaaataaaagtgtcgtatcctttaaccaaattataaaaccaagatcaatcattgattttaggaaaaataaataaaccaaaccttaccgcgcaatgaagaacttcgatttatcatcacctgatttcaatactataaggtatgagatatataaagagctaagagcagaagaaccagtatattggtatagtaacatgaattcctggctaataaccagatacgatgatattatgaagctattaaagtctgatttagttacaactaatcacctcgtcaatgataagttaatcaatatacaagatccagatccgcttatcatagatataactaatgtcttaaaaagttggatgatatacaatgaagcccctgcgcacacaaagttcagaaaattcatgaaccatgtttttgtacacgaaaatatacaaaaagttaggccactcattaaggaccttgtcaggaaaagaatggcagagtgcgatttaatgaatggatttgattttgttaattctgttgcaaacccaatttctgcagagattttaagaatattattaggattagaggaaattgaactcgataaattttttgcatggtcagattcaatagccacatttatgcaagattttgtcgtttcaccaacgcctaacatacaaattgctcaaggcgccgcaaatagtctgctcgaaatgaaattagcctttcttgaggcgattgagcgtcgaaaattatcaccaaaattggatttactaagtggattagttgaagggcttaataatccaacaagtggcatcacagaagacgaagtggtgtatcaattaatccatttaatttttggaggccataaggtgcctcagtatctactaggcaatagccttcattgtatcttaaccaatccagatgcctataatttacttataaataacaaggaagaatatattccactcctcattgaagaagtaatgagattcgaagcacctattcaattcattacgcgccacgcaaaggaagacatctttattcatggaaaaaagattaaaaaaggagattctgtctacttaatgttgggctcagcgaatagagatgaaacggttttcaaaaatccagagatattcaatcttgaaaaaagaaacagacgacatatatcatttggcggaggaattcatgcatgtcttgcggcaggactagtaacggaggagataaaagaaatattctcgcaattttttaatggggtcaaggaaattagaccgctttatgatttaaataatcctgtttggagcaagaattcaacatttcatggaatcgaacaacaatatatatcaattaactaactccccatccatcaaaaatatgtttgaacaatcagcaatatttggtgattttccaatccgggaaatatatttaggtgcgcttgttcagcgtctatgtgaaattccacaattacttccaataaattcttttgagaataccaggaatagatatcaacatgttaaaaatatggttaatattctggatgtattgtcaaagtcggagtacaataagaaaatttatgatgaatatttttggaaagatgttgcgatgggaataattatgcatgacattggacattcgccatatggacatgctggtgagagggccatagaaaaatacttgatcaatgaaagaaagttttcaaattctattcaatcagaaaggcttttatttcataaatatgctagtgttggacaaataacaaataaaggaaacatattcgatacactaccaattaagccatttatcagatttaaagacttccgtctagattgtaatgtatccgttctggtagattttattgatgatttggagaatgtaattggtgatttacaagacttatggatcgcctttggtgatgatcgtgcgcagaagttgtttaattaccattttcattttagccatatagcagacgatattactaaaacaggtatagaatatcttatatacaaatgtgttaaacttaatgtgaataatttatgtgatgatatattattagattctaataaaattcactccgagttaaaatatttaaaaacacaaattcgattattttctgaaaagtatgaatgtattgcacactacgatacagtcggagaggatatcgtatctaaaattttaacctacacagaaaacacgttaaagtcagaatatgtgtttaatgatgaaaacatcaaggacgttacgtctgatatcgttgcatcaatgtcattattaaatattaagaatcatctgaaattatcttttgagagtcatttgagtatgatttagatgtttcgctttgttaaacccgagagaagtttgccattttttctacacgacaaaatataacaatagccattatatgagaagtaaggctatttagactgcgattagttcaagcttataacacgattataagttaggttgtaaaattttaaggacaaaacattatttaaaaaggatgatcatttgcggaattaaattaacacatgacggagcggtggctcttattgataatggaaaattgattttttcttatgaaatggaaaaaattgagaataagccaagacactctgactttgagattaccttataaaagttagaagacattttgttatctcacggttatagtttcaaagatattgacaggttggttattgacggttgggatttttataccataaatgcccatttacctttcgatcagcacgaacagctgtcttttgaaataaaaataaataaagagaagtcgcttacgattaataagctagctgcttacggacatcttgtaaaagaaacagaaaatatcttaaagcaggaaacttttgaagtttccgagctcggtttagcttataaaagctataaacatgtttctagtcacgtttttgccgcttattgtactagcccatttgcaaaaagtggagaagattcatatatcttagtatgggacggcgggatgcctccgcaattattttattacagatatgaggaaaataaggtagagaatttgggttggctttttccctttatgggatatatgtatataactttttcgcacgaatttgagccatttaataaactaaatgatcatctatcagtggctggcaaagtcatggcctatgttgcattaggaaaacttgacgcaatgattatgggtaaatttagagaaatttataaggaattgattgagggtgtggactcgtttactatgagtatcgatcaggtaatgaaaatcaccaatgagtttaccaggcgatctaaagaattttgcgattccgaaaagctcttacatgcaaatatgctggctacatttcaggtctttttgcaagaattattgattgaaaacctgacacgaaaggtaaaagagaaacctaccctggtgaaaaatctatgtttttcaggcggtagttcgctgaatattaaatggaacagtggcataaggaacagggggatttttaactcgatgtgggttcccccttttccaaatgacgcagggagtgctattggaacggcatgctgtgaaatgattgttagtgataatataaggtccttggaatggagtgtttatagtggccctcctgttatggatattaaccacacagaatcagaatatctattcaacgactgtacactggaagaattagctaagatattatttgaatacaatgaaccggtagcctttattaatggatcagcagaaatggggccgcgatctctcggaaataggagtcttctttctcccgctgttagccctgatatgaagaaattgctgaatgagatgaaagggcgtgaagattatcgtccagtagccccgatatgtctggaggaatatgcaatggaagtatttaatcctggtgtgccagatccttacatgttatatgagcatatggtaagaatagattggaaagacaaagttccagcaatttgtcacttggatggaacagcgaggcttcaaaccgtaaatagcaatcagaatcccacaatctatgaattgctcacccattacaaaaaattaagtggaattccattgttatgtaatacaagcgcaaattttaacggtaagggattctttccggatataaacagtgtaatgaaatggggtaaggccaattacatttggaatgacggccgtatttattttaagaaaaattccccgtattcgaaaaatgtatcaaaaatgaatggtggttatgtaaaaaatactgtgagtcaatgatttaattagtcgttcctcaaaaagggagttaaaatttggtcggattctgatgatctacaataaggattttttctacactttccgcattcaacaaatgatcaaatgtgcccaattggggccaagatagttatccctgaacccataaacaacctgtaagtaggttctgctgagaaagctgtccatcaatttacgactgccaaaattagaaaagaaatcatttattaatatgccaaacagcgggataatccgccgtttggcatattgagctatcggacctattaccatttcacttcatgtgcttgtccgtcaacagataaacaaagatcataaataccaatgtcagtatacaccaaattaccctggtcaataccgccttgacatattctacactcctgatctgttcaggaaataacgttagccgaagctgccgggtaatcgggattggcctcttttcaatagtttggttaatattggtcagccttctatccaacgtagcattgacttccgacaaatcaggcttgggggcttgtataataatgcttttaaatttcgcttcaaaattgctcaataaagcctgggtcagtttttctttctctaacaataatttgtctttctgctctacttggctttggtgctttttaataaaatcgttaatgtccttcaattcctgtacatgatcactcagtacgtcttttaatgttgtttcatccattggggtttcttcgtttggtttcatgatgtcatttttaattagttcataattctgttcagttcaattaagcatagcttaacggcctatgccttggctataccgatgtacctgctcttgttccttttcccgctcttgctgtttctttaaatcctcctgctgctgtcttaataattgcgccagcgtgttttgttcctgctgccgctgtaaaagctgttcctgtttcagcttcttttcaatatccatcagggcatagcccaactggctgcctttaaagcggacgtgttgcgcatcggtaaaagcgataccccggcccaactctacttcgtagccccgctgctctatgtactttttgacctgctgcacattggtactttgcttgatggctgtttgcaggtgctttttcaaggtttctttacggttatcaacccgctggctttgcgcgaccctttgctctggttttaagaacttattcgggcttaacacccgttctaatttgtattccatttctaccttccgggcgaactcggccatatgcttgtagctgttgctgtcactggcggtcttgccgtcaaagccaatccggttggcgaccacatgcatgtgctcgtggtttgtgtccttgtgcgctacaaccacatactggtgatctttaaaatcgaacttttcggccagtttttccaccatgtcgatcttatcctgcaagcccaacttcccggcatcgcggtgggcgaagcttaaggaaaagtgaaataccggcttggattgatctgggtttaacttggcaacttcgatcatctcccgcaccagctccaggcgggtgccgaagcattgattataagcgatcacttccacctgcttcttttccagttcctgcatttgcagctctttactttcctgccgcctgccctcaaaaagataatgcagtacgccccgaaaacttttacctgtgccaactttcccgatcatgatacataggcgttaatgttcttaactaagctccgcaggcttcgtacatcctggtcgagcaaagctctttcaattgcattcaggtcgtcgccccggttgcgcttccttgcgatctgattgaggtttgcagcgatgtgattgagcgtaccccgcatttccaaaaccggcttcggcagggtcttgaccttaacctcgattcgcgtattcaatcccaggttccgcaggaaaaccgacgggttcatgccgacgcgcttcgcgttggcttcaatgatctttttctcgatgagtgtgcacatcacgctcacggcagcccgccgcttatgcggcacactcggcctgccacctttattcacccggcccacctgggctgggtgttttgtagttattgtctttttaacagcaccttccataagctttaattcgttaaaaaatcttcaaaaaaatccccccgaatgcgatagcatgagcgggggccagcaagtttcggcatggccgaaacatagctggctccgctgacaggccaagggcctgttccgctacccggctgtatcgctgtggcgatactccggggctgttgatgcagcacctttgggtgctgccccgccaaaagcggcttgccgctttcgcggttctacggtgatcgcaagcgatcaccgtactgttcaaaacggtggcaccaaaggtgccgcccgtttgctccggcggcttgccgccggtactgttttgcacccgcttgcgggtgccgggcttttgatgcggcaccccctggtgcggcatcggtgtgcattggagttattaaatagctggttacacaatcacccggtacatgctaaccggttattttatatttacatatccagctattttatatcacgctatattttcacatccacctgcgggtgtcccatcggtggtgcctccatcggtattgcattttatacaccacactatcagggtgcacgtacagggctaccgtcaaaaagccactggctttttgacgggcttataacaggctttaaggacatccattcaatagcatggcaattgatgggcttccgggatttaatgcgctccatcggccttaaaatgctttagcttttttattgttggttgccagatgctgtactgcatcttccctgatctcatctgctgttttcttccggcctgacttgatccattcggtgagttccgaacggtagaaatacagacgcttcccgcgcttattcaccggaatttctttacgacatactttactgtaaacggtcgggacggccaggtctaaaaattcggcggccttagtgatgggcatcaattcttcttgctcaggtgattgttcctgctgactaattaaaagctgctcgatgttgtcgagtttgatctgtatttgtgttaccgcctcgggtaactggtcaaaggtgagcgtgtctttcattgcgcattaattttgtttaatgctgcaatggtaggggcttgttttgctgggttacaaggggctaagcagtaaccccgcgcttaccccctcatttttttgctattttttgctgcggggagtgggaaggatgaaaaatttatcttccttgtgttcaatttttagaatgggggatttgcaaggacgggttttttctgagatcaggctatgtaaataaccctccggtaattccctgggttcagattgtggggataggtaggtaaactttggagctatccatttttctaggtcaattttccggcagcctacgatcaggttggcatcatagagttgcttaaaggcatcggatagttgggttgctgaaccacgaaacagcaaaggactggcgggagcctcgtcatttaataatagtttttccagcgcgggatgttcttcgggaataaaatacactttaaataggtcaaacagttgttccgctgcaccaggtttaaaggttggatagtagccaactacttttgccgctattgcctgttcttcgtttatttccgcttgatcgaagacttctgcaccgtttccaatttctgattcctcattttctatttccgatttggtaatggtatccggctgaacaggttcttcattctttgccacttcgtgtttttccctttttgcattcagccattctttaaattcagcttcagacctcttcggcttcaatgcggtttccgtggcatagatcagctccatcaggaatttttcccgcaacttgacagattcgcccaggtcttctgcgaacttgccgctaatttctatctctgcgctggcaggttgcaagccattgacaacaaataaatattccagcctgacggaaaaaacaaaggagcggctataagcttttgtcatctcggaatagtgatcatggtaacttcgccaaaaatccttaaagcgttcgcgaactttggccaattcggccagttggagctggatacgctctttatctaaagtcatcaggtctataaaggccatatctttcaatacccttagttcactacggtaagaaaaactatcatagtattgggtctggtggctcaggtcgtagaccttaacatgctttttttcattcgtaccccattccatgtgaatatcgtcctcaatcacacgcaggtcgaatgtctggatgcgggttagaaactctttaagatgctgcatagccaggcagattttaataagtaaatttaaggaattatagcctaaaggcaaagagacccatgttgttctatagagtgaaaattccattcaggtatccgttcgctatgagaaatacctgaaactatacaataaactaagtgacggtagacaaattgagtgatagtaatcgggttttcaatcaatatcttccttgagtttgtttagtaattaaaatatcaaaaaaaagccccgcattgtaaggcgaggcggcttaaatgttttcacaacggaataatccttattgtgatttgctttcaatttcaaatgtaatagttttcggcctatttaaaatacgggaaaccgtatttgtttgatgttttttctttttagatttatggaacgagaagaattacaactatgaagaatattttaggtctggatcttggtacaaattcaattggttgggccttaattgaaaaggatacagatcaaaaaaacggcaacatacttggtacgggtagccgcatcattccgatgagccaggacatcaaagatgaatttggcaagggcaattctatttctcaaacagcagaccgaacaaaattcagaagtgtacgaagacttcgtgagcggcatttgttacgtagggaacgcctgcatcgggttttaaatgtgctgggctttttaccaaagcattacgccgatcaaattgacttcaagaaacgtctagggaaacttgttaatgaaactgaacctaaactggtttatgacaacaaaaacttcatcttcaaaaaatcgtttgaagcgatgttatccgattttaatcaacaccagccactgctgttagcagatggcaagaaagttccttttgattggacaatttattacttgcgaaaaaaagccttaaccgaaaaaattgaaaaggaagaactcgcctggttgatcttaaatttcaatcaaaaacggggatattatcaattacgtggtgaagaggaagaggaaaatcccaataaaatggtcgcttttcattcgcttaaaattgttgaggtgattgccgacgaaagtcaaaagggcaaggcagaaacctggtattcgttaatattggaaaatggatggatctatcgaagatccagcaaaacgcctttatacgattggaagggtaaacagcgtgattttatcgttactacagatctaaatgatgacggaagtattaaaaccgacaaggaagggctggaaaaaagaagtttcagagcaccggtagaagatgactggactttagtaaaaaagaaaacagaacaggaaattaaccgctcccataaaacggtcggtacttatatctacgaaaacttactgcaagatccgaagcaaaaaattaaaggaaaattagtccgcaccattgagcgtgagttttataaagatgaattaaagatgattcttaaaaaccagcaaaagttccatcccgaattgaatgatgagcatttatatattaattgtgtaagagaattgtatcgcaataatcaggcacatcaaacgatcttaagcaaaaaggactttgtacatttatttatagacgacattattttttatcagcgaccgttgcgaagccagaaatcttccatcagcaattgtacgttggaatttagaaagtacaaaaatgaaaatggtactgaccaaacggattatttgaaagctattccaaaatcacatcctttgttccaggagtttcgcctttggcaatggatctacaacctgggcatataccaaaaagaagatgatacaaatgttacggatgagttgataaagaatattgacggatatcaggatctgtttgactttttaaacaacaaaaaagagatcaggcaagatatcctaatcaagtttttggttgaacaaacgggtttaaaaggaaagcccctatcctcagtagttgccaaatatcgctggaatttcgtggaagataaaatttatccttgtaatgaaacaggcactcagattcgtacaagattagcgaaagtagaaaacacgcctgaagatttcttgactgctgaaacggaaatcaaattatggcacattatatattctgttaatgataaagctgattatgaaaaagcgctgaagaccttcgccgaaaagcacaatttagacacacattcgttcgtcgaaaacttcaaaaaattcccgccattcaaaagtgaatatggatcattctctgaaaaagcgataaaaaaattattgccgttaatccgtttggggaaatattggagttgggagaacattgataagaaaacacaggaaagaatagaaaaaatcctgactggagaatttgatgaagccatcaagagcagggttcgtgacaaggctattcaccttacagaagaagatcactttcaaggcttgcaactttggctggccagttatgtggtttacggccgccattctgaagctgataatttagataagtggcataccgtagcagacttagaagattatcttgcagagttcaggcaacattcattaagaaacccgattgtagaacaggtgataaccgaaactcttcgggtagtaaaagatatttggctgcaatatgggcagggcgcaaaagacttttttagtgaaatccacatcgaattagccagggaaatgaaaaacaccggggatgaaaggaaacggctaacctctttagttacagacaatgaaaataccaacttacgaattaaagtactattgtctgaattgctgaatgatggaaatgtcgaaaatgtaaggccgtactctccgatgcaacaagaagcactgaagatttttgaagatggcgtattgaattctgacatcgaaattgaggatgatattttaaaaatcagcaaaatggctcaacctacaaataccgagctaaaacgctataaattatggctggaacaaaaataccgctctccctacaccgggcagatcatccctttaaaccgattgttcactgctgattatgaaatagagcatatcataccacagagcaggttttttgacgatagttttagtaataaaataatttgcgaatccgcagtgaaccagctcaaagacaagcagctcggtttggagttcattaaaaaccatagcggaactattgtgaaactgggcatgggaaaaaccgcaaaaatcctcgacgtagaaagctacaacgaatttgtaaaggggaattacactaaaaacatcagtaaaagaaacaagctgatgctggaagaaatcccggataaaatgatagaaaggcaactgaatgatacccgatatatcagtaagtttattatctccgcattatctaatattgtccgtagcgaaagcaatgatgatggtttcaactctaaaaacgtattaccgggcaatggcaaaatcacttcaaggctgaaacaagattggggaatgaatgatatttggaatgaattaatactaccacgtttcgaacggatgaacaagataacggattctgctgtatttactgcctggaacgaaaataatcagaagtttttaccaattgttccgttggagttttcaaaaggatttcaaaagaaaagaatagaccataggcatcacgctttggatgccctggttatcgccgcttcaacaagagaacatattaacttactgaataatgaacatgctaaatcagataaacgctttgacttgaaccgaaaactcagaaaatttgaaaaggttgcctataacgatccgaaaaccgggaaaagaatagaaaaagaagtgcctactatttttctgaaaccctgggaaacctttaccgtagatgccaaaaacagcctggaaagcattatagtcagctttaaacaaaatctccgggtaattaacagagcaaccaattattctgaaagctataatgatgaaaatggcgcgttgcgattagggaaagatggtaaccccctaaaagagaagataaaacaaagcaagggcgatagctgggcaatcagaaaacccatgcataaagattttgtctacggaaaggttcatttgcaaaatgttaaactacctaaagataaattcattacagccataagaaaaagtttagatgtcacctttgatctaaaaagaatagagacaattaccgataccggtattcaaaagatattgaaaaattacttgcatagtaaagaaaacaaggttgaattagccttttcaccggagggtattgaagatatgaatcaacatattgaaaggtacaacgacggcaagaaacaccaacctatccataaagttcgtgtttttgagatcggtagccgattctctttaggagagtcaggtaacaagaaaaccaaatttgtggaagctgcaaaaggaaccaatcttttctttgctgtataccaggatgataataaaggcaaacgaaattatgaaaccattccactaaacattgtgattgaaagacagaaactgggtttgcattccgtcccaacagaggatgccaaaggcggaaaactattattccatctttctccaaatgatatggtatatgttccaacttcagaagagctggaagataatttggcatcggttaacatcaaacgtttaaatacagcgcagagaaagagaatctataaggttgaaaaggccagcggcgttgagtgttattttattcggcaggacatcgcttacttaattaaaaattacgatgctaaaactaaaattggtgagttggaaagtcagaataaattgcaaacaacgatgacagatgatagattaaaaattacagatgtgtgcgtcaaattaaatatagacaggctcggtagtatcgctgaaacattcctgggaaatcagtatggagctagtaaaaaaacttaataagcaacaaatttatcccggttaggccaatggattgacctattcgatagttataattaaaacctgatcttatcacaattaaatggggcaacatgataaaacgaacgcttcacttcagtaatccggcttacctgagcttaaaggaaagccagttggtaattgatcttcctcaccttaaaattttaggggaaaaggaaagtaaaaagtcggtacctattgaagatataggaattgttgtactggatcaccagcagatcaccatcacccatggctgcattgcagcattattatacaacaattccgcgatcatcacctgcgatcatacacatcaccccaccggcatgatgctaccaattgacggacatgatacgcaaagcgagcgcttcaggtaccaaatcgatgcttcacagccacttaagaagcagctttggcaacaaactatccaagccaaaatattaaaccaagcggcggttttggcagatcgtggtattccccacgataatatgcttcactgggctaagtctgtacgttcaggcgatccggataactacgaaggacgtgccgccgcttattactggaagaatgtattccctaaaaaagtggaattctttcgtggccgtgagggtgacccgccaaacaatttactgaattatggttatgccatattacgggctattgtagcgcgcgggctggtatgttccggcctgatacctacattaggtatacatcacaggaataaatataacgcctattgcttggctgatgacattatggagccttaccgcccctatgttgatttgatcgttctaaagatcatcgataatggcgagaattttttagagttaggcaattctataaaatctcagttattaggcattgccaccgttgacgtacaatttgaaaggaataggagtccgttaatggttggtgtgcaaagcactactgcttctttagccaggtgttacgaaggaaaaaacaggaaaataaactaccctatcatgaagaattttaatcctaaaagggccataatccctaagccggacgaaaatttcaatgatgaggatacagaaaatactattgaatacaatattggcgatgaagaatagctaaccgttgatgaatgcgtttaaatgaataccggattttgtggatattagtattttttgacctgccgacagaaacaaaaaaagaccggcaaatctacagtaggtttcgtaaggatattatgaaggatggatttggtatgttccaattctccatctacctgcggcattgcagcagtcgtgaaaacgctgatgtacacatcaaacgtgtgaagaaaatactcccacctaaaggtcacgtcggtatcatgaccattaccgataagcagttcggaatgatggaattgttctatggtaaggaagagaaggagcttccagacaccccacagcaattggaattgttttagaattttaaatccggaagcctgagcaaccggattttttaattctaaatttaaacataaacaactgatatttaacgttttgaaccatggtatattgttccaaatatcagttgtttaaagattgaaagcaaatcacaacagcagtacatggcgaaacagcgtctcagcgattgttccaaatatcagttgtttaaagattgaaagcaaatcacaacggtcggtagcatcttgtagtttttgttcaaattgttccaaatatcagttgtttaaagattgaaagcaaatcacaactgctgtgcgcagcaaggaaactctggactgattgttccaaatatcagttgtttaaagattgaaagcaaatcacaacggttctcgtcgttaaggcaccgggagttatattgttccaaatatcagttgtttaaagattgaaagcaaatcacaacggctcaactggcagcactgtaatcatactgattgttccaaatatcagttgtttaaagattgaaagcaaatcacaacattgcgagcttctatcccatatcaccgtatattgttccaaatatcagttgtttaaagattgaaagcaaatcacaacaagggttgactgccccggttgatagtaagaattgttccaaatatcagttgtttaaagattgaaagcaaatcacaaccccatgcacctaacgaagcgcctaacatggattgttccaaatatcagttgtttaaagattgaaagcaaatcacaactaatatccctaagctgaacttcgccactttattgttccaaatatcagttgtttaaagattgaaagcaaatcacaacccccggtataccacgaagcgaaagattgaattgttccaaatatcagttgtttaaagattgaaagcaaatcacaacaaggcagcgcccatatccaccgcggctgacattgttccaaatatcagttgtttaaagattgaaagcaaatcacaacggagtgccagtagttggtataactaaaatcattgttccaaatatcagttgtttaaagattgaaagcaaatcacaacgtcgtggccgtatgcagtaaccctacatgattgttccaaatatcagttgtttaaagattgaaagcaaatcacaacaacacatggcatgggcaataatcattcggcattgttccaaatatcagttgtttaaagattgaaagcaaatcacaactgctgcaagcctttcgcgctctatacggtattgttccaaatatcagttgtttaaagattgaaagcaaatcacaactaaagaggttgccgctctgtcattttgcttattgttccaaatatcagttgtttaaagattgaaagcaaatcacaacctaccttaacaaaggcgggttctgtatcgattgttccaaatatcagttgtttaaagattgaaagcaaatcacaacccctaacgcaagtttccagattgaaatcccattgttccaaatatcagttgtttaaagattgaaagcaaatcacaactgatcctggcaagtacgtccataaccgtctattgttccaaatatcagttgtttaaagattgaaagcaaatcacaacaatggccttatattgtaatgctcaaacaaattgttccaaatatcagttgtttaaagattgaaagcaaatcacaaccaggcggtatattttcacgaaacgcaatatattgttccaaatatcagttgtttaaagattgaaagcaaatcacaacgctcatcttttttgcgcccggcgtcagtacattgttccaaatatcagttgtttaaagattgaaagcaaatcacaacagcttctaattcggcggcaactctttgctattgttccaaatatcagttgtttaaagattgaaagcaaatcacaacagggccgacagtgatcccaggatttcatccattgttccaaatatcagttgtttaaagattgaaagcaaatcacaacgggatgatggcaaggatagcaatccatttaattgttccaaatatcagttgtttaaagattgaaagcaaatcacaacagttaatctgttggttaaaaataaattcgattgttccaaatatcagttgtttaaagattgaaagcaaatcacaactatcagggggtgaaaaaaagcagtgtagttattgttccaaatatcagttgtttaaagattgaaagcaaatcacaactattcgtcttgatgttcagcgaaaattacaattgttccaaatatcagttgtttaaagattgaaagcaaatcacaacaatacttaatcacgaagtcgtagcagtcgcattgttccaaatatcagttgtttaaagattgaaagcaaatcacaacatcggtatgctgatgtataaattgttccttattgttccaaatatcagttgtttaaagattgaaagcaaatcacaaccatgggtatctgagattaagacttttacaattgttccaaatatcagttgtttaaagattgaaagcaaatcacaactgatgttgaagaataccaacgtgaatgggaattgttccaaatatcagttgtttaaagattgaaagcaaatcacaaccaattttgttaaggtcaatcataaatcaatattgttccaaatatcagttgtttaaagattgaaagcaaatcacaactggatacccgcagtttcatgatcacattttattgttccaaatatcagttgtttaaagattgaaagcaaatcacaacagcaacacttgccggggccggtttgtcgccgttgttccaaatatcagttgttcaaagattgaaagcaaaactctaaattctggcatggaaaggtgcatatttggcgtctgtagcactccaaatgtgtgtaatcagacttaatgacaaattaccgcaaaacaagagtgatggatattttgcgaagttattctgcaaattttctgcaaataaaaaaccccactcgccagagtggggttaaatcattgattttcaggctcctgaggctgggctcgaaccagcgaccctctgattaacagtcgtagggtcatccttatcgttgttttgtaatttttatatatacttgattataagatatatatgaaatattgatttatcaattttaatcgattttttgttgttttttgttcatttgtgtgagaaatgtgtgagacaataatttgcattttatgcgtttattacttaaattagcatataattaaaaaagtgtgtgagacaaaattagcatttactctaaaataatcaatatggctgttaaagtaaatttatacctggacgaacggaagattgaaacaggtgaaaaagccccggttaaattaaggttgtatatatcccgaacggacataaggcattaccatacaaaccgatatttaacaggagagcaattcaatgagtcttatttggctgccaagccaaagaaagcttttaaggagcttaaaatcgcattggatgccattgtagttaaggccaataatatcatcacgaaaatggatggcgtatttgtattggccaaatttgaacgggagatgttcggcgctcctgccagcgctaccgatgtagtaccacattatcattcctatatcaatgaactgaaccgcaacgaacgcagcggtacggcttctaactaccatttgagtttaaagtccctactggcctttgcaggaaaagataagaaagcagcaacgaatttgccctttaccaatattacgattgattttttaaaccgctatgaaaaatggatgttggctgaagaaaaatcaaaaacaacagtaggcatttacctccgcccgcttcgtgcaatctttaataaggcgattgaagaaggaaatatcgcagctgatatttaccctttcaaaaaatacaagataccgaccggacaaaatatcaaaaaggctttggataagtcagaattaaaaaccctgtacaccgccaagctggaaccgggcagttttaaggaaaaggccagagatttttggttttttagctaccaatgtaacgggatgaattttagagatattactgaattaaaatataaggacattaataaaaaatccttttcgtttttacgccataaaacgctgcatactacaaaagataaacctaaacccattattgtacccctaacggaaacaatcaaggccatgattgaacgttatggcactaaacctgccttgccggataattatgtgttcccgatccttgataaatcgatggacgagaaagaaaaaatgcgggttaaccaaaattttattcgttttgttaaccaacacatacagaagctggcaaaagacctgggattagatacggacatctctacctattatgcccgccacacttttacaacaactgctatccgcaacggtgctaaaatggagttgatacaggaaagcttaggccatcatagcctgtccactacacaaaattattgggctggtttcgaagatgatgttaaacaagagatcgcagacaaattgatggatttcgcataatggctttaagccttagccttataactaaataaatatttactatagccttgttgtgcttaagaacagggctataatttccagttttcaatgtgacccgtccgttaattcgtcgccaaatataaaactgacgcaagccgcaaacatcggtggggactttaccccaaaagcataaccactggatatggctctataagcggacattcccgccctgcaagtcaggcacacggcattccattcttaccagttgagcaaccaacagcgcgtagccgggtaaaatgtcaaggccgggcaagccactgaaaaacaaaacacaattgcccgcttgtgtagccttgacgttttatcccggcgtgggctacctttgctgtactggtgaatgaatggctaaccaacttgcttatcttgcaaacggcaattgcggtttgccttgtagcgaggctggcggcagaagtatggagccgcttgccgcagctactttcttttctcacaagcttaatcgtgtttttaaaagattataatcataggccgtcctattccctgttttatttgcaaaaaacactggatagcatttagtaagaacctttaaaaaatcctcgttaaattctgcgaaatcctcctttaaaactgtaattatatttttgttatccagcatccagttaagcaaactatcatcctgaatattgttcatcatataacaattgcctgtctgctcatcatgaatgaaaaaatgcggtttatgttctactgcaatcacttggctaccaataatcacctctactgaaagattaaaacggtctttgtgaaaagttaacatgaatgacagcgagggctgttccaaactgtatctacaaccttgcatgaaaaatttagttggcttttctcttaaatacctaagccagtataaaagatatatgtggttgtaagggaaatcgacaagcaatggtaaagctttctgccatagggtaaatatggttgctttcgcctcgttccaaacccgccagtcccgatattcatttttataagtaagagggcgtataatatcatacatggttttgcttatctcatttaattgttgttgggatgggtgatctccgcttgggtttggttctttatcaggaagacaaaaatttgaaaaggcaactaattttaaaccgctcctgtcggtcttgccatgaaatggaataagtaatgggcagtggcgatcacggtaaatgtcaggtgcaaaacataaagcataagcatacacgaaactctctcctgcttttgttgaaagtgttttatcgatttgctcttgtaatttagggaagcttgatttgccgaacccgattaggctgcgataaaaactaccataagctggtttagcttctacgttaatatgttggctcgatacatgtatgtcaaggaattttcggctggtttcatcgttatagaaattcggccaatacaatttctgacaatcaaaggtctggcttagccaggttagattaaacaggccaataaaagcgtgaaaacaaagtttttcgtccggcatcccacacgtacagccaatatgcaattcctctttttcaacatggagatacaaatagtatattgaatcatcgtttaatttcagttttaccgtagctataccgctctcaaaacttagaaactcatcttgattacccatgtaaactttgcgccctttaggtggctcataatgcttatacaactcatcgcgggtcaaaagctgaccgggctgtgttaaaggtatcggataaaagaacaggtcggtcggaattgaagtgaaccccaaaagttagacaaaaacttttggggtttattatttatgtcaaagcacacatttgaagagaaacttgatgtagtttctcaagtaagaaagggaaagccgattctacggatatcccgcgaacgccatatccgtgaaggcatgatattggaatgggttcggaaatatgatctttatggcgaaagtgggctgctcaaacaacctaacgtcaagcccacgcctgatttcaaagaagaagttgtaaggcttgtcatagaaaaaaaagtacctttaaatcaggttgttctggaatatagattaagcaagactgctttagagcgctgggtaagatcagtacgggttgagggatatgcagtactataccagcaaaagaatcctggacgaccacctaaatgcatgggaagatcaaagaagcttgaacctgaaacagaagtagagaagctccaggcggaaaatagccgtttgcgggcggagaacgcactattaaaaaaagtcacggccttagtcaaggaaaaagaagcccgcgaacgcatgagtgggcaaaagccatcgaagaactaaggcccgaacatgatgtttcaattctattggattgcaaacagatggctcgttctgtattttattatcatcgcaagcgcctaaatgatgataaatacaagcatgaaaaagaagagatcgcaagtatataccacttgcataaaggcagatatggttatcggcgggtcaccgccgaaatgaagaaccggggttatagcataaatcacaagactgtccaaaaattgatgggaacattaggcctaaaatgcaatatcaggaaagtaagttatcgctcatacaaaggtgaggttggtaaaattgcccctaatgtacttgaaagggattttgaggcaaatctgcctaatcagaaatgggctacggatgtcactcagatgaacattaaaggggagaagatctatttatctcctataattgacatgttcaacggggaagtcatttcttatagtatttcaaaatctccaaatatgcagatgatagatgaaatgttatatgaggcttttgataaagtgaaagatataaggggacttatttttcactctgaccaagggtggcaatatcaacattatggatatagaaaggctttggaaaaacatggaattattcaaagcatgtccagaaagggaaactgcttggataatgccttggccgaaagcttctttgggatcttaaagacagaattactgtacaaacagagctttgaaactgcggaagaatttataacttcgttaaaagaatacattcattactataacaatgaaagaataaaaaacaggttaaatggaaagagcccggtggaataccgagctctcgtacaaaaaacttaattttgtaaactgtccaactttttggggtcacaccaattgtttgagcggcctcttattttacaaaactgctcaacctatatcattttaacctaacggttttcacgtattggggaaacgttgttttggcacctggaaatagcttgcatttccttgcataggaactggatctttaaatatcaaatattatgtttcgtttttttttaaagttaataatcacgcttggtttcagtgttacttcgctcacagctttttgccagaaaaacactgcgaccttaccaggtaatgggaatccccttatacctggatactttgcagatcctacagtaagaaaattcggtgatacattttacatctacgcaacaacagatggcaatggcggcgggcatggtccttcacaggtgtggatatccaaagactttgttaactggaaaatgaaggacatgaattggcctacatccaattattattgggcccccgatgttatcaacggaaacgaccataaatactatatgtactattgccagccggttgatatttatggtgcatctgcaacatcaccaaccggcccatggacacctttgcttcccgatggaaaatcaatgatccccaactactttatccccggtgttattacactggacgggcaaacgtttaaggacgacgatggaaagatttatatgttttggggtacctggggcacctatcctgatcacggttgtggtgttgggctcctgaacccggatatgcacactttttcaaaaaaagctaaaattccaaataccattgccaaagatttttttgaagcgcccttcatgtttaaaagaaagggcatttactacctaacctattcgtctgggttttgcgagaatgaaacctaccgtgttcaatatgccataagcaaaac

SEQ ID NO: 1185 - DNA, 24422 bp, synthetic construct
  misc_feature 1..24422: note = Synthetic
  source 1..24422: mol_type = other DNA
aggctgcgcttctttgttaggaaaaatactaagatagaccttagctacagagaggtctgtagtaacattaactttactcacagaaataataacaccgcgcaaaccaccgtctgtcgctgctttttgtaatacttctgctaaatcttgttgaaggatgcctcctatttttttctgtctttgtgtaaattcttccataatgtcccagtctaactaatcaactgcaaaagtagcggatatttaaggattatcttatttttgaaagtaaattattaatgagatttccgtttaagcggttactgaaacaagaaatcttttttaataataaggaataataaataaaaagatacccgttttcacgggcactaaggatgaaaaaaatagagcatatcggcattgctgtaaaagacattgaaaattccaatcaagtatttaaagccttattcggtaaagaccattataaaattgaagacgtagaaagcgaaggcgtaaaaacatctttttttaaatgtggaccaaataaaatcgaattacttcaggctactaatgacgccagtcctatcgctaaatttattgctaaaaaaggggagggcatgcatcacattgcttttgcggttgatgatattgagtctgaaattcagcgcttaaccaacgaaggctttacaatgattcacaaacaacctaagcaaggggccgacaataaattaattgcttttttgcatccaaaatcaaccaatggtgttttaattgagctctgtcaagatataaaggattaaaacggtttatttttcttgtagagttttaaaatatgtagtaatattgcactcgctttagaaataaagagattgacaaatgtcaatggtcctatagctcagttggttagagcacctgactcataatcaggtggtccatggttcgagtccatgtgggaccactgcaataaagacaagcctttcgagaaatcgagaggttttctttttttgcaccagtacaacatctgtacaacaattggtgtttcttttgttttcatttattcttatctttagaatgtggaacgattaggtgaaatattcgcgaattggttatatcaaagtagaaaggaatttaaacttctctgggtaagatatggcttgttaaccactgacaaactttctattgtcgttttaatattattttgcataataccattaacgctttattttttaatttctactgtagcttattccttgatacaaattattgcaagctacattttcgttacattattatttagtttgtcattgttgatggtgattacttggtttaaatctgagagattgttcaaaaacaatatacaaggtttttcttttttaaagttgtctcaatcaagaatcgataccgttttttttggttttgataataatgatgttgagaatcttttgaggttaatcaatgggctccccgcagtgcaaaaaattgtaataagagaaacgcctaagaacaaacaatctggaaacattcggtttttatttacttttttggatttgatagtgcgtggagggatctttagaatggaaaccaaacccaaagagtcattaaatatccttatgtcgaaacgctttacgtttcaagactcagaaataaatcaaaatacgcttccttcgagttactccaaatggtgttctgcgaccgaagaagggagttatgatgatatgcgaagggacatttcaaatgcgttgggtatctcttaatatttataatctttcaatttatagggaaaacttagggcaatcctaaagcaatcgtcatttctctattgtttttactgtatttaacgtcatatgtttgttctgtacaattgaagtgaaaggccttttactcattattaattcttaaaacataaagattatgaatgagcaagaaaatgttgtggagttattgcaggatattaaaggtctgctttcacacagcaaaaaagtattgaatatcaatgaccttgtcaaatacacaggtctgtccaagagtaaaatatacaaactctcgcagttaaaactcataccaacaggcaaaaacaaacacatccgtcaattattcttcagtaaagcagagattgatgaatggcttttaggagaacccaatctttctgatgaattcctggaattgcagtttaataaacagatgctgcgaaatagaaaatcaggattatgaatgacgcaacatacatccgagtgggaacgtcctattataaatcagtacaagtgccaactattgctggacattttaatgaaatcattgtaccatggacattggaaacaattcgacaagatcatggaagaagttttattggtaccataaaaaaatatgatgggttcacttgtcttccaagtcatattgactttcaaagggagtgtcatggtttctacaatacgtatgctcccttgcctcataaacctgaagaaggtgaatttccttatactttaaaactattggatcatatttttggtcagcaattggatatagggatggattatttacaattgttattcgaaaaacccatccagatactacccatcttatgtttggtgtccaaggagcgttctaccggtaagacgacctttctaaaatggctaaaaatgatttttgacaataatttgacttatctgaccaatgatagctttagtagccaattcaatgcagattgggccaataagcttttgatttgtatagacgaggtgctttttaataaagaagaattgacagagcggattaagtacttgagcacaaccaattttaataaaattgaagctaaaggaaaagacaaaagagaagtagaattctttgggaaatttattctttgtagtaacaacgaggataactttattaagatagataacaatgaaacccgtttttgggtattgagaataccttccttaaaaaaagaggaaacacggtttcttgaatacttggaatccgaaattgctgcatttctttaccatttacaacatcgaaaattgattagtgtaaataaaactagaatgtggttctctccttcacaaattaagaccaaagctttggaaaacttaatgcagaacaaccgaaaccgtgtagagaaagagcttgctagtattcttcttagtgccatggagactttggagacagaggaaatatgtttatgtccactagatgcccttcagctattgagccgcacacgtatcaaaacggatcttacccaattgagacatattcttaaaagggactggaagttagtgaatcaagataactcgatgtcttatagtaaattaatgatttggcaggacggaggattggggtggatggatgccaaggggcgatactattctatacataaggattttctaacggaatatttttgtgaagcttagaaaacgatgaaatgatgataaaatgatgatgtggaaatctattatttacaggtaatacaagagtttatgatcagttctcgtaaaaaaaggcagatgaaaagaaaaacacattaccatattagactttttttgatgaaacgatgacagatagtgctaaagctagtaaaagcaagggataaggttgtcatcaaactgtcatcattttgtcatcaaaaaaataatgatgaccgattactgtaaaaatacacgaatagtgaaatgtgattaaaacgataatacctagacctaataagaataggtcttgagggttttgttatcatataaaatattttaaaacatattggcttatgaaaagaaaaataaactgtgaaagagcccgagctttttccatcgaaaaagcgctggcaaaactcgggcactttccaaaaaagacaacggaaaaagaagcttggtttctaagtcctttcaggtcagaaacccaagcctcttttaaagtttctaaaacaaggaaccgatggtatgactacggcgagggtgtaggcggaaacgtaatagacctggtgtgcagaattttaaaatgttcaattaaagaagctttggaattcttgaatgaaaacatagcgactgaatcactcatattaagcgaaatttcaaatgaaaaagagtcatgtattgttgtcacaagcgtaaagaagatgacgcatcctgcattgatccaatatttaaacagtagaggtattccattaggaattgccaaactctattgtaaagaagtttggtacacatttaataactccaagttttttgccattgggttaaggaacaataaggatggttgggaattgcgtaacaagatttttaaaaatagttgcagcccaaaattctatacatatcttcaaagaaataaatgtcaattaatcatgttggaagggatgttcgatttattatccttggcggttttaaatgaaacactattaaaagattctgatgtgttgattttaaattccatttcatttataaaacatatagagacgagaattttgaattatcaagcggttcatctctacttagattgtgattcagctggacaaaatgcggctcaatatttaacgacaaaatacagtcatgttatggacaaaagtgacttctataaaaaccataaagacttaaacgaatttttgtgccatgagaaaagaagaaatcattagttcagttgatgaacagaagcaggatctaaagattcctactgaattactaaaacattctgatactttggatttggatttaaaaatggatgcaaccggtagggaaattgttctgggtaggaattcaagatgtgtgtctgtggacacattcttgtttgctcccgatggtcgcaaagaaaaaaaaggagtgtttacggcgaaaaaagccctcgttaaatttagatgttctgtatatgagaagaagcttttaagtattaaagcagcagcatcaggattgagtctgagtgagtatattcgacgtgctgtatttgaaaaggaaatcaaagaacgttttaaggaagagcatattgaaatctataaaaggctcattaagtaccataacaatttcaaggccattggaaatatgtacagaaaacgaaatcccaagttgacagaagcggtctatgaattggcgaatgaaataaaggctcatcttaaaaaaattcagcaatgataggaaagggtaaaagtatatcacataccaaagcatcgatgtcttatggttggaatcaagaaaaggatgcagaaattgtattgaaagagtttcttcatggagattcaccagctgaaatcactcaagaatttaaaatgctccaggaccaaaattaccattgctcaaaaaacacgttatcatttgttataagcccgaccatagacgatggcaaaaaattggataaagcgaaattacataacatcacaaaacagtttatcaacgaaatgaagcttggagaacgacaggctatagcttttgttcatcaagataaagatcacaagcacattcatttgtatgtcaatcgtattgattttaaaggtgtagcttataatgatagttttataggaaagcgaagtcaattagcggcagaaaaagtagctgaatatatgggcttaactacggtaaagcaagtgcaatttgaaaaggaattcaatctaaaagaaatacgaactgaaatcaaacgcagacatgatctaagcatgagacagtttaaaccgaaatcgtttgatgactacataaaggcaatggagaccaataaggttaaagtcattccaacgataaacaatcaaaacaagttacaagggtttcggtttgaatttcaagggcataatctaaagggcagtgaagtgcaccgaaacatgtctataggtaatatagggaaacaaatagcaggcattgaaggatcacaaatcttaaagggtacaacggcaggtgttcaaatagcaggtaaaatggttgatctcacgccaaacatcgctttaaaattgtccaaattcatattgaaaaaagtaattaagaaggcgatacaaataggcacttcatattaaattaaaaagatagaatcatgaaaaaactagaagaacaaatgacgctaatggttaatgagattaacgattttagaaatggtgtagagcagttagaaaaaataaaggatcaattgaaagcaaccaaaatcaaaatggatttaacagactataaaactactattgaaatccataagcagcaaatgacatcttgcttaaaatctataaaaagctttgaaaaccgttttgagaatacgattatgcaggctaaaatttatccgaactgggctgtggtgatgttcgttgttagtgttataggcaatttagtactagttttatatctgtttatgtagtaattcacattaatataggttatcttattgagtctttatgcttcaataaaatattcacattatctaaaaactcaccttcatcaaagggcagtaatttattggctaattgtaaggtcttacgaatatccaatccatcatcttcagttccattggagttattgacatgactggccattatacagacattgattaacgattcaatggtaataaataaatcgagatagccgtcgaactgtaaaaaagaggctttaaacttacccgtttgtacattagaaggttctaatgttattaatttatatttagctgatcttatcagcttttcaaggtcttttctttttggtttcatatcgtcgtatttaaggtttcggttttttgagttcctgtgcagaaaggatttcagtgatcttatccaaacagaacatttggtcgtgaggcaagagatcaataaccatctctagcaccttggttacgctagttgttggcgtcctattgctatgttcaggagatacgaaaaccccattgccatctagtgcataatagcacaattctaaaagtgcagaaatactgctggttatgtcctcatggtcagagacctcaaaacttatggtctttcttgttctattgccatgtggatctaaacttactccagggaaatttttaatgtgcttctttattgcctttaatttctttttttctttcataagctgttccttttcgggtttaaaactatatccttaatgccatccaaaacttccatttcattatggggtatcatgtctaatacatatcctaaaacttctttgatattatgctctggattgggaatggatcgtgtagagcagtggtctgtatccatagctgtgatacatacctttagtagatttgaaatcatgaaggatgtgtccaaataaccttcagttaggacatcgatagtatatagcccttttttatgaggatagggttttagggttgaaaagtcatttatagaaagtgaattaataaacttagacaattctgtatcatttggctgagaagattcttttttcggaatactaacatcgtttggatttaattcgtgctttatacaattgtccaacttatttttaaataacaacgtggctattaattcaattttagtagctttctctattattctatgaatttgttcattgttaatatggtaattgttttcataacgtgtagtgatataggcatcatccaataattttaaaaggtgtttctcttcttctatttccgtaatgaaaagattaccaagttcagctgaaaatgtttttagatatgtttgaagctctttgagactatgactttttcgttctttacccattaaaataagagcagtatagcgaaaccacaattctatatattggtggagcataaaagccgcttgatgaagattacttttttcgacaaaaaacttagcaccatccataaatgcagccattttataatgttctttttcgaaaattgtctgtatctgatttagcgttttttcggttgcataatactcatgaaaattatctaattctgaatttggattatagaagatttgtttttcccatgagcaaccatgaacaaaaaataagttttcttcttttaattggtgatgggcatattcaaaagaaaagattcggtataagaattctgtttcctcttgaaatattttagcaaccatcgctgataattctttggttaaggaagaacaatttccttgcagtattataattaataacgatttgagatattttcctccttcgacttttgatttatatacatacctaatttctaaaagagattttagtttgtctatgatgtgtttttgtttagtttgaattttagcatacataattctctctctttttttagttatctaagacgatatctcatcactttacagtataaaatagtatctattaattatacgttagtattgaaaatcattactaatgtatttaaaataaatccaaattcaaaacaaaagtgtaattattttatacaagagtatatactttctatatttaaatattcaaaagatgtgttatgactaatctaggattatatttaattaaaaaatctataaataaggctgaagtggctagaagaacaggtataagcaaatctcgattgagtcaattaagtggaaatgaatcaactaaattgcgagcagatgaactttacttaattgctttagctattgatgaagacccatgtgaattattaaatgaggtatgtaaagaccttaaacttccgaaagaatgttgattaatagatcacggtgagctaaactttttaatgtcttcttcataggattggctaatgatttaaatgaaccgctttatttttcgtgattgatttagaagtatcacaaattaaatccactcataacgcgagtaatctttacccttaagttaaaaacgagagtaatttttcgctataattacctttgttaataaaacaaacgtaatcattacccttgtatagaatgacaaaatttaagaaccttcctctattacctccaccggcaagcttagaaacgactaaggtattgcgtaaaacgatagaggttagtaggcattagcacaactaaatggaatgctaactaatttgccaaaccctacattgtttttagacaccattcatttgcaagaagccaaggcgagctccgaaatagagaacattattacaactaatgatgatttatataagtctttggtagcagacaaaaaagtttgataatcctgccacaaaagaagtcattagctataaataagccgtacgatatgttctaaaaaacggtatcaaaaaacgtggtggtgacgaactaggtaagactataattttagttaaacatagaaagcacgctcagtttctaaaagacacctttatggacctggaaaaagaacagtttcgtttagtgcaattcattatatcattaatcggattaagtctggcgaaagtagatgatgcttttgcaaaattcatcaatgattataagctaaatgcagtacaaatagaatttttagacacaattaaaaaaatcttaacctcgaaatggtaagatagagccaagtcagttatacgatgcaccatttaagaattatcatagtatgggtatagagccaaaaaacagtacataagcaaaatatcatatgtcgttatctacaactaaccaaccaattgttcaagaaagtactcataaagaacgtcattatacttttacaaaagagttgtttgtaaatttagattgatatgtttcttaattgccgtaatgccatgctagttgttactttatggtaaaccaaatagtcaactttataggaacaactataaagttgtaaattttgataactagtttctttagtgtttttatttaagaggttgatatgcttgtgtttatgtgggggtaagcagccagcaacaggatttttatttttatagagatggctgtggtaaataaatgtaaacaaagacacttttaaaagcttgtaacaaaaaagagagagggtggtattatttgagtctccatttagaataaaaaaatgccccgtataaaagacgaggcgacttaaatgttttcacaacggaataatccttattgtgaattgctttcagatactgtaaatatagtgttaaattttaaactttgcaatgaggaaaaccgtaaggttttgtaaaaagattattgtaattttcttatctaaaagatttatatatgaaacgaattttaggtttagatttgggaaccaattctattggttggtcattaataaaaaatgatttcaaaaataagacaggtgaaattgagggtgttggggtaaggataattccaatgagtcaggatgttttaggtaaatttgatgcaggtcaatcaatctcacaaacagcagaaagaacaaattatcgtggtgttagaagattatatcaaagggataatttacgaagagaaaggcttcatcgtgtattaaatgtcttaggttttttaccaaaacattattctgaaagcattgattttaatattcggttaggacaatttaaatatcaaactgaagaaaaaataaattatagaaaaaatgagttagataaatatgagtttatattttttaattcatttcaggaaatggttaaagagtttcaagaaaagcaacctcatcttttttatcttaaaaaaaatggagaaatcactaaaattccatatgattggacactttattatcttcgtaaaaaagcattaaatcatagaataactaaggaggaactggcttggttgatactcaattttaatcaaaaaagagggtattatcaattaagaggtgaggaaattgatgatgataagaataagcaatttgttcagttaaaagtaaaagaggttattaattcgggagagtcggttaaaggaaaacctttgtataatgtggtttttgaaaatggatggccatatgataaacaaattactaaaactgaagattggatagatagaacaaaggagtttattgtatccatttcaactttaaaaaatggcaatactaaatattcatataaaatagtaaattcagaacaagattgggcggctataaaagcgaaaacagaacaggatgttgaaaggtcagggaaaacagttggtgaatatatttatgagagtttacttttaaatccaaaacaaaaaatcagagggaaattagtaaaaacaatagagagaaaattttataaagaagagtttaaaaaaattctttcaaagcaaataagtttacagccagaattatttaataaggagttatataaagcttgtattttggaattgtatccaagaaatgaagctcatcaaaacaatataaaagataaaggatttgaatatttgtttgcagatgatattattttttaccaaagacctcttaaaagtaaaaaatcaaatatttcaggatgtcagtttgaagtaagaaaattcaagaaaaagaatcatgaaacaggtgttttagaagaagttgttgaacctgtaaaagcaatttcaaaatcacacccattgtttcaagagtttcgattatggcaatggcttcaaaatctaagaatttataaaaaagaaattaaagaaaaagatattacaaattctcttttgaaaacagatgtagactggacagatttatatgattttcttactaaaaaacaagcagtagaacaaaaacaaattattgactatttcattaaaaagaagttaataagtaaagatgaaaaagaaaattaccgatggaattatgttgaagataaaaaatatccttgctgtgaaacaaaatcacaattcatttcaagattaagtaaaacagaggggattactagtgctcatgaatttttaactaaagataatgtagaagagcaattatggcatattatttattctgtaacggatattaaagagtatgaaaaagctcttaaaaagtttgctaataaacaacatatagatgaaacttcttttatagaacattttatcaaattcccaccttttaaaagtgattatggtagtttttctaaaaaagcaattgaaaaattattaccattaatgcgaatgggtaaatattggaatctagataaaatttcaaatcctataaaagatagaagtattgctatcatggagcgtgttagtcaattagagcttagtgaaaattatacatctaaagaattagcagaagcattaatagatgttagtgacgatgatatacctaaacaacttataaaaagttttatttcttttaaagaaagaaatcccttagtgggattaaatacctaccaggcttgttatttagtttacggtagacattctgaaataggaaatatacaacaatggaaatctcctctcgatattgaaaaatatttactctcgtttaagcaacactctttacgtaatcctatcgtagaacaggtggtgacagaaacgcttagagttgtacatgacatttggaaatataaaggaaatggatctgaagatttttttgatgaaattcacgtagaacttggtcgagaaatgaaaaatcctgccgataaacgtaaacagatttcgcaaaaagtatctgagaacgaaaacacaaattatcgtattaaggaagtcctaaaagatttgatgacagatcccttagttgatggaggtgtgagatccttttctcctagtcatcaagatttattaaagatttatgaagaaggtgtttatcaaaatcctaatgcaagatacgatgctgtaagtgaggacgaaattcagaaaattagacgtaataataatccgtctaaaaatgaaattacacgatataagctttggttagaacaaggctatatttctccttatacaggtaagccaattcagctttcaaaactttttactaccaattatcaaatagaacatgttataccacagtctcggtattttgataattctttaagtaataaaattatttgtgaaagtgaagtaaatgaagataaagacaataaaacggcttacgaatatttaaaagaaaaaggcggaagtattataaacggacataaacttctaaaaatagatgaatatgaagcacatattagtcgttattttaaaaataacagaacaaaactaagaaacttgttaagtgaagatattcctgaaggctttataaatagacaactaaatgatagtagatatataagtaaattaattaaaggtttattaagtaatatagtacgagaagacaatgaaaaagaagcaacttctaaacatatagtacctgtaacaggtagtgttacaggtaaattaaaaaacgattggggattaaatgataaatggaatgaaataatagcaccacgttttaaacgattaaatacattaacaaactcagaagattttggtttttgggataagaaaataaatgctttccgtattcaagttcccgatgaaataagtaaaggatttaataagaaaagaatagaccatcgccatcatgcgctagatgctttggttatagcatgtgtatctaaagaacatattaattatttaagtgcattaaatgcagaaaagaaaaactatggattaagggataagcttttaataaaaaatgataaaggacattatactaaaatttttacaatgccttggagtaattttcctgttgaagtaaaaaatacaattgagaaaacagttgttagttttaaacaaaacacaagggtaattaataaaaccaataataagttctggtcttataaagatgaaaatggaaatataaatataggaaaagacggaaagcctaaaaaaatacttagaaaacaaataaaaggggataactgggccataagaaaatcgttacataaagaaactgtttctggtgtttacgaaataaaaatacctaaaggaaaagttgcaacttctgttagaggtgcgctaaccgatataaaaaacgaaaaacacttagcaaaaataacagatagtcaaattcgagatgttattttgccaaatcatttaaataattatttagatgaaaaaggaaaacctcaatttaccttagcttttagcgatgaaggtgtagaagatttaaataaaaatataacccaactaaataatggcaaaaaacatcaaccaattaataaagttaagttttttgagattggtagtaaatttcaaataggagagagtggtaataaatcttctaaatatgttgaagcagcaaaggggactaatttgttttttgctgtgtattgggatgagaaaaagaagaaacgaaattttgaaacgataccactaaatgaagtggtagcacatcaaaaacaagtggcgcatttgccaaaagaagatagaacacctatacaaactaccccagaaaagggaaagtttttatttacactttctccaaacgacttggtttatgtaccaaccgaagaagaaagagaaaatcctcatttagttgattttgaaaatttaagtaaggagcaggtcaatagaatatataaaatggtgagtgcttctaattcacaatgcttttttcttttatcaaatgtatcaactaccattaaaaataaatttgaatattctgctttaaacaagatggaaaaagatattgatggaattatgataaaagatatttgtttgaaacttaaagtagaccgtttagcgcatatttcaaaaacttaaattatgataaaacggacactattttttggtaacccagcttatttaagtactaaaaacgaacaattagtggttaattttcctgaagacaataaaaaagaagccgttgtttcaattgaagatttgggctatgtagtattagaaaatcctcaaataacaattactacagggttgctaatgaaattggtacaaagtaaaaccgctgtaattacttgtgataaacaacatttgccttgtggatttttacaacctatggtgggacacacagaacagacagaacgcatccgttatcaattaaaagctagtgtgcctttaaaaaaacaattgtggcaacaaaccgtattcgcaaaagttgataatcaggccaatcatttattaaaacaaggtaaaaaagcgttaaaattaaagcgttgggtgaaggaaataaaaagtggtgatccaggaaatatagaagccatttctgcggcctactattttcaaactttgtttaatgagttagatgggtttagtagaaaccagaaaggagttgcgcccaataatttattaaattacggttacgctatattaagagcggttacagcccgtgctttagtaagtagtgggctcttgcctgcggtagggatttttcatagtaataagtacaatgcgttttgtttggcagacgatgttatggaaccttaccgtccctatgtagatgccttggtttatgatatggtggaaacaggttgtaatatagaagacttaaataaaaatataaaaacagaattattaaaaattccggcattagatgttgttattgaaggaaaaaagagtccgttaatggttgctatgagtcgtacaacacatagtttacaagaatgtttttctggagttagcagacgaatattatatccagagttctgctaatgtgttaaatattgtaagaactttgtagaataaatgtaagaggtaaaatgacatgcaagatcgttattctagactaaatcaatataggagtatgtgggtgttagtgttttttgatttaccaacagaaacgttttctgaacggaaagcggctagccagtttcgtaaacaattgctaaacgatggttttgctatgtttcagtttagtatttacatgcgtttttgtgctagtagagaaaatgcagcagtacatattaaacggactaaagttaatttacctaaaaaaggaaaagtgtgtattatggaaattacagatcggcaatttggtatgatggagttatttcatgggcaaaaagaagttgatcccgaaacaccaagtcagcaattagaattgttttaggattaaaaaaaagatttccagtttgagttgagtagaaaaatcaggtcatttttttataagctagaaagtgttttaaaaaacaggataccagctgtttatggcgggtatcctgtaaatgctatactaaaatagtaatctgaaagcaattcacaacaagctcaatcaaatcctctattatcgttagcctgtaaatgctatactaaaatagtaatctgaaagcaattcacaacagctaaaccactgctatctttagatgaaacctgtaaatgctatactaaaatagtaatctgaaagcaattcacaacaatctaaatcctaattcgttgattcaaggacctgtaaatgctatactaaaatagtaatctgaaagcaattcacaacatagtggtatatccttaataaatagccctacctgtaaatgctatactaaaatagtaatctgaaagcaattcacaacaaggttctcaaaatacatcagaaattataacctgtaaatgctatactaaaatagtaatctgaaagcaattcacaactttgtgttcatgtttaaaatttattaatgcctgtaaatgctatactaaaatagtaatctgaaagcaattcacaacaccgttttatgatcgttgtttttataactacctgtaaatgctatactaaaatagtaatctgaaagcaattcacaaccaaccgaacctactaatttcgctacaggttcctgtaaatgctatactaaaatagtaatctgaaagcaattcacaacagtgattgctctggggattcaatagtttttcctgtaaatgctatactaaaatagtaatctgaaagcaattcacaacgcaatggattaactaatttagaatattgtacctgtaaatgctatactaaaatagtaatctgaaagcaattcacaacaaatcaattattgatttttttaaaagcatcctgtaaatgctatactaaaatagtaatctgaaagcaattcacaactaatattgcgccaggtgttaaagaaaaccacctgtaaatgctatactaaaatagtaatctgaaagcaattcacaacagcccgatatagataagatacttaataaatcctgtaaatgctatactaaaatagtaatctgaaagcaattcacaacaaacagacgcagaccaattaaagcgaatacctgtaaatgctatactaaaatagtaatctgaaagcaattcacaacgccttttcaactgctaactcagcttttaaccctgtaaatgctatactaaaatagtaatctgaaagcaattcacaacaagaccttctaggtgtgtttgctccttattcctgtaaatgctatactaaaatagtaatctgaaagcaattcacaactatgattgacaactaatttcatcccgcaacctgtaaatgctatactaaaatagtaatctgaaagcaattcacaacggcgtggcaatggattaaaaccattaacgcctgtaaatgctatactaaaatagtaatctgaaagcaattcacaacagacttaatcaatcaagcaaaagaattaatcctgtaaatgctatactaaaatagtaatctgaaagcaattcacaacaaaataacgagtcgtttataacaaaggcaacctgtaaatgctatactaaaatagtaatctgaaagcaattcacaacgataacttcttttgttcttcttgtttggtcctgtaaatgctatactaaaatagtaatctgaaagcaattcacaacccgcctgctgttataggctgaccgttattacctgtaaatgctatactaaaatagtaatctgaaagcaattcacaacggcactgtagtttcggttacagaaataagtcctgtaaatgctatactaaaatagtaatctgaaagcaattcacaaccatgtcgccttcgggttcttttccgccagacctgtaaatgctatactaaaatagtaatctgaaagcaattcacaacacaaggtagctaatatacagtaacatgactcctgtaaatgctatactaaaatagtaatctgaaagcaattcacaacgccaatagttacaagtatttcattttattcctgtaaatgctatactaaaatagtaatctgaaagcaattcacaacaaagcttgtgtattagaaaagtaagctaaacctgtaaatgctatactaaaatagtaatctgaaagcaattcacaacagctactgtaaagcaatctaagttagatttcctgtaaatgctatactaaaatagtaatctgaaagcaattcacaacccaacgtgctatatcttgtacggttgttttcctgtaaatgctatactaaaatagtaatctgaaagcaattcacaacaacggcggactaattgaaacatcgagagcacctgtaaatgctatactaaaatagtaatctgaaagcaattcacaaccatgtcgccttcgggttcttttccgccagacctgtaaatgctatactaaaatagtaatctgaaagcaattcacaacacaaggtagctaatatacagtaacatgactcctgtaaatgctatactaaaatagtaatctgaaagcaattcacaacgccaatagttacaagtatttcattttattcctgtaaatgctatactaaaatagtaatctgaaagcaattcacaacaaagcttgtgtattagaaaagtaagctaaacctgtaaatgctatactaaaatagtaatctgaaagcaattcacaacggctaccgctagaccactgacaataacatacctgtaaatgctatactaaaatagtaatctgaaagcaattcacaacacagtatcatttgtaaagtctaatcctaaacctgtaaatgctatactaaaatagtaatctgaaagcaattcacaacgggatacaacattgattaaaaaagaatatgcctgtaaatgctatactaaaatagtaatctgaaagcaattcacaacacatcttttagagtatgttaacgacttaaacctgtaaatgctatactaaaatagtaatctgaaagcaattcacaacttggtgtctggtgcgtatagtttcataatacctgtaaatgctatactaaaatagtaatctgaaagcaattcacaacaatatgactgaatgtactataaaggaatatcctgtaaatgctatactaaaatagtaatctgaaagcaattcacaacacacgctgttacttttacacctgagtaaagcctgtaaatgctatactaaaatagtaatctgaaagcaattcacaacaataagtttgctctcataattaaaatggacctgtaaatgctatactaaaatagtaatctgaaagcaattcacaacacgctactattcttatattttaacgttagccctgtaaatgctatactaaaatagtaatctgaaagcaattcacaactgtttttctaactgctgaaacattaggtatcctgtaaatgctatactaaaatagtaatctgaaagcaattcacaacagagtattcagaatcaaaagcttgtccgttcctgtaaatgctatactaaaatagtaatctgaaagcaattcacaactatacgtccaaaagtattagtagggtttatcctgtaaatgctatactaaaatagtaatctgaaagcaattcacaacaatacttctggtactaatgcagttactggtcctgtaaatgctatactaaaatagtaatctgaaagcaattcacgacaactaaaagccttaaaggtttttctttgtatctattttgtaccttatgttttataaagccatattaaaaaaagaatggccctggcctaaattaaacagttgaatatatcataacctttataagactgggttaattgatttctatgtaaaaatgaagtcattaataaatgtttaatatcacaccttcttttgtcatttcattcaaatttacacttcaaccctttgttaaatacttataagacacatgagagataatagtttatatttaataaatagactaaactattagtttctttatttgggtaattataaactagtttatatctttggtttatatttgtaaataatactacactatgagtttagaaaaagaacaaaaaataaactctcttttgcgtggttggccacaaaacgctgtgtatcttacatcgtggttagtggaaaacgggtattcacatcagttattgagccgatataaaaagagtaattggattacttctctaaataatggagcatttgtgagaagtggagatgcagcaaccatagaaggtgctgtttttgcattacaatcgcaaagtcatgttagtattcatccgggcgggaaatccgctttaaatctattaggaaaggctcattatctggaattttcaagacaacagtatattctttttggaaatgaaaacgagcgaattccttcttggttgacaaattataattgggaaatgaagttaaactattaccctacatcattcttgcctgctgattttggttttacagaggttgaaataaatggattttctataaaagtatcaggtgcagcacgagcaataatggagtgtttgtatttagctcctaaaaagcaagatttaaaggaatgttatgaacttatggaaggtttgaataatttacgtcctaatcaagtgcagcaattgctagaagcctgtaaatcagtaaaagtaaaacgattgtttttatatctggctaataagtgtcgacatccgtggttagaatttgtaaacgttgagaacattgacttgggaaaggggaaacgacaaattgtcgccgatggcgtatatgattcaaaatataaaattacaattccaaaaaatttggtggatgaataattataagcatcaagtgcgattacttctaagtgttattcctgaagtagcaaaagaaaagtgctttgctcttcatggaggtacggctatcaatttatttgtaagggatatgtctaggttgtcagttgatattgatttaacatatatacctatagaaaatagaacaacttctttttctaatattaataatgccttaagagaaataaagaaacgcttgaatacaatttttccaaatttattgatcgaacatcaaaaggacaagctaaaattacagataagtaataaagatgctttaattaaaattgaagtaaatcaaggcataagaggtttattgggtgatacgcgtactttggttttatgtaataaagcgcaggaagatttcgatgtcttttgttcaattcaaggggtttcttttggacaattatatggtggaaaaatagttgctgcgttggatagacaacatccaagagatttatttgatgtaaaggatttgttagacaaggaagggtttacagaagaaataaaagaaggttttatctttacattgctgagcagcaaaagacctattaaagaagtattatttccaaatttaatcaatcaagaacaagcttttgaaaaccaatttatgggtatgacagaaaggcttttttcgtatgcggattttgagcaaactagggaaaagctaattggaaatatacaggaagaattaaccgaaagtgataagaaatttattgtgaattttgaaaacacgtctccggattggagcgtttatgattttgaaaagtttccagccatacaatggaaacttcaaaacttacaatcacttaaggaaagtaaccctgaaaagcatactttcaatatgaaggaactgaaaagattacttctcaattagttaatacatcttttttagaaatactttcaaaccaaaatttcaatcccattatttaaaactgaattatcaaatgccttaagataagtttgtgtaatactgatattttgatggtccatagatttgctaatattatcggtagttactcctttttgttttaagtattcaccagcataataatgtaccgaatgttccgaacgaaaattcatttttcaatagctcttgaattaaataaattgtgttttagtattgtcgtattttcaaggttttttttaatacgggtgatattttcaaggttgcttataaaaaaagccctctagaaaatcagagggcagtttgtttgctgctatttattttttagcatcttctatagagacttttctaaattcttttaatagtttttcaagccctaaagttgatttacgtgctcttggcccagctgcttttaccccattttcaattaatgaagttgattcttttttgaatgtttcaatttctgcgttgattttttcaattaattctttcatgattttttttaaaattagggggcaaaagtagtgtgtttgtttttgaaacctaaaaagattagtgttaaaataggattttttagtggctactgaaatctatcaattttcattatgaattgctacagttaagtcctgacaaatattggtcatcttgcaaaattcaattcaccttcaaaccaaaatttcgatcgcattatctaaaactgaattgtcaaattctttaagataagtttgtgtgatgctgaggttttggtggcccatagattcgctaataatatcggtagctactcctttttgttttaaacagttagcaaaactatgtctggcgacataactggttatcggtttatcaattccacaaatttcggcaatctcttttaattctttgttatagcgctgaagggttttatgttttctgttttccaattgtggaggggtcaagttgttttttaaaagaataggaaacacatatttagtatcaatggcaaactctttatagtaatttaaaatctctctaacagggggtagaattttaattttaaaattccctttagttttagatcttgtataatatattttatcattgttaattgctttccactcaagtttcatcatatccgcaaagttcattcctctagtgtaaaaactaaatatgaaatagtttctggtattgacgtaccggggatatcttgctaagtcgaaatctctaatttgaaggatttcttccattcttaaagcctttttcagatttttccctttgagttttgataccttataaattttaaatgggtagtcttgttctttagctatttttctttcaatagcaaaattatatagcgctcttatagttctcattcgtacacctatgccaccatcgcttcctcctcttgacctcaagaaagcttcatatttatttagaaaggaaggggtgatgtctttaaagttaagcctagtgcttttatgaaataaatttaaagaagcgaacacttctttatttacgcgtgcattgcctgttcttcctgcataattcatttcgccaataatctcatcccaaaaataaaaaacgttttgttgtactggattagacacaagcctaaagcgattttcaaaatcttttagagtgaagtcacttttttccatttctaagtcagaaagaatttttaatgctctatccttgaatttaagaagtaacctgttattttggatattatttgaattctttttagtaaaactacctgttgtttgattccactccatcgggaatgctctaaatattgttttgaaatatttcgattttctatctttcgacactcttaaagagatggggtaactaccatcagcaagtactgtttttctcaatacggtttttacggttgacatagatttagatttaatcagtacaacatctgtacaacaaattgccttttaaaggtaaatcatatgcaaataaaaacaaaactaaaaacattaaatatctgataatgaatatataaggtgctaaatgttactaaatgaaaactaaaataatccgtctcataatcaggtggtccatggttcgagtccatgtgggaccacaaaagccttaacagcaatgttgaggcttttttttatacttttaaaataataatagagtgtcggattaagattaaaagttgtgtttaagcaaagattgtagttaatctaaacaggaaaaattctatatttttgacgcctttaaactgtgttctaaacgcttttattttaacattaaaagcttctgcagcattagtacttctatttataaaataatttaaaattgaccgatagttcaattttattgtattgaaattgctgtattaaatatatcttttagccttttaacaaaatttgattcccttgatattgtttctcagtccaattaattattacatataacttttagaaataacctatagtaaagtttataaaatgttttatatcagttttataagttaaataaacgaggtaaaaacatcgatatttctgggatatatgtgatgagtagtaacacagcaatcattattaataaaaatgggagcaagggttttatgacttgtgataccgaaactctagcaactccacttcctacaaaaagaatggtgccaacaggcggtgtacataaaccaatacaaaggttgaggactaagacaattccaaagtgaaccggatccatacctaaagcaattacaacgggtaaaaaaataggggtaaatatgagtacagcaggcgtcatatccataaaggttcctataattaataggactaaattgataactaaaaagatgacaattttattactaaattgttcgagcagaaaaccactaatcaattccggaataccttcaaacgaaaacagccaagacatcgccatagacgtacagattaaaaacataataacagccgtagtcttagcgcttgttaataatatgg

SEQ ID NO: 1186 - DNA, 24419 bp, synthetic construct
  misc_feature 1..24419: note = Synthetic
  source 1..24419: mol_type = other DNA
atgcttcagatatagatttatttattgacgacactaagctacgagtggaacttgatttattgaaaacaaattatattaacgataaaattgataattctaaaaaattatttctccttagtgagaaaaatttcaacattattaaaaatcactttcttaatctaaaaatagaaactgcaatactagataccaaaactgagctttccacaaatgagcttttccgaatcggtggttggagctctctacgaggcttcaatgagaagagtattcttgcatcttcatatgcctatggcggcatagaatacagatatttagccaacgaacaatctttttttgatggtttcattcaatatggatttatccataataagcgattccctacaaacactcgtttgtatagttttggcttaggatttaatatgctactacctattggattgatgagtttccaaatatccaacggctcacagattggtgaggcattccaatttaaggagacaaaaattcactgggggattgttgctaaattttagaaattaaagtttcagtattctatccattctttcagtgctactctctctatgagtaatgagtatgatggttttatttttgatttcttcattaatattattaatgatattactctctgtttgactatccaaagccgaaagagagtcatcaaaaataagaattgtcggttgttttatcaaggctctagcaatgcaaattctttgtttttgcccacccgaaagcattacaccacgctctcccaccattgtatgatattggtctttgaactcaataatatttttatcgacatcggcaattttagcatattttatgatggtatctatatttggtgtatctattgcaaaaccaatattattttctatcgtatctgaaaataggtaagactcttgaggaacatagccaatatgctgacggtaaaggtacaagttatgttcttttaaatttttaccatcaactaagatttcaccttccgttgggtctatcaatcgacatagaaggagagcaatagttgttttcccacaccctgttttccccattatagcaagactttcgcctgattttatgctaaaactaacattttcaagagcctttatccctgtatttggatagatgtaggacacattccgaaattctatatctccctttatctcataattttcaaaattagtattgataatttcggacttcatatctaagaactcatttactctctgcattgatgcctctgctctttgatttacagatgtaatccatccaacaagtgaaaatggccatatcaaagtattcacatatagaaaaaaattagcaatcgtaccaatggatatctctccatcaatatatttctggccacctatgtaaagaatccctgcattaagaatccctatcacgaacagaatacttgtaaaaaaggaagcttctatccttgccaaattaatcgccttttccttataatctgatatttttttatcataattatccaaaaaataaaattctttcgcaaaaaatttaaccaccctaatccctgatattgtatccgttacaaatgtagaaactgccgattggctggcttgcattatcttagattttttgctaataacaccgctcactttataaattatcaaagataatataggagctgggagtagcgaccaaagtgtcatttcccaatcggtttgtaacattttagcactagttatcacaagtaagacaaagagattaacaatatacatcacccctgggccaagatacatacgaattgctactacatcctcgctaaggcgattcatcaggtcgccaattgtagtttttttatagtcagtaagagacatttcttggtagtgagtatagattttatttttcagttcaaactctattttccttgacgaaacaataatcgtctgcctcatcatataggtgaaaaatcctgtgagtagagacgaacctatgaatatcaaaacatttttaataattttaaaattcaccccaaatttacttgtctttgcgagttcatctacggcctgtcctataaactgtaccttataaattataaaaaaattactcgcaatgatgaaaaggaaacctaagaaaagtaaattcctatgcttccaaaaatacggattaagggtttttaaagctttcattacgcaaagttagatatttttacggacagagattcttttattttgtgtaaattttaatatactgaaaaatattttaaaatagaaactaaaaaatttgagtaaatttgccacaaaatttaattaatgcaaaatttcacaaaaaaaattcggcctttcgcttatatcacggccttatatttgactatttctcttattttaagggttgtctttatgtttcacccaatcactacatcagatttttccatttttgaggtattgaaaatcatcttcattggagctttggccgatagttttacgattattttagcaagttcattgatggcaatttacttattattcatctcaaataacaagtatcataagccctacggatatattattttcggtgtattagtcatcttaatgctctatacgaaatttgtacctaataatatttttgctcaatatggtggctctgttcaggagatagccttagcttttttggggataaagacactctgctttgggataatgcttttcttgccgaaacaaagaagaaatattcgtaatatattgtatttcactactatatttatttactcactatccattattttcaattctgtgagtgaatatttcttctggaacgagtttggcataagatacaatttcattgcggtagattacttaatttatacaaatgaggtaatcggtaacattattgaaagttaccccgtaattcccttattttcaattattttatcagttacatttttggtaagtattttaatattcatcaaaacaaaatctgccattgaggagattcctacaatacgagaaaaagggattttattggctatatatctgtttttatcgggtatctctttggcgatgattcctcaatttgacaaaataaaatcatctaatatcttttcgcaagagatacaggctaatggtctatataagttttattatgcattcacacattcggaactagatttttttcaattttatcctataattgctcaaaaagaagctgaaaagactattttacagcaatttaacagtactaagttagaaagaaaaatcgttggtcgtggcgaggaaatccacaaaaatgtagtacttatatccattgaaagtctctcagctgaatttatgaaattctacggaaatcaagaaaatatcacaccttttttggattctttggctcagaaatctatatttttcactaatttctacgctacaggaaacagaaccgttcgtgggttagaggctctgactctatgtctacctcctactgctggagaaagtatcgtaaaaagggacgataacaagaataaattctcaacaggaagtgtcttcaaggaaaagggataccaagtaaaatatctctacggtggatattcttattttgacaatatgaaagatttcttcggagggaatggttatgatattgtggatagagatagcttttccccagaagagattaccttctcaaatgtgtggggtgtttgcgatgaagatatggcaaaaaaagcaatcaaaacaatgaataatgagtataaaaaaggaaagccattcttcaatcattggatgacggtaagtaaccaccgaccttttacctatcctaataacaaaatagatatcccaagtgatgcaaaatctcgctcaggaggagtgaaatatacagactattcattaaaacaattctttaaaatggcagaaaaagaggagtggttcaagaatactattttcgtaatcgtggctgaccattgtgcctcatcagcagggaaaacagaactccctatggataaatacagaatccctgctatgatatatactcctgatatgcatcctcaaaaaatagataaattggtatctcaaatagacttaatgcctactgttttagggttattaaactttaattatcaatccaaatttttgggagaagatgtattctctccccattatcaagaaagagcctatattgccacttatcaagacttaggatatatcagaaataataccttgacgataatctcacctatgagaaaagtaaaacaataccttttagaaactagtgctgaacaaccatcaaaggagaatcctatcttcttcaatgaaaaacaaaaaaaagatattgataagaaccttgaaaaagaaactatcagtgcctatcaatcggcttcatattggattcagaaaaaaatgctcaaccgataataaaaataaaaagagacttgtttttaagtctctttttattttttacaactctatatgaaaaatacttcgcaccgatatcacaatatattgtattcctattgacaaaacgaaaaagcctatgatttttgacaaagtggccattcctgaatctcccaagtattttgaaatagcattcccactacgaaagataatgtaaatactcacacatattgctactacggccaatattatcaatcctttgtctgcataatcgctataatcattattcttagcaatcaataaagacatagtgcctggccctgccatcaaaggaatagcaaggggtgtcattgctacatttgccttagtattcgttgtctcggaagagtcatttgatgtagaaatcttatctgctagtaggctaaaacctgccaagcaaataagaatacccccagcaatacggagaacatctatttccagacctaaaaactttaagacatactcacctacaaaaaaggcaatgataagtataataaatacattaattgccgaccatagagctactttgtttttctcctctgggctatcatttttcgtaagaccaaggaatacaggaagatttcctatcggatttaataccgaaaataatgttacaaatgttgaaaaaaataaatccatattttttaatattaattttgggcaaaaataatattttatttctaaaattcatttagatttcttacctttgtataaagtaaaaacatataaaacatgataggacaattagttgcacatgcaacagataccgaaagagggattttttataaaaagacctacacacatttagcattagccttattggcctttattgcagtagagagttttttccaaatagctattcctgatgatattgcactatcatttttaggtggaaaattcacttggatgctaatattggggggattttggttatgctctgttttagcagaaaaatgggctttatcatttaataagagtactcaatatatgggcttaggtctatatgtactattggaagctattatcttcttaccgatgattaagattgccttactctatgctcctaatattattggtcaagcgggaattatcactttggcactttttggtgggctcacaggagtagttttcaccacaaaaaaagatttttcatttttgagaagtttgataatcattggtggttttgcatcattggggctaatcgttgcaggagcaatatttggttttgacttaggagtttggttttctatttttatgatattattagcctctggcagtattctttatgagacctctcaactgaaaaatacttatagtacagagcaatatgtcggagcatctctacgattgttcgcctctataatgctattattttggtatattttaagatttttgatgagttcaagagactaagaaaataactaatttaaaaaggagatacttattatatatctcctttttaatttatattgtatccaatatttcactcagagatgaatagcctcctccgtttatcccattttctaaaccttcattttgcagaaattccaatgccttggcacttcgatgccctcctcgacaaaatacaacaacatctcctttaagagacagaatctcatctttcctcatttctacctcaccaagaggaatattgatagcaccttctatactaccatctacatctagctccataggttctcgaacatctatgagggtataatttcctttttttaaaacttcaattaatgacatgcgtatattatttaaattaatgatgtaaatataaaattattctcccaaaaaaacaaaataataattttattacctttgcaaaaattcaatttaaatacagattaaaaaaaaattatacatctattacctatgcactcacaactcagtaaaaagatattctttacacttatccttgtggctttatgcttgtatgtcgttggttttttgtcatcgtacccttatttattagagtttgacaagacatcttcatcaaaattagatactatacgaaatatcatagaatactccgtaatgtttttatcatttctagtattttgtatgattttcttaactaaaaatattttcaccaagatggtagggagtatcttaattctctccattacccttaattttatgatatctgcatcttgtttttttatctataaacaaggatttaatgtaggaatgatgatgagtattttagacactaacacttcagaatcattaagtatgataaaaacattggtatctccattaatagcgtctattatttttttccttatattatcttatatttttatcggcggaaacaactttttaaaaggtaaaaaacaccccaatttatggaaaattttcgccttcatatggttagtattaccttttatattctatataaagcataaatatatcaacaacaaagggggtggttttatgataaaaaatattgtttatcacttcatagatttggatactgctttgaagctaaaagaacagattatagaaatacaaaataataaaatatcctataattttataaatacggaaaatgaacctacagaaaatatcattattcttatgggtgaatctgcaaggaaaaataatctatctctgtatggttacaaacgagaaacaactccttttgcaaatcgtgaaaagaaaaacatgttgctatacaaaaatgcccattcaccagctgcaattaccaatcttgctgtacccattgttttgagtaatatagatatcaataattatagcaataacattactaatctgagcgacaatgtactaaatgttgccaatcaattaggttacgaaacctattggtttagtacgcaagggtatgctaacggcatcacagctattgcatctttttctaagaataaaaaatggcttaatggatttgataatgtcctcatccccgaactaaaaacagccttaaaaaaaccgataaaaaagaaattaatcgtcctacatatcaacggaagccatccttattcttgtgataaataccctaaaaatgaggctttttggaaaggtggaatagatgaatgttatgataattccatacgatatacagacaaaattatgggacaaatattccaagaactaagaaacactccctctgttctaatctatctatccgatcatggacaaataaaaatagatggaaaatatatacatggtgattatagagaagcccaacaagtcccttatttcatttggtactctgacaaaataaattccaataaaaaaggaaaagaaattgtagaaactactgccaccacaacactatatgctaatgtattgaatctaatgggagtaaagaatcctaaaacaatagataactccgaaaaattcctaaaattggatcttcattctattgattataaagatttgaaataatactcaaaaatccctctactcttagtaaatgggattaataacccttaataagaaaaattatttgcttttttagcgagaaaaattatttttacttcaaagtttggcttaatggattacaataaacttaaatacgaagttttacggcaattttggggatataaaaatttccgaaacctacaagaaaacataattgatagcatttcttttaagaatgatacgctatgtctattgcctacgagtggcggaaaatcaatatgctaccagttaccagccctcatcacagaaggtgtttgcatcgtaatatcaccacttttagcacttatgaaagaccaggtagaacgcctacaatctatcggtatagaggctgaattcatttcatcagaattagacgacaccgaaatagataccatctattcacgttgtagaagcggtattaccaaacttttatatgtatcccccgagagactcaccaacacaaaattcatcaatgaagccaacgaaatacctttctctttcattgctgtagatgaggctcattgcatctctgaatggggacaagatttccgcccaagttataaaaacatcaaggattttaaggaaatgtttcaactgccgtgtattgcactgacagcaactgccacacctaccgttgaaaaagaaatcattgaaaaattaggactaaaaaactgcgaaatatttaaaaaaggtttcaaaagagacaatatcaatattaatatactaaaaatatccgataaatttgataaaatttataattacctaaatcttaacaaaacttcagggcttatctacgttaatacccgccaagaggcagtcaatttatctcaatttctccgatccaaagggctaaataatgtagattattaccacgctggactatcaaaaaatgaaaaagaaaagaaacaaaagtggtggcaagagagcaacctaaacacgctaatttccacaaatgcttttggtatggggattgacaaagaaaatgtatcttttgtaatccacttaaacccaccctactccattgaaaattattatcaagaaattgggagagcaggaagaaatgggcaacccagctatgcttttttgctatggaatgaacaagatttgactaaatccaatgatatactgaaatctcaattcccaaaccaaaaggaatataaaaaaattatcaccagtctctactctatgtatcaaattgctgattatgaatatattgataaagaattccaatttgatgtaaaaatgttacaacgcagaacaaattgtacttcgggaaaaataaaatctgtattagaatttcttcatttacaagaaattatatacctacgaaacagaaattctccctcctcaatagagttacttattccttacaatgagatagaaaacctaccgccatctgatgcttatttcttggaactactcctacgaaacataattggattaacaactcaaaaaactcattttcaagaagataaactcgctaataaactaaatattgataaatccctcatcaaggaacgaatcattgaaatgatgaataaaaactatatagaatacatagatggcgatatttctagcatacgatttctacacccaagggatgaaagacgattactcaattcttattggtctgattttaaaaccattcagttcaataaaataaaaaaatgggaagagtttaaatatttcattactaacgaagatttctgtaaaatgaaacttatcctccattatttcggagaaaatacgagtagtaattgtaataattgtaatatctgcaacagcaaaaaaccaagcaaccattactctgaaaaagaagaaattataaaaatcctacgaacaaaaccggctacaaaggtagaaattggtattttgctcccacactgctcttccgaaaaaatagaagaacacttgattgacttattaaatgatggaaaaattacgataaaagatttccgaacttatatgataaaataacaaaaagactatctaatggatagtcttttataataaaaaaatctccctgttgttggtcaaggagaaaaccaaatgttttcacaacggaataatccttattgtgagtaactcaaattctatgggacaaatatataacttatttttcaattaaacaattttttttgatttttttattaccttagcgacatataaacctattaaaaatgaataatacagaaaattacattctaggccttgatttaggtacaaatagtattggatgggctttgattctaatagataaaaaaaagcaaataataagaatcatcgccttgggaagtagaattatccctatggattcagaagtattaagtaatttcgaaaaaggaatttctatctccaaaactgctaaaagaacagagtatagaggaaaaaggcgtttatacgaaagacaccaccttcgcagagaaagattattaagagtactacacacacttgggtttttaccgaagctctttgattctcaaattgactttgaaaaaaaattggggaaattcatcaatcattctgagccaaaattgccttataatgagaaagaatttattttcaaaaatagttttgaagaaatggttgctgactttaaagtaaaacaacctcaattattttatacaaaatccaatggaacgaaaaccataatcccatacgattggactatctactacctacgaaaaaaggcactcactcacaaaattgaaaaagaagaactggcttggattttattaaatttcaataaaaaaagaggatattatcaactaagaggagaagaagaaaacacggataaactggtagaataccatactctattagttaccgatataacagttgataaaactcctaataaagagggcgagttatggtattccattcatctagaaaatggttggatatatcgccgtagtagcaccatatctcttgaaaattggattggtacaaccaaggaatttattgtaactacagaaataactaaaaaaggggaaataaaaagaaccttccgtgccccagaagaaaaagattggactttaataaaaaagaaaactgaagatagtattaataaatatggaaaacctattggaacctatatttatgataatcttttgcaaaatcccaatcaaaaaattatagggaaattaattcgtactattgaaagaaagtattacagagaagagcttacagctattcttaaaaaacaaattgaacttcaacctgaattattcaatgatgagatttttcttgattgtattaaagaattatataaaaacaatactattcatcaaaaatttttaaaatccaaagattttgttcatttatttgtaaatgatatcatcttctatcaaagacctttaaaaagccaaaaatccaacattgcagattgttcattagaattccacacctatatggacaaatccaccggaaaacagcaaaaagtacatcttaaagttatatcaaaatcaaatcctcactatcaagaattcagagttttacaatggctctacaatttgaaaatttatacaaaagatgaagatagagatgttacatcacaatttataacttccacagaagatagagaagagctatatgaactcttaatgtctaaaaaagaagttgataatgatacggttattgcttttcttcttaaaaaagtattaaaaaaagaatatcctaatgcaaaagatactgcaattaataaggaattaaaaaaacgaaaagaaaactatcgttggaactacatatacgattctgaacaaaaagaatctaaaaaatatccaatgaatgagacaggatatgaaataagaaaacgattggataatatacaaaatatacctgaaaatttcttaaccaaagacatagtgtataaactatggcatattttatattctgtaaaggataaatatgaatacgaaaaagcaataaaaaaattcgctaacaaacacaatattaacgaagaggctttcgtagaaaattttaaaaacttcaaaccttttgcaaatgattatggtaatttttcagaaaaagcaataaaaaaactacttcctttgatgcgttttggaaaatattgggatataaataatatatcaacagatacccaaaatagaataacagatattatcaacggggtagataacgaggatgttaaactcattgtaagagaacagatcgaaaaacatcaactgaaaaacgaatatgatttccaaggattacctctttggttggcccagtatgtggtgtataatagacattccgaagcaggagaaatcacaaaatggaaatcaatagaagatttaaacactttcttaaaaaatttcaaacaaaattctctacgaaaccctattgttgaacaagtaattttagaaacactacgagtagtgaaagatatttggtctcaatatggtaagggtaaggaaaatttctttaatgaaatacatatagagttaggtagagaattgaaaaaaaacaataaagagcgaaaagctatttctgatagtatagaaaagaatgagaatacaaatcttcgtattaaatatttattaacagaactgaaaaacgatggaattcaagatatacgaccttattctcctaatcaacaagaaatcctaaaacttttcgaagaaggagctttgttaaatgaagaaaatatagataaagatattatagaaatatctaaaaaagcagagcctactaaaaaagaaattgagagatataaacattggttagaccaaaaatatatatcaccctatactgggcaacctatttcattgagcaaacttttcacccacgaatatgagattgaacatatcttacctaaaaaaagatattacgatgatagttttaacaacaaagtaatttgtgaaagtattatcaataaaaagaaagacaatagccttgctatggaatttataaacaattgtggaggacatacaataattggtgataacggaaaagaatatcgtatactcagtaaagaagaatacacaaaccttattaaaaggatttatgctaaaaataagaaaaaacgagagaatcttttagcaaccgaaattcctgaaaaaatgatttcaagacagctaaatgatacgcgatatataagtaaatttgtatcgcagaccttgtctaatcttgttcgtaaagacgaaaaagacgaaggagtaaattctatcaatataattcatactaacggagtaatcaccaatattttgaaacaagattgggggctaaatgatatatggaaccaacttattctacctcgttttgaaagattgaacaaacttaaaaataccgatggtttcatatcttattctgaaaaacatcagaaaaacatccctacaataccttcttcagaaaaagagagtaaaaacttccaaaagaaaagaatagaccacagacaccacgctatggatgcactaatcattgcttgtactacaaaggagcatattaactatataaataatattaactcggcagaaaaaaatgcttcaaaaaaagaaaaagaaaatgcaagatttgatttaagaagtaaattatgctataaaaaatataattctgacaataaggataattataattggtgtttcaaaaaaccttgggaaacattcactcaagatgcaaaaaacatcttggaaacaactatcataagttttaaacaaaatttaaaaaccataaaaaaatctacaaattactatgaaaaatatgtagaagaaaatggaaaattcattaaaaagaaagtaaaacaagatggagaaaacccaaattggactatcagaaaaccattgcacaaagataccatatatggaaaagttgaattaaacaagaaactttctgaaggagagatatttacagctaacagaaaaagtatagaatctctcaccaaaaaaaatatagaatatatcaaagatatcgatagcaaaaaaattatcacagatttcggtatcaaaaaaatattacgaaactaccttaaccacaaagatatcgaaacatttaccacagaagatgtgagtgaactaaacaaaaatattgctcaattcaataacggcaaagaccacaaacctattcataaagtaagaatctatgaaaatagtaatcataaattcaaattaggagaacgtggtacaaaaaataaaaaattcgtagaaaccgcaaaaggaacaaacctatatttcaatgtatatcaaaatgtcaaaggagagcgaaattatagaacaatacctcttacagaagtgatagaaaatcataaacaaggaaacaaatttattactcctaatatttatgaaaaacaagagacttatagtctactttttacactatcacctggggatttagtatatgtacctgaagaaaatgaaattatagaacatatcaattttagtaatcttaacaaagaacaaaaaaatagaatctacaaagtcgtaagtttctctgaaaaagattgcttcttcataaaacaaaacattgctaaatctattattaataaacaggaattttcttcatcaaataaaatggaaaaagatttaaacggtataatgataaaatccgtttgtattaaactatctgtagatagattaggaaatatctgtaaagcaaattcataattcacataaagtttagcaagaaaaattcttgctaaactttatttattttaaccatataaaaaagcttaacactatgctgtatcgctcaatttatatcggaaatccagcttatctcaaactaaaagatagccaactgaaaataatctgtccagaaacaaaaaacgaaaaaggctccattgccgtagaagacttggggctactaatgctcgaccactaccaaataaccatatcgcatcaacttatacaaaaaatgatggaaaacaatgtcgtaatcatcagttgtaatgcccaacatctaccacaaggcttaatgctacccaccagcggacacacactattctcagaaagaataaaataccaaatagaagccagcgaaccgctgaaaaaacaactctggaaacaaaccatagaagctaaaatccaaaatcaatccaaaatattagaacatctcggaaaattctacgagccaatgtacgagtacctaaaaaatgtaaagtctggtgatacctctaatatggaaggcatcgctgcacaacactattggaaatacctcatcagccacgattttatacgagaccgcaacggaaattaccccaatctattcttcaatttcggatatcaagtactccacagcatagtcgccagagccatcatagatacagggctactccccgtcttgggtatcttccaccgaaataaatacaacccctactgcctagcaagcgatattatggaaccctatcgcccctatgtggatttcctcgtgatagattggataaaaaacaacccaaactgcgaagaactcaccaaagaagccaaatcccacctcctaaatattgcttctactgatattcggattgagaatctcactcggcctttgttggtcgccgtgaaaatgacctgcacctccctctataaatgctatacgggagaaaaaagacaaatatcatatcccgaaattgttttttaattaatatgaaatgatagactacgaacgcctaaatgcttatagaattatgtgggtaatggttttatacgacttgccaaccgatggtagagagtgcctaaaagatgcaaacaccttccgaaaaagattaatagacgatggcttcaccctattccaattttctatgtatatacggcactgcccaagcaaagaaaatgcagaagtacatatcaatagagttaaaaattggctaccaaaatatggtaaagtcgcaataatgtgcatcacagacaagcaatttgagaaaatggaaatattctattctagaaaacaagaatccctcccctccacttggcaacaattggaattattctaatttcccaatcctatttaatacaaaaaccctctgattttcagagggtttaatctttgaggttgtgattcatccacaaagataaagaatttgaaagttactcacaacgaatacactggatgcaattcgggtggatatgttgtgattcatccacaaagataaagaatttgaaagttactcacaacaaccgaaaaacatatagggataatcattttgttgtgattcatccacaaagataaagaatttgaaagttactcacaaccatttgcttcatcatctccaacgctttcaagttgtgattcatccacaaagataaagaatttgaaagttactcacaacctgtagggtctactaaaacaaatactttaaagttgtgattcatccacaaagataaagaatttgaaagttactcacaactaaatttcatcaattccataaaggcaataagttgtgattcatccacaaagataaagaatttgaaagttactcacaacagatttgccgaacatatctcgccgaaaatcgttgtgattcatccacaaagataaagaatttgaaagttactcacaactctgcggtagcactgaatattcaccttaaagttgtgattcatccacaaagataaagaatttgaaagttactcacaacagcttggctatatcttcatttattttttttgttgtgattcatccacaaagataaagaatttgaaagttactcacaacagttcattgacaccatcacttgcagttgccgttgtgattcatccacaaagataaagaatttgaaagttactcacaacactcgtcagaggcaaattttaaagcgtaacgttgtgattcatccacaaagataaagaatttgaaagttactcacaactctgtggcgttacggatatttctcccccattgttgtgaatatcggcatagggcatagacgatgaaaagacgatactactgccccttagctcactacggatagagtttcgtaggttgcctgttcggagcattagggagcctcgcgagttgggagatttggtgtttttccatttttcattaaaaaaggctttacgagtgaaattttccttaattctctgaacatcttacctctatcccatatcgctgagcattattttaagaaaagtagacaatggctttatcaaagaattaatggcaatattgtcaatggaaaacccgcacaatttactgatgaagagatagagaccttgaacttcgcactacaagatataagtaaaaaaataggctcaataagagttgcttaattcttatgttttaattaaacccagccccatgctttgagccgaagcgtgggacttttttttattttttttgaaaaaaagtgagtgaaaaattcacaaggaacaaaaatgttccttatatttgcagtgttcaattaaagttctttgacattatgaaattttcagaattttacagattgttagaacagcatggctagactatcaaaaaggggaagagacatcacaagtatgttcatcctgattttgacaacttcattcctgtaggaaggcatccaagtaaagaagtcccaaaaggaacccttgaaaaaatgctcaaagaagcaggactgaaaaagtaacttgcaaaatgctccactgctaaagtggtggagtattttaattgaacaaaagacaaaagaataaattaaaatgaaaaaaacaacattaatcattgaaaaggctgaagatggtgggtacggagtctatagcaaagaaatccctggtgtgataggctatggggtaacagaaaatgaagccaaagaagatgcaaaggagattttagaggaacaagccgatttttacaaacaaaaacatggagtatttccagagtggtattccgaggatatggaggtagaatatcgttatgctttttcaggttttttcttggcgtttccattttttaatgtgagtaagtttgccgaagaaataggcataaacgcttctttgatgagaaaatataaggaaggtttagcatttgcctccgaaaaacaaaaagccttgatacaaggaaaattcaatgaaataaaacaaaaaatgaacctagtgcagttctaaaaacaaagcactttaattgaacaccaagccccaccgaagtggtgcttttaataaaatataaaatatggaaataaatgttagtaaaaaacaatctgtaaaggaaacattaaatgatattgctcttgatatatcttgggcaaaattatctaaaaaatattttgaccgctctccatcttggatataccataaaatagatggtatagatggaaacggaaatgctggtggattttctcacgaagaaatggagcagttcaaaggggcattatatgacctctcggagcgcatccgtaaaaccgccgaccagctataaagaaaatagttttaataactattgattaaatttaacattcagccccaccctctcggtggggatttttttttattttttttgaaaaaaagtcagtggaaaatttggataatacgcaaaagattattatatttgcaatgtaattaaaacataaagaagaatggaaacaaaagaggaattaatagaagaaaaattaaggtatgaaaaattacttctaactgctatagaaatttatcacagaatacctgctaagctacaaagtgcctatgataaagaaatcaaagaatatattaaagaactaaaaatgctaaaccaaagaatatggcgaatgaaataaactcgccatattcttcataaaaaagaaataaaatggaaaaatttttaaaaataaaggaagaatatcttaatgctcctaatattgaaatatcaaatgaaaaactatcattgctaagacaaatgatagaagatgaacccgaaaaatatgcagaagcttttttggaaatcagtcagcaaaaactcgatgagttaaaagagcttaatgtaaaattagccttacaagaagtcagcgaatttatttcattttcttatatcgcaaaaaactactttaataaaagtaaagagtggttttatcaaagagtaaatggctatattgtcaatggcaaaccagcaaaattcacagaagaagaaattgatattctaaaccttgctatacaagatttaagtaataaattaggctctgtaagagttgcttgattcttatgttttaattacacccagccccacactttgagccgaagcgtggggcttttttttatgttttttccaaaaaaagtaggtggaaaattttgataattacaaaaatgttattatatttgcagtgttaaaaaatcatacttatggacaataaagagagaaaacaagaactaaaaagattggggcgagatttactctactatttagaaaattataatgaactcaccagaacccgcccccaatacaagaaaatagtagataaggaaataaaagaaatcactaataagatgaaagcccttagcagataaggggctttcattcaaaaaaaaatgaaatattatgttagaaaaagtaagagcattaagaaatagataccgcatagcagagactgataaggaacaagaagaaatccaaagagaaaccgaaatcctaatgaatgaagacccagatgcctttgccgaagctatggtagagtgcatgagagaaaccaatagagaattagataaattattgataaaagtccaattaaaagaagtgtctaaaattatctctatatcttatcttgccaaaaattatttcaaaaaaactccacaatggttttaccaaaggctgaatgaaaacttggtcaatagcaaacccgcaaaattcaccgaagaagaaataaaaacgcttaattttgccctgcaagatataagtaaaaaaataggctctgtgagtatttcttagatacttgtatgattttttaacaccccaccccacactttgagccgaagcgtggggatttttcatgtaaaaaaatcaaaaataattgattaaaaacttgcataatcaacaaaaattgattacctttgcagtgtaataaaaaataagagagatggtcacaaaagaaatcacagcggaagaatggtttttgatagaaactatccgcaattacagaaaagcttatccaaacggagcaaagatgcttaaaactgaaattatggaattgctaaacgaattgatggatttggattacaaagaaaatcaagaagacgatcaagaaaacgatcaagaaaacgaagactaacaacagccctcttcggagggattattaaagaaaaaaatatggaattagcaacaaaacaacggcaggaaaaaataacgatgaaacaacagctttgggacattatcgtggaagtctcttggggggaaatatcagagcagtacttcaaaaaatctcgttcgtggctttctaaaaagatgaacggaaagggatttaatggagaggaaggagattttaccccagaagaaaaagaaattttacgcggtgcattagtagatctttccgaaaggataaagaccgccgcatacaaaattcagtgatcatttactgattttttattacacccacaccccactcttcctcacctggaagagtggttttttgtttgcgtaattgatacaacaattttgtatattaaatttttattgtacttttagcaaaaatttgtgtgagatggaggatatcgacgaaataatggaattagctcattatactgatattgacaaaatagaatacattttattttcaaaaatagatgtttgtggtatttttaatatctctatggaagaacttgagtcacttatctatagtatagagagaaaggctaaaagagatgcttttaaaaaaggatttaatagatcttttttcaaagacgatatctcaattttaggaatgtatttactttgttattataacgaaagtagtgttaatgagttgtttaaaaaatataaacacatttttgtagaagaaggaatgatgtatgcaatcaaactcataggaaatattccatctggcaaaacagaaaatcgcaatagacgaaagggggctatgcctggggtagattatgaagaacttataatgatgaaatttgcaaagaatataccatcagaactgaaacaaataaaaacagatgtggaggataccactcattttttttatcataaaaaagtagtaatcacagggacttttgaaaaatttcctttcagagaacaaatggctaaattattacacgaagtaggtgctgatgtaaatactactatttcaaaacgaacagactatgtaataataggagaaaatgctggacataagaaattagaaaaaatagctgaattaggaatagaaactattgacgaaaaaaaatttttagaaatttttaaataagtaatatatggctaaaagaaagaatttccccagaccactatatttaacacctgaaacattatactattacagcaatagatttcttgctaatctaagaataaatttctttgccaatagaaatgtttttatttcaaaaaattgtattaataatattttaccttatgacataggaaaattaggtggcatttatgctcacgattcgtgggtagaagaaaaaaataatttttcaatatttataatcagtgaagaagattataataatgctctgaattctatttttagtcctgatgttcagttttttatagataatatcaacaaaagacaaacaattgaagacgatagcaagaaaaaaataacagcagatgtgtatattataactgaatctgaattttatgcatattacaaaaatagagatgcgtttattcgtgaaaagatggactattcttgtttttcagaggaaaaattatatttgtatgcatctaactctataaacttttccctctaattatcagatacttataatatatgttttaaaaaattgttgtggaaatttgctacaacaattttttgttgtatactatacaatataattaatgtgggtgttaattatcttaaaatgcctcctacgaaattaggctgtaacaggaaaaagaaaagacttaggcttcttcttgcaactgaaactaagtctttccaaattgctaaaagcaattttcccataaagtaatgaagaaggtaaggggttcgccccttactatttcaagtgcaaagttaaataaataaataaataaatatgaatatttttaaaaatttgcgaaaaaaatggcacaacttctggaataaagaagtagaaggtggctttgaaattaatatcaatttggatattgaacaggttatttttatcttaattataatcattggtttattatggataatcttgaaataaataaagaaatagagcgtataatggatatttcctgtatgaaagcagacatcgccaccaaagcaatgggaatgagtgccaatgcctttcgtttaaaaaaattaggcaaaaactaccgatatttttcctctaaaaatttacaagatttaaaaaaaatacataaaacaagaagctgataaactctaatgaaagtcgttcctcgcggagcgatttttttatttctaatttaaatcaaggctggcactattgtaaatagtttcgttgtattttattgttttaaatatttgtaaatcaacaaaatacaagtaattttcagaaattgacacaaataaaatagtgtttgtgtcagttcttgtgtcatttaataaaaaaaataatctaatcaatgtgccgttatatgcattttagagtagattatcctgccattttttattattttttcaaaaaagtagactcacagggattcgaaccccaactaaatgaaccaaaatcacttgtgctaccgttacaccatgagtctctatattgttacctaaattaagatttgtctcttgttttaagtggtgcaaagatacaactatttttgtaatctgcaaattttggtcaaatatttttttcgtatttttacaaaaaaaattagcacaatggatttatttaattataaatatttaaaaatcaataacttaaattgttcggaaacattgaaaaaaaatatagatttttttcttaaaaattggttttctgatgaaaaatatactcaaataaagacttctggctctacgggaataccaaaaattttagatatttctaaggaaaaaatgcttcattcagcagagatgacttgtaattttttacaattatcacccaataatacagccttgctctgtttgccaatagaatatatttctgggaaaatgatgctcgttcgggctttgtacagaggacttcatattgttgtaaccacaccatctgttactccgttggaagatttaaaggaaaagattgatttctgtgctatgacccccttacaggttgagaattcattagataaattacacctaatcaataagttaataatcggcggagctagtgtatcggaaagtctaaaagttcgaataagagaagtattacctcccgattctcagacgaagatttatgagacttatggtatgtccgaaacgctttcccacattgctttgaaacaggtttttccgcaggacgagacttattttaccattttagaaaatataaaaatttcacaagacgatagaggctgtctttgtatagaagcccctaaacttgttgataatatactagtaactaatgacttggtagagattaaaaatcaacagcaatttaggtttttgggtcgtgtggataatgttattaattcgggtggcgctaaaattttcccagaagagttagaaaaaatagtgaaaaaacagatacctaatgaagttgtatttttgggactacctgacgaaaaattaggaaataagcttgtcttaatagttgaaggagaagagtctatagatttgaaaaatataatattgggcattcacttcgaaaagtcattccataaaccgaaggatattatttttgtaaataaaattccccgaacatcgaatggtaaagtccaaagaaatgaactactaacaaatcttatacgaaaataaattcttatctttgccgtcaattacctaaaaaaatagaagacgggaaaacgaattaattttaaattccaatgaaaaagattgtgttttttttatcaatattctattcactactaggaaaatcacagattattcgtaattattctaacgagtttatgaatataggcaatggagcgagggggttggcaatgggaaatgcagtagttgccagccagatggatatttattctcaaacgcataaccctgcaggacttacctctattagtagcgattggcaaggagcagtgatgcattccgaatattttgagagtattgcaaaatacgattatgttggatacgcgaagtctattgatacgaattctagttttgcaatatctgtcattcgatttggagttgataatattttagatacaacaaagatgattgataatgaaggaaatatagactatgacagaatttcaaaattttctcaagctgattatgcaggaattatttcttatggtttccatccttcgggaaatcataaacttagtttaggtctcaatacaaaactaatatatcgtaatgtaggtaaattagcaaatgccttcggttttggttttgatgtgggggcaatttatcaagacgatagagactggcgttttggggcaatgctaaaagatgctactacaacaatgaatttctggtcaatcaaccaatctaaactttct

SEQ ID NO: 1187 - DNA, 24419 bp, synthetic construct
  misc_feature 1..24419: note = Synthetic
  source 1..24419: mol_type = other DNA
ccatcgaaggctttcagagcatatacattgcctgtacccaaattcccatccatataagtggagagggcgtttaggacagtccaagttttgcttgctgtatcatagtgaaaaacccggtcgcgttcaaatccggctatataacctctcacgtttacgtatacgtcgtttccggattgagtcactgagtttatgtgaatcaacgtatcgaattcaattccataattccctttgattgaggatttaatggtaccattctcattaacccaacgcagggctatttgtcttgtattgaaagccaagctatctcctctatccactaccaaaaggctattccccctgttttcaaaagcaagaatgcccccgttgtaggggctaggtacctcatcaaattgagccgaggcgaatacgggcaaaagcaagagactgactagaagtaaacgtatacggttcatcataaatatcggattatactgaagcgagtatcaaaaagtttaggttggttgtttaggtattcaccggtttggtaaatgggtctgtaataccgtcgatcaacggataacatcactccccaattacgtagtacgcggtattccccgaagaaaccaaaagtataggacaaactataggtttgaagtgctttttctgttgtaaccggttcaaatgtaattggatctacctgtgcttgagcggtattctgaaaacgagagaactgcactccggcccttaatcccaagtttaaattattgccaaaactcctggccaactgcacttgaataggcaccgacaaagagctgtacatctgatttataccaacctgatttaaggtggcaaaggtatcagggatataggcaacgatgcggttggcggtgtcaatcaccggaaactcgctcgaataaaactcaaaattgcttctctgctctcgcgtggcgtattcaaagccgccactgaggctgatgtttcgcaaaacaggtttggtggataaaggcaacctgaagcctaactcaaatccatttccgctaatggccaggctattgcttgttaaggctgcactgaactgacggtgtacaaactcctctcctccattgttcaaagaccaatcactttgtccgaatacctgagaatagctgaagtacacagaaagcgtattgattgggaaaggaggacgtttgtcttctttatcggactccttcttaggccaaggttttagcgctatagcaggttcgctggctgaaataaaaccgggtaagcccatcaaggaagagatgctgatggggttgtttctactgaattcaggcaatgaatgcgatctaaagctgaccgatgctgtcacctgagtgaagtcgggggtagggaattgaccgaaatcaatatttaaagtaggcgtttgctctgaaccggtggaggctggttcaacaggcaaattagaatcaatattggacgcacttgttcctatcgcatctgttggagacgcggcagattgaggttccacttccgtaatggtagaggtggttccattttctgtttccggaacaaagacagcgttcgaagaggaatgctctgtttcttctgaacctttatgctgggtatactgatacgccagcaggccggtgcagcataacaaggtaagggctaaggcccaccagattcctcctcgtctgctttttttcttggcggcaaaagcgaggaaatcctgccaatcttgttcctccaccggcagggtgtactcacttagcgattgcctaagtaatgcttccatagtatgattttcattgttcatgaagtcctgccctcctcaagcagtaacttcaatgcctttttcgctttaaaaaattgggttttactggtattcaccgagatgccgagtaagtcggcaatttcttggtgactctgctgttcaaacacatacaggttcaataccgtgcggtaaccatccggtagttccgtgattttctgcaggaggtaagcttccgtatacgggagctcatccaattcggtatcgtcttcaacatcgatattatcatcccagctctcctgacttagcctacgctttttgtctttgttgagtaggctgatgcaattgttcatgaacagccgggttgcccaagtttctatgcttgaattgcctttaaactgtttgagtttttcaaaaaagcggataaagccttcttgcatgaaatccttggccagatcaggatctccggcatacctgaggcatactactttcattcggggggctaactgcataaacatctgccgctgtgccgcctgatctccatcaatgcaacgctgtatcaacagagcaaccgggttatcggtcgctttgctcagctcattttgtatggaatctgtaatattcaggataccgtcgttcactgttcagctattagacccaagggctgaacattggttgcctgaaagttaatagaaaatggaacatgactatcggttaaatcgccctagtcaggttttgagcgccaaaaatcaattccgctggctctcgaaacaaaatccaaaacaggtatactcaaggaaatttaaacctcctgtcttggtagaacacagacaggtaaacaggaaataaataatggatttagcgacttgagactaggccaaaagcaatggcataccactctcaaaatcacaggtaaacgaatggcagaaaaaactaagattctttcttagcccaatagataatttcgccttccatcaaacggtagcgttcacggagcccggcacccaattcttcccaaaggttaaccggttctactttaaagccggctttctccaatcgtttcgggtaatccaaaccaaacaaacgcacgtggtccttttgccagaaatgtttctcgcggtcttccggactggtaatgcttgggtcttcgtaggtttcttcgcgggtatcgtctagaggaacctgcatcactgcccagccacccggtttcaatacgcggtagatttcgcgcatggcctgcgcatcatcgtctacgtgttctaaaacgtggttgcacaatacaatatcaaaacgaccgtcttcaaacggcatctcgtggatgtccattttcacatcagccaaaggagagtataagtcgccggtgaggtaatccaaattctcctgctttctgaatcgcttgtaaaaacactgctccggcgcaatgtgcaagagcttatgtttagccgtatagaaatcggttttttggtttaagaaaaggtgcaatagacggtgacgttcaagtgaaaggcatttaggacaaagtacattgtcccttctcttcaccgttccgtaaggtaggaaagagcggaaatggccttcacaaatggggcattccaccttatcgcctttcatcaaaatcggagagactttgttgaagaggtaactaaaacgaatcaatatcggacgaggtacatacctcatcaaaaaggtgataaactctttcattcttctgtacggttccaaactttaaaatcgctcacatcttgcagtgtagcttgccaatcgcctctaaacccaatggctctgtcatcgataaacaaatcagccataggcttgccaaaggtccacactttatcaaaagggatatcgtgttgcttcatccactcttccatcatcactttttgatctaccgaatcttctttctttttcttaaaaatgggatttgttcgggtagaaaagatgtacaaggtatgcccttgttctttcagttttttcatggcttcagtagctccgggaacgggtggatcataaatggttccgtcgccccagccattggaatagccatgtaaaacaccgtcaaagtcaatcgcgattttcatcagtcgcaaactaacacaaaatgaactgaatttccctgctctaggcaaaatccgacgaacgtcaggcaacgataagctcgattagcccactctaattcctaaatagcgtatgaaaaagttcattaaattattggcacttggggcatttattttcctcagtgcagctctgcaggaggtcagggccactcacttggttggcagcgatatcatctaccgttgcttgggtaatggtcgctaccaaattacagttcgggtttaccgcgattgcaatggtgtagccttaagtacttctccaatcaatgttcgatgtggttctaataacctgcaagtagcccagactaaaatttcggttcgcgacgtaaccggaattgatccccgttgtccggttcaaagccgatgcacaggcaccttcccctatggcattgaggaacatgtttttcaaggcaccatcgacttaagcagctacagttgctgcgaatggaccatcagctgggcacaaaatgcccgaggtagtaatatctctaccggcatggccaatcaaaacttctatacggaggcgaaactcaataaatgcgttacgccgtgcaatagctcacccgactttaccaatcctccggtggccattgtttgccgtaaccaagattttgtgtttaataacggtgcattagataccattgatgccggcgactcgctcagctaccactgggctcctgcccttatcaatgccggtgttcaggctacgtacttgccgcccttctcgccaacaagaccgataacatttttcggcttccctatggcacatcttcctgatcccgcaggcatccacctcgattcaattacgggtgatattcgcttcagaccaacgatacgcgatcaggtggctgtattggttatagaagtgaaggaatggcgacgagttaatggtgtgatgacggttattggcataacacgccgagacatgcaggtcattgtaatcgactgcccaaacaacaatgtacctaaacttgaaggtccatataccaaacaggcttgtgccaatcaacaggtttgtatgtcgattatcacagacgatgatgacccgaacgatacagttaaaataagctggaaccgaggtattccgggagccactttcaccaacaataacggacaaacaaaacatgcttcaggtgcggtttgttggactccaaccgatgcccatgtgagcaatattccgtatacctttacggtcacggccaaagacgatgcctgtacactccccgggcaggccgtccgatcctattccatttttgtgcgggagactcccaaggccgatcggcagattcaattgctcacctgcggcaaggtggccatcgactatacaccaatcaaacagtacttagggctgagtcattcttgggtgatacgcgatagcaataatgttggcgtctttagctcctcatcccagaaagacacggccttccttcagcccggcattcaccgggtattcctcaccttacaaacctccacaccgtgtatcaatatctttatcgatagcattgaggtgcctgaatttgtgcgggtgaaattgcctagcgataccttcctctgtgccggcagcagcctccagctcaacgctcagcaaattggaggcaatgcccctttccaatacgaatgggcgcaagtattggatagcggtgtgagttctgtaatcagtacagcaagcagttattccatacagccggatagcaatgtaagctacctggtgcgcatactcgacggcaatggttgtcggaattacgatagcatcaatgtagtgcatcgaaatctgccggatgtagacctcggtcctgaccaacgcatctgcaacggcgacgtctacttgctaaatgcaggctccgatagcctcttcaatttcttgtggagcaatggcgatacatcggctcaaaccgaacttaaaaatgccggaatctataccgttaaggtgagcgatgaactaggctgttcttcggttgacagttttgaactcaaggtgaccaaagtagaaatgcaattaagcggggccggccctgtttgtgatggcgatacggccatattaaccgtaagcaatgccaataacattcaatggtttaacctagccggatttaatcctgcaaacccgggaacaccaatctataccggttcagtttacgaaaggcccattacccaaaatacaggtttggtataccaaggttttaaaacagaagatggcctaacctgctctgcctttgattcggtaaaaattacaaaacgcgaactgcctgagattgtacttgcagcacaaggtccgtattgccacaacgagagccaggtgaacctaaccagcttcttgcaataccctacgttgatgagcggcgattggcgcagtgatcaagaaacggatattgtgcagaacaactacttctaccctaaaaacgtagacaatccgaatcctatcgccggacatgaactcatctaccgtgtaacagacaattttggctgtaccaacgaagaaaaagtgaatgtaaaggtgaatccactgccgcaagtggtgctcgataaaaacccgacctactgtgcagaccaaggcgtgattttgcttaatagcatcaaacaaatgccaagcagcacggttggcggtaccccgcgttggtattcagcgaacaacaatgctcaagtcaatttagcgataacaggagctaacgtccacaacaaatcactgaacatcagcgcacttactccgggaagcacctatcctgttgtatttgaatacaaggccagcctaagcggttgtttaaataccgataccacctatatcaaggtgaacgtagtgccacagaccgatgccggattcttgagtccgatttgttatagcgaccaagcggtaaacttaaacgctgccaacccaagtccggccggaggtatctggaccaatagcctcaaccaacaggtgaataattttgatcctcaatcgctcgacccaagcacggccaagtttgccataccgggcacctacgttcgcttctactattcgtatacttcaccggaaggatgtgccaaaggcgatagcgtagatctattggtgaaaggcctgcctgagctgaaactcacggcccttggtggctggtgtgagtcggctggattgctcgacctgagaaatcagactaacctgcttggtggaacttggaccggtcctggcgttagtggtaccgacttcgatcctgttactgccggattaggccaaacgcatacccttcgctatagttatactgacgccagcagccagtgttctgcagaagatcagattcaggttttcgcacaaaatcaaccgcaaatcgaattggttactttggataaagcatgccaaggtgaggcattccctgtggagctgaaactcacccatgccagcggaagcctgctgagctccagcggcgacggtttatttggtgatgcacaaagcggaaccagtaccagcgaccagcagactatcagctattacccgggtagtcaagaccgtactcagctcgggtttagcctcagcgccgtgacgactaacaataatttctgtccgccggctcaagctaccaaaaccattaacatcattgccttacctcagataagcctaccggccggtccgtatgaaggctgcgaaactttggtgcttgaattggatgcgcaaagcaatgccgatccgggtgcagagtatatctgggatttcggcgatggcgatatcagaacaggaagcgataacctgctttccatccgcaaagaataccctaaatacggtcagtataccattaacctcaaggtgaccaatacgcctgcttttggctcttgtgtaaacaatgctactccggttcaggttacggtacttccaagtccggaagcactgtttagcatgagcagagaaatcacgcctatctctttacctgagatagccttctttgacgaaagtagtatcgaaggtggagcctccttggtaagttgggaatggaaatttggcgaccgaaacttcggtacatccacacaacaaaacccggtttatacctatccggtgaaggatgccggcgataccggtacctaccgtgtttggatgcaggttaccgctgataacggatgtacagacagtaccagtcgcctattaattattcgtccggaaattacggtcttcatcccgaatgcgtttacaccagacggcatgggcgactccatgaacaaccgcttctatatcgttgcccgcgaattcaaaacctttgaggttcacgtgtatacccgctggggcgaagaagtgtacagatccaatgatatcaacgaaggctgggacggccaatacaaaggtgttcctgcccaacaagacgtctacgtttaccgcgttattgtaacctctttggagggtaaagagtatgagtttagcggtaccgtaaccttactgcgatagttctaaggtagatacaactatccggatgagcccctgcatttgcgggggctttctttgtttcggtagagtcaagatttaagaagttacggatcaagagctagcagacaagaatgctaaaagcaggtgttccctatcctgtctagtgggttatggaatttgaataatggcttgcggaaattgaacattggaatttgtaattcatttactttgccccacatgttggtctactacctcctcatttggccattttcgcggttgcctttgtttatactctatggccttagctatgttgtatactttgtgcttcgttctgttttaggctaccgcaagcaggtgatcaatgccaatatcaaacgggttttccctgaatttacagacaaacaggtaaaggaccttagacaccgcaattaccgccacttgagctacctcgtggccgaaggtatccgtaatttgggcatcggtaaaaaggaattaaagcgccgcatgcacctcgagaatcctgagctttttgagcgattgtatgccgagggcaaaagtgtcatgttgatttcctcccatttcgaaaactgggagttctttatcactgcacaatcgttgttgatgccacaccaagccatgggcatcggtaaaaaaataaaaaaggcctacctcaataccaaaatcaacggactacgtgaacgattcggtatggaagtcatacacaaccgcaattaccgcgaacgtatagaagcagccatggcccaatcaccggtagccgttcttaccttaagcgatcagtcgccggcaccggatcatgcctattggaccaaattctttggggtagatacaccctttgcgtatggtccggaattcatggcccacctcttcgatatgacggtggtttacctcgatattcaattggtgaaacgcggccattacaaagctgtacccaccttactttttagcgatgtaaaaggcttgaagcacggtgaaatcatggaagcgctcatcgctaaacaagaagagcaaatctgccgccgaccggaagcttggctttggtcgcataaacgctggaagctcaataaaccagccgacttcgcctcgctcagagcggaacaaaaagctcgtttcgattctaaatttggtcgctgaaaacactacttttcatctttccagcttgaatgagctaaatatgttctacctaatccaataatatcctatattgtacctagctaagtatatagagaaattgagttagatactgattactattctcgtatatcaagctgaatagagagttttaagatttaatcccccacttcttaaaattgaaaagagctacattcaacctacgcattggcgatgccacgacaaaacctttaataccggtttcaaattccggcttatgcactctagaaattaaaatgtgcagtagtggtgcaaatcactattctatccgattttatactgattctgttcagagtgaatactcccctgagctaaatagaagcagtcgatctgattgtgactcttttccaaaaggaaataggagcggcgaatctatgtttaaatacctaacagcataccttgataaggctttgttagttcaattggatctgatacgtagctcatgaaaagagagagcttacatacaactaataagaagatgaaattaaataaaaaagccccggagatagccgaggcactaaatgttttcacaacggaataatccttattgtgatttgctttcaaaaacgaatgtataaaagaatttagaagatgacaacgaaaaaaatattgggattggatttggggactaactccatcggctgggcattgattgaaaaggactttgaaaagaaccaaggtaaaattttgggaatgggaagcagaataattcctatgagtgcagatattctaggggaattcgacaaaggaaattcagtttctcaaactaaaaccagaacctcatacagaagtgtcagaagattaagagaaagacacttactgagaaggcagcgaatacatagagtattgaacatcctgggttttctacctgaacattattcaagtcaaatagattttaagcaacgtttaggtcaatttatatccgaggccgaaccaaagctagcttggagagagatgcccaataacaaattcgattttctcttcaaaaaatcctttgaagaaatgctttcagaattcaaagaacatcaaccttcgctttttaccaacaaaaacaaacatggtgagagcattaaaatcccttatgattggacaatatattttctacggaaaaaggctataactcataaaataagcaaggaagaattagcctggattatactgaacttcaatcagaagagaggatactatcaatctcggggagaggaagaagaagataatccaaacaaactggttgaattccattctttaaaaatagttgaagtagttgccgatgaaaaaccgaataataaaggcgacttatggtattcattgcatttagaaaacgggtggatttacagacgatctagcaaaattgatttagctgactggaagggaaaagttcgagattttatagtaaccactgacctcaatgatgacgggactgtgaaaaccgacaaggaaggatcagaaaaaagaagtttccgcgcaccgagtgatgatgactggacgctacttaaaaagaaaacggagcaggacattgataattcaaccaaaactgtaggagcctacatttatgacatgttgcttcaaaaacccaatcaaaaaattagaggtaagcttgtcagaacaattgaacgaaaattttacagggaggaacttaaagccattctgaaaaagcaaattgaacttcagccggaactttttagcgagaatctatacaacaactgcatcagagaactatatcgcctaaacgatgctcatcaactccagctcagtaaaaaagattttgtacacctttttgtaaatgatatcatcttttaccaacgcccattaaaaagtaaaaaatcaactattgggcgatgttcattagagtttagaacatatagaaatgcagatggaaatgagataaaagagtatttgaaaacgatacctaaatcacatccattgtttcaagaattcagagtttggcagtggctatacaatttgaagatttatactaaaagtgatgataaagatgtaacatcagaattcttgaaaaatacggaagacttggaaagtctatttgaatttctgatgagtagaaaagaagttgaccacaaagatctactcaaattctttttcaaagacctgaaaggtaaggctctggctgctgaaataaacaagtaccggtggaattacgtttacgattcattaagtgatacatcaaaaaaatacccctgcaacgaaacaggacatgaaatatcccgccgattacaaaaagtaaaaaatctcccatccaatttcgctactccaaatattgaataccacttatggcacatcatctattctgtctcggataaaactcagtttgaaaaagccttaaaatcattctcacataaatacaaccttgatgaaaactcatttgtagagaatttcagaaacttcaaaccctttgaaaatgattacggttcatattctgaaaaagcgattagaaaattgctcccattgatgcgactagggaaatattggaattggagcaatatagaggtaagcacacagaatagaattgataaaattttgaccggtgagtacgacgagggtataaaagaacgagttcgtgaaaaagctattaacctttctaatcaccttgaatttcaaggccttcaactttggctcgctcaatacatagtatatgaccgccattcagaagctgctctgactggaaaatggaagtcagttaaagaattagaagaattcttgaatgaattcaaacaacattcacttcgcaatcctattgttgagcaagttgttactgaaaccttaagagttgttcgagaaatttgggtgaaatatggagcttcatcagaaagcttctttgatgaaattcatattgaattaggaagagaaatgaagaacacggcaaatgaccgtaaacgcattactacccagatatcggataatgaaaataccaatttacgtatcaaggcattgttagctgaacttaaaaatgattcgaacgtagaaaatgttcgtccgtattctccaatgcaacaagaggcgcttaaaatctatgaagaaggtgtattaaactcaggagtcgaagtccctgatgaaatagttaaaataagtcgaacggccaacccttcaagttcagaactcactcgttataaactatggcttgaacaaaaataccgttcaccatacactggtatgatgattcctttgagtagattattttccgaagactatcaaattgaacacattattccccaaagtaggtacttcgatgacagtcttaccaataaagtaatttgtgaatcggctgtgaaccaattaaaaagcaaccaattaggattagaatttattaaagctcatcatggacgaattgttgaaactggaaaaggaaataccgtgaaaatttttactgaagctgaataccgagacttcattaaccaatactatgataaaaacagaggaaaacgaactaagcttctactcgacgaaataccagatcaaatgattgagcgtcaacttaatgacactcgttatatcagtaagtatatttcaaacctactttcaaatattgttcgttccgataaggatgacgatggagcaaactccaaaaacattattccaggcaacgggaaaataacatcaaaactcaaacaagattgggggttgaatgatgtgtggaatgatttgattttaacacgctttgaaagaatgaataagctaacaaatagcacggattttacttccaaaaacaaagaaggtcatatcattccgacgattccattagagttatcaaaaggatttcagaaaaaaaggattgatcatcggcaccatgctttagatgcgcttgtcatcgcttgcgctacaaaagaccatgttaatttactgaacaatcaatcggcaaaatcagatgtgaaacgttatgacttacagcgaaaattgcggaatactgaaaagtgggccgatacagaaggtaaaataagagaccgtttcaccgaatttaagaagccttggcaagacttcacaacagacgctaggaatgaattgggaaaaattataattagttttaaacaaaacgttcgtgtaatcaataaaaccacgaataaatacgaaagctatcgagatgaaaacggaaatctcagatatgacaaaaacggtagattaaaaaaggactttatttcacaagtgaaaggtgatagttgggctattcgtaagcccatgcacaaagacaccgtttctgggaagattaacttaccgagaattaaggttccaaaaggaaaaatactaacagccacaagaaaaaacatcgacacttcctttaatctcaaaaccattgaatccataacggatacaggaattcaaaaaattctcaagagtttccttgcatacaaaaacaatcaacctgagctggcattctctccagaaggattagaggaattgaataaaaacatcgctcaattcaatgatggtaaatctcaccaacctatattaaaagtgaggttatttgaggtaggtagcaaatttccgcttggtcaaacaggtaataagaaatcaaaatatgttgaatccgccaaaggaacgaacctcttctttgctgtgtaccgtgatgaaaatgaaaaacgtaactacgatacaataccgctaaacgtagttattgagcgccaaaaacaaggtgagtattccgttcctgaaaccaatgacaaaggagataaacttgttttttatctgtcgcccaatgatctagtttatgttcccactcatgacgaaaaagaaaacctaaatggaattgattttaaaaatttaagtaaggaacagataggtagaatctataaaatggtgagtagtacaggaaacgaatgtcattttattccagtcaatgtctcagcattaataaaaaactatgatgctaaaactaaaatcggtgagtttggaagcctaaataaacaggaaatcacactgcttggagatcaaagaataaaggaggtttgcgtcaaactgaacgtggatagaattggtaacataacaggctatgcaatatgattaaacgcacccttttctttgaaaacccagcttacttgagtactcacttagaacaactggttattgatttccctgaaaaagagaaggagaaaaagaccattcctatagaagatataggaatggtgattcttgacaacccccaaattaccctttcacagcaattgatggccaaacttctgcaaaataatgccgctatagtagcttgtgatcaaaaacacatgccgttggggctatggctaaatttggatggccatacacttcaaagtgctaggcacaaagaacaaatagaaagttctgttccattgaggaaacaattatggcaacaaaccgttaaagcgaaaattgaaaatcaggctgccgtattacgcaaacaaggagttcctgaagagaacatgcgttactggtctacagaagtaaaatcgggagatacagaaaaccatgaaggtcgcgccgccgcctattattggaaaactgtttttaaagaccctgagtttattcgcgaccgaagtggtctttctcccaataatttattgaattatggctacgctatactgagagcctgtgtggccagagcattggttggaagcggtttgtttcctgcatttggaatacaccaccgcaatcaatacaatccctattgcctagcagatgatattatggaaccattcaggccctatgtggatctaattgttttggagattattgctgaacatggaaaacccgaaggcttgcatacctctttaaagaaagaattgcttcagattccatcggtcgacgtttatattgatggccttcgaagtccattgatgcttgccgttcaacgaagtacagccagcttagccaagtgttttgaaggtgagcttagaaagatatcctatcctcaaatcttgtgaaacaagaaagactcaatgcctatcgaattatgtggatactcgtcttttttgatttaccaacagacactaaaaaagacagaaaggcttatgctgaatttagaaaaaaacttttggtcgacggatttaccatgtttcaattttctatttacttgaggcattgccctagcagagaaaatgctgaagtgcacatcaaacgggtaaaaaaagaacttccaaaagccgggcaaattggcattttgtgcattaccgataaacagtttggtgcaatggagattttcaggggcgtaaagaaagaaaagcttgaaacccctaacctacaattggaaatgttttaaaaaccaatcagtcgacatccaatttgccattcatttttccatcctatttctcgacttaatgaaatggaattcagggacttgaagcagggtatgctgtttcgaatctccgaattccattagttgaaagcaaatcacaactgctttggccttgtgctctgcttcaatctcgctgtttcgaatctccgaattccattagttgaaagcaaatcacaactctgactgaactggctaaacccaagcgctcgctgtttcgaatctccgaattccattagttgaaagcaaatcacaaccctctgcctgttgtggtgtttcggccttcggctgtttcgaatctccgaattccattagttgaaagcaaatcacaacaaccagcttgtccaggtcttcgctgttgccgctgtttcgaatctccgaattccattagttgaaagcaaatcacaacagcttttatcaatggaaagcgcgttgtgatgctgtttcgaatctccgaattccattagttgaaagcaaatcacaacggggggtgtacatacgttcacggaagttctgctgtttcgaatctccgaattccattagttgaaagcaaatcacaacaaagattgatgatgatgaaaaccgcttttggctgtttcgaatctccgaattccattagttgaaagcaaatcacaacgcggcgaggttttcgaattgtctagggtcggctgtttcgaatctccgaattccattagttgaaagcaaatcacaacaggattagctattgggatagcttgatatttactgtttcgaatctccgaattccattagttgaaagcaaatcacaactgcctacgtgaaggcaacgcctctgaatacactgtttcgaatctccgaattccattagttgaaagcaaatcacaacagtcgatagtcttttctccgtacttctccgactgtttcgaatctccgaattccattagttgaaagcaaatcacaacaagtttcatcatttgcaaaaatagagcgcaactgtttcgaatctccgaattccattagttgaaagcaaatcacaacagaaattggcaggggcggagtttcgggaacactgtttcgaatctccgaattccattagttgaaagcaaatcacaactagtgatgtggtatgtgtacagatacttgtactgtttcgaatctccgaattccattagttgaaagcaaatcacaactgtcagctaaattgagttactaatatgtgtactgtttcgaatctccgaattccattagttgaaagcaaatcacaacatattcaagcgagcaccgggagcgcggacactgtttcgaatctccgaattccattagttgaaagcaaatcacaacatataggccgttagcgtttctgtagtaaatactgtttcgaatctccgaattccattagttgaaagcaaatcacaactacgttctgcaaagcaaggtcttcgacctcactgtttcgaatctccgaattccattagttgaaagcaaatcacaactactaacccgattccatcattaggacggctactgtttcgaatctccgaattccattagttgaaagcaaatcacaactgttcagcttttagacccaaacttcaacttactgtttcgaatctccgaattccattagttgaaagcaaatcacaaccccagcttaagtaaggaagcaagctgaataactgtttcgaatctccgaattccattagttgaaagcaaatcacaacaaatttagcgccgccgtcgatattatcaatactgtttcgaatctccgaattccattagttgaaagcaaatcacaacaatcttgcggcgtgtcttcaaaagtgctagactgtttcgaatctccgaattccattagttgaaagcaaatcacaacacggaaactacatgggcttgtctgctgaatactgtttcgaatctccgaattccattagttgaaagcaaatcacaactggctgcgcgggatgctgaatatgaatcatactgtttcgaatctccgaattccattagttgaaagcaaatcacaacccataaatggtttcagctccaagggctgtcactgtttcgaatctccgaattccattagttgaatccgacgcaggaggatcagcgaattccatcaaaacaaacacttctatgagctaaagcaaatcacaacaggtatcgcatttattgtacatgcccgaaggctgtttcgaatctccgaattccattagttgaatccgacgcaggaggataagcgaattccattaaaacaaacacttctatgagctaaagcaaatcacaactgagcagtaaccaccctacgacggcaccaagctgtttcgattttccgaatttggtcataaagaaaataagatcgtcaaaaacaatcaaaaaaagctcgtttcgattctaaatttggtcgctgatttcggttgtcggttttttacaatccaagcgcttcgctagctcctagttttgctccgaaattacctccttgccgaggtgattcctcaatttgagcaaaatgaaaacagcatggttaggcggtattatggccgctatttgttctttggcttttgttccggccaatgatgtcgcggaagcaaagactacagccgaggacagcttggcactctactctaaatttgattttattccgggaacagagattctctacagcaacgagtttgaacaggaaaatctaggtgaattccccactggctggaataccaccggcagcggtgaggtagttcagtttggtgcagataaacgctatggcgttaagcttttgcaaaatgcccaattccttaccgataatgtaaaagagttctcaagcgatttcaccttggaatttgacctctttctcgacttcacttcgaataatgcttttttcccggtagtctccttcgggatagtggcttccggttctgttaagccagcagaccggagccttttaaattcctattaccaaggttcgtattggttgacgaacctatctgctcagctggaaggaaattcgcaactcaccttggaaagtttccaaaacgggagcgtgtttttccactccggcgagaaaccttatcccaagctggaaaacaaactaaagcagcaggtacacgtgagcgttcaagtgcaaaaagaacgcattcgactctggttggatgaaaacaaagtgctcgacttacccaaagccttgcctgccaataccaagtggaatcaattgatgtttgccgtttctgaaagcagttatagcgaccaggaaattggtgtttacgtgagcaaaatcaaaatcgctaagggcgtggaagacacccgcaaaaagctcttggatgaaggcaaatacagcaccaacggcattttattcgatgtgaactcggcggtgattcgtccggagtcctaccctattctaaaagaaattgcacaagcgatgttggccaaacctgaaaccaagttcaacatcatcggacataccgatagcgacggcgacgaagcacttaaccagaaactctctgaacaacgtgccgaagcggtaaaaaaagccttgatagagcgattcaaaatagacgccgataggctgaacactgcgggtaaaggcgaaaccgctcccatcgctgaaaacagcacccgcgaaggcaaagccaaaaaccgccgagtggaatttatcaaactgccataagcctatctgaacatgaaaaagattatcgctagcctaagcatcgcttcacttatctgcattgcttttctgagtatatccgcgcagaaacaactggatcgtttggaagaagacatcttcacaacgctgcaaattccggcttgggaaggcaaacttcgcatccgagaaaacatcattcgcgaatacctcagcctgcccaaccagcctagtttaaaaatgacgccggttgaaaaaagagctgagttggttaaacgcttgggcgctgaaatcaagaaggatattaatagtcttgagtttgcggcttcctacaaacaataccttgaggaaaaccagccacaacgtccgaaaggccaagacattgcagaacgcatagcggaactgaagaaagaaatcaaaaccatggaagcggatcgtgaagcggcggatgacgagtataaaccactttacgacatgaccattgccgagttaaaaaaggaaatggaaatcattcaaaacccgaatcacccggaatacagtctttatgtagttcaagtagggatgagtccggaagaacaagcgcagtttatgaatgattctattgaattcgctaaaatcaatcctcctttagtgaaagacatggtaaagctcagactggaagccttcttagcgtttacagctgatattccattcgacgccaacttggtagaacgcaacggaaaaaaatactttgtgaaggaagaattggaagcgaaatcatccgattggaaacaatgttttcgtgccggtaaagaaacaatacaggccggtcgcaactttgccgaagcctggctgaaagagcttaaacagtagtctgtttttgttttgcccttaaaaacccggtttcccgggttttttgctttaaagtgctaacccaaaaatatagggctacctcaggtagttaacccgagatagcccgtctctggcgaattcacactaaatcaaagttccttgaaactttgaggcactggtttatcgatccgttttaactatgcgggtcgctgttttttgtcccaaagaattttccagttccaaaacataaacacctgctttcaaggattggatatccattgttgtagcggagccggaagtcaacagcagcttaccactgaggtcgtaaatctttactgcagcaacgcctgattcactttcaatggataaggtgcctgtgcttgggtttggatatactttaaacccgatttccttagttagctttctagccgatacactttgtcctgttcccaacttacccaaagcactgaggtgagcccacgacttattagctgatttcactaaggtttggttaaaatacatgtcttcttcgtgggtgaacaagcagaatagattaccaaggccgtcgtagccaaaatcgcgcgagtcccaacctgccttgtctttcacattcacttgattcatggttcttacacttaggtctaagttaagttctaccacagatgcacaccactccaggttggccgctaccaatgaatcattcgggaaatgtaaatttctagcgaagtagttcatcactgcaattttctcattcttgtaaaccgttaatttctggatttcattctgacgttgaatgccgtattcatcgtagtacaaaatgtggttcttcacttttaaatcctgatccatttcaatcaaaaagcaagttggataagtattgttcaggttatgaagcgtgtccccttccaaaaggatatagcgacttttaaaaaatccggttgcgtaaattcttccgttttcagtcccttttatatccatcacctgcaattgaccgccaccattcatatttttcaggtccagcgttttctctacggcaggagtatggtttgttgtgttggccttgaattttgtaaccgtgacaccaccgatataaccaaagtaatcgcttcctgattgctctaagtaatgcacaggctctgtgtaaccaatacccaaaatgctcgacgctttaacgctgccggctaggtcgtaaaccataaagtatggccgtccccacattggaaaagtataggagatgccatctctgtcgaatccgccgttgccaatagcacgaacccaaagttcattgcctttcacttccattccgtaaaccttgtcttctgccgagctacctgctgccttgataaattgaagcgtgccatccttatccaatttcagcaatgccatatcgctattgtctacgctatctccatctaccaccaatactttggttgtataggttatgagtgcgtaaatattgagatcatcatcgcaggtggctttcatggccttgtcgccattgaagtatgcacctggcaagttatacgtccactgacgaacgccttttgcatcgtatttagcgatggctactccttgttggaacccggagaatggttcacgcatttgtccaaccacaatggagtttccttctttgtcggcagctataccacgcatttcactggtttgacccatgtgaggcacggtaatggcccactcccaagtattggtttgcgcttgcatacttgtgaaaagcaagcaaaaaagtaaggtaaatgtaattttcattatctatcgattttgtaggctacaaaaattccccagaagtaaaaaaatagccattcgacaaatgccgaatttcggtgagtcccgtttagcgcaattgcgtttacacattgccggattgaatttgtttgcccccaccttttaccagctgcaattcgcttcagaacccggtatgaaatcgaaaagtttcagccccttaacccataaaaaaacccggtctcccgggttttttacgttatagtgaactgctcattcaatcgtaactttccaaatattgtagttccccggaccggatccgcgttgggaaacaaagtaaagtgatttaccatccttagaccacttcgggttaaaatcgttgccatggtgaaaggtaatttgtgtcatacccgttccatcggcgttgatggtgaagatatcccagttgtttgttttgtctttcaatacactgaggctaacaaaagcaacacgtttaccatccggtgaaacaaccggttgcgcatagcctttgatattatcgcttaaaagagaatattcttgccctgtttccaggttgagaatccatagctcataatcgtttcgcacacatactacctgttggccatccgggaaaaaatcggcttggcttcctttaccgtattgaatcaaggtgccctttttcaaatcgtacgaccataaaaagcgatcgtatgtattatcgtattgctgcgttttggcgttgtatacctgccccaccttctcacgttcagtgaataagaccttggagttatcagggaaaaatacagggttattggtgaaggtcgaagtattggttacctgttgaattttggctcccgactcggcacccacaatatagatattggttttattgtctttggtctggctatacgctatcatcttatcgtcttgggaaatggccggaccaaatgtccaaggttgaaaagtacgttgctgcttcaacttcaccgattcggtctttctcaaatacatattggcttcccggctaccgttcttggatgaaacgccttggtaggtaatgagtttttcgctgcgtgatacatcaatgatattggtgtttaggttggagtaatacctttgataaccaacgccaaaaccggaacagattccgtctaagtcgtctgtgattttatagaatttatacccgctttcttgaggcacgtacaatgcgccatagttcaccggtggcgccttttgggtggcactgccaaaggcaaagatcaggaaggtaatgacaacagcgaagctgagaaaataggcacttaatctagtcatgagagggtttggttagggttttataatgcagaaatatcgccagcaatccgaaagccgaatagaccaacatatcgatgacgtcaaaggtgccggaaaaccactttaggtattgtccggtttccaataggtagggtaatgcgaagacagtgctgaacaccaaaaagaaatcgtttcggtagggcagttttccccaaatcagaatgatggccgaaagcaaggcgtagaaccagagtccgtcgggtaagttataacgaaagaaagacgaccaattgcctaattcatttgttctactgcctacttgatgctccaagcctaaccactgctcaaaaagcaacggagtatcacggtaataaaggtaaataaagagcccaatacccaacgggagaagggtgtgcaggaacagccgatatatcaaattctcgctcagcatacagggactgcgtgcgcttagaggtttggttttggtaagcttaaattagctctaatttgaaatatagcacttttttgtttaccaagtgtctatttcagttgctgaatggggtattgaagaatgaggttgagcagcggagcacaaagaatgagtcaggatgaatttcgggagaaaatggagaaggtttgatggaaattgactaaaacaccgacctaagtcagctgatctttagtattctttcaccaaggtttccaagggaatatgcaaggcttcatggagttttctgatcatcgctaaatttagtttgcgattttgtttaaagatatcggtaacacgacttttaaaccccagtatttcagcgagatctttattgcttaaaccctgctgttccatgcggtatttgatagcctcaataggcgttggagccgcaatcacaaactgtttgtcttcgtaatcttgaatgagaagcgctaagacatccgcctcatcactttctgcagagccttgcggagcattgaagagttgttcaaagcgtttgagcgcttctttgtactctgcttctgattttaagattttcaaattcatatccattcgtataacgcattccacttattaaaagagattaactgtttctgcattcaccttatcgtattcggcgtgagaccctataaactttataaagacccaggccttttggtagttgatttccgcgatcaaccggtaatcattgccgttgatttcaaatacagcgcggttgttctttagggtacgagcggtattaaaatcttttacaacatcagagggttttgtccagtta

SEQ ID NO: 1188 - DNA, 24413 bp, synthetic construct
  misc_feature 1..24413: note = Synthetic
  source 1..24413: mol_type = other DNA
gtgaagaatacagtaaaaattaatgtcaatataactaagaatgctttcgattttatagatttcataatttatatttttaaatttctaataattaaatacaagagttgtgccaaaaaggacttctttattttggaaactcatcaaaattaaccatccagtttacaccgaatttatcagtaaacataccaaaataagctccccagaaagtatttgccataggcataataacttttccgccatttgataatccctgaaataatcgatccgcttcttcacgattttcagcattaatggaaactgaaaaattgtttccaaaagtaacgtcgccgctaaaagatgtactatcgcttcccattaaaatagtttctttgctaataggtaagcttacgtgcatgatcctttcagcttcttcaggacttggtgaaggataatcttcacttggaggcatgtctttgaatttaccgatataatcaaattcacctccgaatactgatttgtagaaattaaacgcttcttctgtattaccattaaaggtcaaatacacatttactgttgccatagttttattagtttagtttttatttatgaacaatattttttaaagttatttaaaatactctgccagccatcgcgttgcataaaaacagaatgagtactctccggttcaaaactcccggaaaccaatgtttgaccgttaaaggacacaaactcggtccatacttttctaccgtcttctaaacagaatgcaatgatcttataaggaacaacttttgtatagtttcctttcaggtcaaagctcatacttccgtctttagagctcattgtatatgaaaattgtccgccggtttttaaatcgtttgtagcagcaggacaatgccaatcatcagaagcaaaattccaattgacaatatgttccggttgcgtatacttattccaaacttcttccaatggtttatcaattaaagtttgtaccgtaatattttttacagttccgttctctgcatctgattttatcttttctaaagctttcggaaaagtagaatcaaaaaaagattcccatttttcatcaatagttgcgatagcttttaatgtagtaaccccattttcttcattaaggaaataactttcatcagagtcggtccactcatttttaacttcctgctcttcaaagtttttaatttcacctttatgatgaaaactcatttgctgattgggaatcatctctgttataatagaaaacattccgtctccttttggcatcaagaaatagatcttacttcctttgttccaatcagaaagcgcataagagccttctgaaaaaacactagtccaattctcgtaattagctctgttccataaacaaaaccaaactttttccgccggagcattaatcgttgttgaaaatgtgatttgcttcatactttatctgcaattagatcgtttaaagctacaattatttttttgaattatgagctgcaacttaacatagaacaaccaatttttgttcgtgcccaatcaggtcttttagcaaaccacttttcatattccggttgttcgtcatacggatgttttaaaagttccgctaattcactgactaatgaataatcctctttttcagctgcctcaatagccagttgtgccatataattgcgtaacacatatttaggatttatcttattcatcttctgcttacgttcagaatcatttgtggtttctttctttaagttattgagatataaggaaagccaaaaatgccatgtttcttgtacagcattttttatttctgtttcttggtaaaaggcaaactttatttttgacaaggcttcagtttcagtgtcttctttagagatattcgctaacaaacgataaaaaatagtcatgtctgtttccgtctcctgcaacgtaattaataattgatgaataagattttcattttctgcattacgttcagtaagtcctaatttatccagcatcatatcattaaaatcagattgaaactcactattaaagttctctaaaatctgttccaaagcttttacatcttcaattaacggatataaagcattagctaactgcagtaagttccaaagagcaatatgcggctgatttccgaaacggtaacgtttgccttctgcatctgtagtattgggcgtccaatgcggatcgtaaccttccagccaaccatacggaccgtaatctattgtaatgccgtgaattgacatattatcggtattcataacaccatgaacaaaacccacacgttgccagtgaatgagtaactctttagtacttgttgctatttcctgaaaaaaagcaatatatttttcctttccggttactataattgacggaaaataggtttcaatacaaaaatcagctaatagtttaagattttttagatcttgtcgcgctgcgaaaatttcaaaatttccaaaacggatgaaactaggtgctatacggcaaacaacggctcccttttcgtaagctgcattaccattatataaaatatctcgcaataccttttcaccggtttccatgacgctgagcgaccgtgtagtaggaactcctaaatgatacatagcctcgctacacaaatgttcacgaatagaagaccgtaacactgctaagccatctcctctgcgggaatagggagtttttccggcacctttgagttgaaccatcaagttttgtccttgattctctatttcaaataaattaatagctctaccgtcacccaattgtcctgcccagtttccgaattggtgtccaccataacacatagcaaaaggtttagttccttctacaacttttttcccagagaaaacagcaataaaatcatcagaacctacagattctccagataacccgatcaaatcggccacttcagttgaagcatgaactagtttagggcttaaaggaactttcggagtcacataagaaaacatggcttcataaacctgtcggatttcattagttgtatcaggatcggcaggaagcttttctgtgaaaatagtatttacggaaagttgcatagctttttgtcaaagttacaaaattggcactaggatcactttaaaatcttcaaaaaaatgtatctttggagacaaatttttttaggaatggcaacaacaacacaatcgcaactggaaacgtattttgaaacttttcgaaaagaaattgtcggagcagatcaaacattttcctctcctttcggtcaaaagaaaatcatttataccgattggacagccagcggacgtttgtacagacctattgaagaaaaaatgctacacgatttcggtccatttgttgccaatactcataccgagacttctattaccggaacggctatgaccttagcctaccacaaagcacgccatattatcaaagagcatgttcatgcaaatgaagatgatgttttaataacacacggaaccggaatgaccggtgtcgtaaataagttacaacgaattctggggctacgtgttcctgaaaacttaagggagtttgcacatattcctcaggcagtgaaacctatcgtgtttatttcacacatggaacaccattccaatcaaacatcatggatagaaactattgctgatgttgtggttgtaccggcaaatgaggaaggcttattttgcttggaaaattttaaacagttactagaaaaatataaagacagaagttttaaaattgcgtcaattacttcatgttctaatgttacagggattaaaacaccttattatgaggtagcaaaattaatgcaccaatacaatggcgtttgttttgttgactttgcctgttcggggccttatgtggaaatcaacatgcaccctgaagatcaagaatcgtatctggatgctattttcttttcgccgcataaatttttaggaggtcccggaacttgcggtgtcatggtttttaataaaaatctatacaagaataacgtcccggattgcccgggcggaggaacagtaaaatggaccaatccatggggagaacaccagtatattgacagtattgaagatagagaagatggcgggactcctggttttttacaggttattaaaacggctttggctattgagttaaaagataaaatgggagtggataaaatcttagaacgcgagcatgaactggtagcctatattttcagccgtttacaaaatattccgaacattaatatcttagcaccccaacatcaggatagattaggtgtaatatcgttctacattgacgatctgcattacaatctaggggtaaaattattaaacgaccgatttggtatccaaactcgtggtggctgcagttgtgctggaacatacggccattatttattgcatgttgaccaagagacttcccatgatattgtatgccagatttcagccggagatctagaacacaaaccaggttggattcgcatgtcgattcaccctacaactactaatgccgagattgaatatgtttgtgattgcattattgcattggccgaacatcacaaagaatgggctaaagattactcctacaactgtaaaactaatgaatttactcataaagaagcccaagacaatattcacgaaacaatagaaaattggttcactctataaaagtaaaaaggatggtacaaaaccatccttttttgcttaatcctttttaaatttccaacgtttgtgagtccagaaataatattccggagcttcgtaaatttgtttttccacttctctgataaagcgtcggcttacttcaaattccggtaatgtttcgatattattatctgttatcggaataaaagtggcttcataataaccgcgtttcaacttcttcactttcatataaagaacattcatatccagatgtcttgccaacatttctcctccaatatgaataggtacttcctgtcctaaaaaagtatcccaatatttagctttactgccacttccgggtgtttggtcactaatgaacccataaacgccctgaattcctttgttttgattttctgttacttcttttacggtatgtttggtatctaccaaagtggcatcaaaacgagaacgaatacttctcatcaaatgatcaaaatacggattcttaattcttttgtaaataccgtatcctttaaaccttatataagttcccaaagttacagaccattcccaactggcataatgtgcataaaaaagaataatacttttgcctttatcttcatattctttaaataaatccagattagtaaaggtaaaacgtttttgaatttcttttttagaaatggtcatggttttaaccatttccataaacatatcacataaatgacggtatgactttttttcaatagctaatctttcttttttgctcaaatccggaaaagccagttttatattagatctaactgttcttttacgataacctataatgttataaacaagtacttttatacaatcagaaacgaaataaaatattggaaaaggaagtatagaaactagccataataacggataagcaagataataggcaatacgctgcatgtatttaaaactttttacaaaaatactttttttaaagtagttttaaaataaattaactattagtaattttacggaaaaaagaatcaatggatattttcttactggttattataggaatcaatgttttagtgagttttaaagggtttaatgatcctgaattcttcagaaaatatgagtttcacgtgggaagcgttaaagcaggcgaacagatcaggatactaaccagcggctttttgcatgttgatattatgcatcttgcatttaatatgctgaccttgtattttttcgctccggttgttacccaaactttagggaatatgtattttctgtacatttatttcggaagcttaattgccggaaatttactgactttatatttacataaagacgaatattattaccgggcagttggtgcttccggagcagtaaccggaataatttacagctctatactgctatacccgaatatgactttaggtttattttttgtcattcctattccagggtatcttttcggaattggttatttgttatattctatttacggaatgcgtgctaaaaatgataatatcgggcacacagctcactttggaggagcaattgcaggatatttgttaaccttattgaaagaaccatctatgttagtgactaatactaaaatggtgattttgttgacaatacctattattatacttttttatttgcataaaaacaataagctataaggttttggcatgacaattggataaattatctaaaaaaacaaatacagtatgaaaaaattagttttaatcttaacattagttacaacaagtatgatggctcaaaatcaagttcaggaaccgattcctcaaatctcagttagcggagaaggtaaaataaaagtagcaccggatcaggctgtcattactctaggtgttgaaaatacaggaaaagatgctacagaagtaaaaaagaaaaatgatgatacagtagatgccatcattaaaactattaagaaaaacggtattgcagccaatgattatcaaacgcaaaacgtttctttgcgcaaaaattatgactacaatcaaaaaaaatataattatgtagccagtcaaaccattaccatacatctgaaagatcttaaaaaatatgatgctttgatgatgagtttagtagatgccggagtgaatactattcagggagtggaattcaaatcgtctaaaatagaacaataccaatcagaagctcgtataaaagcaatgttagatgctaagaagaaagcagaagattatgtttctgttttgaatcaaaaggtaggcaaagctttgcaaataagcgataattctcaagttaactatcctcgaccggtttataaaacgtatgctgtagctgaaatggctgatgcagctccaaacgaaactttagcaatcggagaaattgaagttacagcaaatgtttcagtgagttttgagttgaaataaaatgaatttaaaatatgaaataaaaaaccacttgtaattaacaagtggttttttgttttattcaattcaataactttattctacattttcaacattagcttctgctatttgtttgtaagttccgttagttaacttttcacggatagcttcaaatgctgctaacgtttcttcaatatcttgtaaagtatgtgaagctgtaggaatcatacgtaataagataattcctttaggaattacaggatatacaacaatagacaagaaaataccgtaattttcacgtaaatcgtttaccattaccattgcttccggaatagatccttctaaatacacaggagttacacaagtattggtatctccgatattgaaacctctttcttttaaaccgttttgtaaagcatttacattttcccaaagttttgctttcaattccggcattgtacgcaacatttccaaacgtcttaatgctccgatcgtctgaatcatcggcaatgacttagcaaacatttgcgaacgtaaattgtacttcaagtaatcaatgatatctttatcaccggcaataaatgcaccgatactagccattgatttagcaaaagtcgaaaaatacacgtcaattccatcctgacaaccttgctcctcacctgctccggcacctgttttacctaacgtaccaaaaccgtgagcgtcatctactaacaaacgaaagttgtatttttcttttaaagcaacaatctcttttagtttaccttgttgcccacgcataccgaaaacaccttctgtgatgaataaaattcctcctccggtctcttctgccattttagtagcacgttttaaatttttctcgatactttctaaatcgttatgcttgtacgtaaaacgtttacccatgtgcaaacgtacaccgtcaataatgcaagcatgtgaatctacatcgtatacgatcacatcgtttttcgttaccaaagcatcaattgtagataccattccctgataaccgaagtttaacaaataagccgcttcttttcctacgaattcggctaattcattttgtaattgttcatgaatagttgtgtgaccactcatcattctggctcccatagggtaagccgctccccattctgcagctgcctgagcatctactttacgaacttcaggatggttagctaatcctaaatagtcattcaaactccaatttaaaatctcttttccgtgaaacttcatgtgaggtcctaactcaccttctaacttagggaacacataatatccttctgcttgtgaagcccactttcctaaaggacctttattttgttgaattctttcaaataaatcttttaccatgatctgaatcggtattaaaaaatcgggacaaaagtaactatttctacctaacttttatacaataatgggtattttttaatccccttatattttcttttccctactgttctaaaattttacgtttctatttattgggattctcttaaaaatcttcctaactaactttccacaatttgcttcattcgtttcttcctttaatttatttgtaatactcttttagacagctcaatatcttcttgctttcctgtgtgtttatgaggctcatctgataattttatcacacctgtccaacttttatcttcaggtaaagcctgaatcattttgattacaatattcatcggtttcaatccgacatcattcgtcaaactagttccgatgccaaaagaaagcccgattcttcctttaaaatattcggcaatccgctctactttttcataattgagtccatccgaaaaaataatggttttggtcaacggatcaattcctaattttttataatgtgctattgttttttctccgaattctatcgcatctccggaatcatgccgaacaccgtcaaataatttggcaaactttttatcaaactggtcaaagaaaacctctgtggtaaacgtatcagtcaatgcaattcccagatcgcctcgataaacatctacccaatgttccagccccatgatatttgccatcttgtatccgtatttagccgcatgaaacataaaccattcgtgggcatgcgtcccgattggttttgtatcgtatttcatagccaaatacacattacttgttccgataaaagttcctttacccttttcctgtaatgttttcaccaccagatcctgtactgccgaagaatggcggcggcgggttccgaaatccgcaaactgaatacccaatcctttatatttcgaaattttagcattcaccctttcaataactttgacatcattctctcgctcctgccccgtcaattgatagtacaattcactgatgagagccataacggggacttcccacaagatcgttctgtaccaatagccttcaatagtgaccgacacatcggttccgttttgttcgataaccacttcagcaggatcgtatcggtagccttgaagaaaatcgagatatgtaggatctaaataagggcaattctcctgtaaaaaatctttttccttctgactcaattgtaaagtagtcatctggtcaatagcctgccgtaaatgaatagcaaacctttcaggaaaaggatgttgcccgcgatttatgaaattgtattgagctttagcatacggaaatagtttgataaccgcattttgcatggtaaatttatagaaatcattatcgagtatagaaggtaaaaccgtagtgttgaaactcatgtttttgttttaaaaatacaaataaatcacaaaaaagcctatttgtttttttataatgatccctagaactgctctaaaataaaaaaaagcgagttgccccgctttgaatgttttcacaacggaataatccttattgtgaattgctttaaagttctatggcaaatatagtaaaaagtttttaacgatgttttacggaaaaacgtaagaattataaaaaacttatttataatatgcgatgattcttaaagcattgtgtctttagtaaagaattttattatttttaacatattaaaaagagagacatattatgaaaaaaatattaggattggatttggggactaactctattggttgggctttagtaaaacaagattttgaaaataaacaaggggaaattcttgggatgggaagcagaattattcctatgacacaagatgttttagataattttggagcaggaaaaccatcaaaaacacagacttcagaaagaacaggatatagagggactcgtagattacgagaaagacatttacttcgtagagaaaggctacatagagtgttaaatattatgaattttttacctgaacattatgcaaatcaaattgattttgagaaaagatttggacaattcaagtcggaattagaaccaaaattagtttataataacagagagtttatttttaaaaaatcttttgaagagatgttggacaatttcaagaaacatcaaccacaattattgacaggagaaaaaggaaaagataaattagttccttatgattggacaatttattatttacgtaaaaaagcattaactcaaaaaatagacaaacaagaacttgcttggatactgttaaacttcaatcaaaaaagaggatattatcaattaagaggagaagaagaggaagaaaccccaaataaattagttgaattttattcattaaaaattacagatgtaattcctgatgaaaaacctaacaataaaggagaaacttggtattctttaatattagaaaatggctggatatacagacgttccagcaaaacatctttaggtgattggaaaaataaaacaagagattttattgtcacaactgatttgaatgatgatggctctataaaaacagataaagaaggtaatgaaaaacgtagctttagagcaccgagtgaaaacgattgggggttagttaagaaaaaaacagaacaggaaattgaccaatcacataaaacaattggaacatatatttacgattcattacttcaaaatccaaaacaaaaaattaaagggaaattagttcgtactattgaacgtaagttttataaagaggaactaaaaacaattttacaaaaacaaatagaattacaacctgaattattcaatgaagatttatataatgattgcatcagagaattataccgaaataaccaatctcaccaactaactttaagtaaaaaggattttcttcatttatttttggaggatattattttctatcaaagacctttacgaagtcaaaaatcatccattggaaactgttgtttagaatatagaaaatacaaaattgacggaattgaaaaaaaagaatatttaaaagccatcccgaaatcaaatccgtattatcaagaatttagagtttggcagtggttgtacaatctgaaaatctacaaaaaagaagatgacactgatataacatccgaatttataaaaacccaagaagatctagaaaatctctttgattttttaatgagtcaaaaggaagttgaccataaggatattttgaaatattttttcaaaaatttgaaaggaaaggcacaaaatgaagaaatctctaaatatcgttggaactatgtttatgattctgataaagatgaatcaaagaaattcccgatgaatgagacgggatatgaaatcaataggaggttaaataaaataagtaatatcccatctaattttttgactagagaaattgaacaacagttatggcatcttatttattctgtaacagataaaaaagaatatgaaaaagcaataaaatcattcgcagaaaaacatcatttagacatctcgtcttttgtggaaaatttcaaaaaatttcctccttttaaaagtgaatatggtacattttcagagaaagcaattaaaaaactacttccgttattaagaattggaaaatattggaattggaacattattgatgaaaaaacaaaatcacgaattgaaaaacttttaacaggagaatttgatgaacaaatcaagataattgttcgcgaaaaagcagaaaagaacaagttagaaaaagaaacagattttcaaggattacctctttggttagctcagtatgtcgtttatgatagacattcagaagcagatattgcaggaaagtggaattcggtaaatgatttggaaaaatatttgaatgattttaaacaacattctttaagaaatccgattgtagaacaaattgtaacggagacacttcgtgttgttaaggatatttggcaacaatatggcaatggtgaaaaagatttctttgacgaaatccatattgaattggctcgagaaatgaaaaatacagccgatgaacgcaaacgactaacaaatattgttaccgaaaacgaaaacacaaacctcagaatcaaagccctgctaatagaaatgatgaacgattcagaagttgaaaatgttcgcccatactctccaatacaacaggaaatcttgaaaatctacgaagatggagttttaaattcaaatgtggaagttgaagaagaaatattaaaaatcagtaaaaaggcagagccaacaaaatcggaattacaacgctacaaattatggttagaacagaaataccgttcgccttatacaggacaaacaattcctttaaataaactgtttacgcacgaatacgaaatagaacacattattcctcaaagtcgattttttgatgatagtttcagtaataaagtaatttgtgaatcggctgttaataaattaaaagacaatcagcttggtttggaattcattaaaaatcattacggacaaaaagtttctgtagagcttggaaaagaagttcaaattttcactgaagaccaatatagagatttcatcaaagagaattattcaaaaaacagaaataagcgaaacaaacttttattggaagaaattcctgaaaaaatgattgaacggcaactgaacgacacgagatacatcagtaagtttatttctaatgttttgtcaaacattgttagaaacgaaaaagacgatgacggagtaaattccaaaaatgtaattccgttgaatggaaaaataacttctgaattaaaacaagattggggattaaacgatgtttggaataacttaatattacctcgatttgaacgaatgaatcaaatcacaaatagtaatttatatactacatataacgaaaaacatcaaaaatatttaccaaccgtaccttttgaatatagtaaaggcttccaaaagaagagaattgaccatcgtcatcacgctttagatgctttaataattgcctgtgcaacgagagaccatgttaatttattaaataatcaatcagctaaatcagaaataaagcgatatgatttacaacataaattacgtcataccgaaaaatggaaagataaagacggtaaagaacgagataagtttacggagttcaaaaagccttggaatacatttacagaagacacaagaaactcattggaaacaattgtaataagttttaaacaaaattttcgtgttattaataaagcaaccaataaatatgaaaaatgggttgaaaaaaacgaagaaaagaaaaaggaattggtagaacaaaaaggattgaattgggctataagaaaaccaatacacaaggaaactgtttcaggaaaagttgatttaccaagaattaaagttccaaagggaaaaatacttacagcaacaagaaaaagtattgatacttcctttaatctgaaaaccatagagtctataacagatacaggaattcagaaaattcttcaaaattacttattgagtaaaaacggaaattcagagttagcgttttctcccgaaggaattgaagacatgaacaaaaacatcgaaaaatataatgatggtaaaccacatcaacctatttataaagtcagaatttttgaaatgggaagtaagtttcctttagggcaaacaggaaataaaaaagataaatatgtagaaacagctaaaggaaccaatttgttttttgctgtttatgagcgaaaagagacgaaaacaagaatgtatgatacaattccgttaaatgaagttattgaacaccaaaaactacaagttttacaaaatgtgcctaatatcagtagaaccgaaattccaataaaaaaaactttagaatataaaggtaaagaggttgaagtaagctttttattttcactttctccaaatgatttagtttatatcccaaatggggatgaaaataccccttcaattgattttaagaatttgaacaaagagcaaacggaaagaatttataaaatggttagtagtacaggaagtgaatgccattttactcaatcatcaatatcatctttaataaaaaattatgacgctaaaagtaaaataggagaatttggaagtctaaacaaacaagaaacaacattagataatctcattagaataaaagaaagatgtattaaacttaaagtcgatagattaggtaacatttcaaaaacataagccatgatcaaacggaccctctttttcggtaatccggcctatctcagtaccaaaaacgaacaattagtggtcaattatcccgatgaggaacaagctactaaaaccgttcctattgaagacatcggggttatcgtcatggaaaaccaacagataaccgtgaccaatggattattagagaagctgacttataataatatagcgcttattaattgtaaccaacagcacttgcccatcggattactaatgccactaaacggtcacagtgaacagtcagaacgttttcgtacgcaaatcggagtctcattgcctttaaaaaagaatttgtggcaacagaccgttacagctaaaatcctaaatcaggcaggtgtattacacgaaaaaggaattcctgttaaaaatatgcagcattgggcaaaaagtgtaacttcgggagatacacagaaccacgaagcccgggcagccgcttattactggcaaaatttgtttcctatagaaggttttaaccgtcaacaaaatggtatccctcctaacaatctgctaaattatggttatgctattttaaggggaattacagcccgcgccttggtcagctccggaatgcaccctactttcggaatcttccaccgcaacaaatacaatgcttattgtctggcagatgatattatggaaccttatcgtccgtatgtcgattggatcgtaacggatattgtgaaccaacacggaatcccggaacaactgactaccgaaattaaaaaacaattattaggaatcattaccattgatgttcaattagatggtaagcgaagcccgttaatggtagccatgagtcgaacgactaattccctttacgaatgtttcagtggttcggcacgaaaaattttatatcccgaatatgtatgaagaccgattttcacgacttaatcaataccgtagtttgtggatcctagttttttttgatttgcctacagaaaccaaaaaagaccggcaaattgcaactcgtttccgaaaacatcttttagatgacggatttgctatgttccaattttcaatttatatgcgtttttgtgccagtaaagaaaatgccgaagtacatgtcaaacgattaaagaaccatttaccaccacatggaaaaataggttttatgcaggtcaccgacaaacaatttgggatgatggaaatcttttacggcaaaaaatctgtagaaccagatcaacccaaccagcaattagaattattttagaattagaaaagacgaaattcaggttactaacttcctgaaaaccaactctattttttatttctaaaaaacaccataactcacaacataccaacactttaacaaagggtatgttgtaaatcatagtaaaattagaacttttgaaagcaattcacaacatccggagcatacatcactatcggcttgggttgtaaatcatagtaaaattagaacttttgaaagcaattcacaactagttgctgtggtgtcttcatgttagttgtgttgtaaatcatagtaaaattagaacttttgaaagcaattcacaaccttctgacgatgcctgattagcttcgttttgttgtaaatcatagtaaaattagaacttttgaaagcaattcacaacttaacagatgttcattggaatattggagagttgtaaatcatagtaaaattagaacttttgaaagcaattcacaacctaccttagcaacattactatcataatttggttgtaaatcatagtaaaattagaacttttgaaagcaattcacaacatttatctgaatcaagtaaacaatttagaagttgtaaatcatagtaaaattagaacttttgaaagcaattcacaacttactggaagttctgatacgggaatttcttgttgtaaatcatagtaaaattagaacttttgaaagcaattcacaacatcaagtagacgctaagagtgacgatgttggttgtaaatcatagtaaaattagaacttttgaaagcaattcacaaccgtacctccttgttaacaccatgaagttttgttgtaaatcatagtaaaattagaacttttgaaagcaattcacaacgaacggatttgacaagtgaagataatcttagttgtaaatcatagtaaaattagaacttttgaaagcaattcacaacacttcgttctcagttcctttcagcacattggttgtaaatcatagtaaaattagaacttttgaaagcaattcacaacggaatgttatgcctttatattttgccatttgttgtaaatcatagtaaaattagaacttttgaaagcaattcacaactatgaatgggttcaagcgttccctcaatacgttgtaaatcatagtaaaattagaacttttgaattaaaaactgttcggtcaaaaaagtaaaatgttcaattcaactgcttcaaatcaaaaaacatcctctacaaacctacttttgatacccataaaacaattattggtaatcaaataatgtataaaataaaatttcgctctaccattattataacgtcgtttcttcttattactagctcattaaaaattagtggacaagaaaaacgtatactcattttagatgacaaaactgttgaaatatatgctttttctaatacaactcaacagatttcaaacattagtgctaatttcatcattctgcctgaaaatgtttctttagaagaggaagcaaacaacgatattataaaaaatgaaaaaatagaatttgcaacagactacagtgtttattattatttgaaacttcctgtaaatatatatagtgaaaaacaaaccgttctttttttggaatctattgtaaaagaaacttttaactctgatttcttcaatagaaataaagttcatctatatctaaaagaccaaaagatactttttacctgcgaatatttagaacaattaaacaactactttgccagtatttggactactcggaataatcctaattacgaatgtgataaaaattttatttgcgatattaacaactctaatttaagagctaaaaaaagaaatagtaatactgctgtccattatgaaacggttaaagcgaataaagctctggaagctaaagaagataaagaatttgaaaactctttagaagaattagataaaaaatttcaaatctctttcgctgtcggttataacactatcaataaaaaatacagaacagaatttgaccaggaaacattaatcgactttagtcaactcaacacactatggaacattaatgcaaactacatgttcaccaaaagatggggtggtttactcaatttcggacttatttacaaaaaagaaagtaaaagtcaggaatataaaagtacttataatggcgtaataatctccggtaacggaagcggtgccggaatgtttaaattaggattaggaatacggtacattccttacagttataaaagatggaacattgctaccgatctgtcatacggtatattaaatgctaaggctggaggcggaactggtaatataacggtttatagtggcggaacctatagtgatattgaacgtgtagaaaaagaagaaaagacaaattacgtggatctaactgctaatgtcaattataaactcggaaaaatagtttttttatacagcagtttcaactattccttttctaaatttgataacgaaataggctctgttaaaggctttacaggatatacaatatccctcggattaggatttaattttaattaattacataaaatagtattttttagataaaaaacatttagtaaaattaaacttatactaatgtaaaatttacaaaacaatattcttaattaaatttctttatcttaatattacttttaaataactcccagttgtttttcattcaatagtttagcctcatttaattcctaaactatactacatgaaaacaaaaattacacaactatttttactcttatttaccagtgctttttatggacaaattacacaagccggagacattgcttttgttggttttaatgctgatgcaaatgatgacttagcaattgttacttttcaagacattcaacccaatacaactattattttctgtgactcagaatggaatggctcttcttttggaactgatgaaggtgatttcacttgggattcaggtacaagtattattcctgccggaacgatcattacatttaatgatatcagttctgctttaactccttctatgggtagtattacagtaaataatgcaagtggaatcagcagttcaagtgaagcaatatttgcttttttaggtacttctccacgtacggtaagcactatgctagcagccattgcaaacgacagtgccgctttcggtactctagacaatagcggacttacattaggaactagcgccatcgttttaccaaacggaattgatatcgcagcatacaatggcccgagaacaggattaactcaggcttctttcctggcagctcttaataatatgaactattggatttctgaagacggaagcggtgaccaatctagcaatggttctgctcctgatctaccttttgatatgactgcttttacattaggcactatttcctatccggttgttaattttgataactctctttcaattactcaagaaaatgccggtacagtaactatttctatttcactatcagaagcagctattcaagatagttcaatagacattgaacttaactctggtagtaatgcaactaatggtaacgaatttaatttttcatctcaaacggtaactttccttacaggcgaatctcaaaaagacattacaatttccttaaatgataatgctgtgtcaaatattgacacattctttgctatttcactcagtaatcctaataatatcactttaggaagtaccatccaacatttagtttatattttggacgatgaaattgctgccccgacagcccctaatactctaggattatcttacttaggaagttatttagttgatgcttcaggttctgcagaaattgtagcacacgatcctgctactcaacgtctgtttgttttaaatgctacagcagcaagagtagagattttagacttttccaatccggcttccattacaaacattagttctgttgatatgacagcttatggaatcggagctaccagcgtagctgtaaaaaacggtatggttgctgcaactgtagaagctgcatcacaagccaacggcaaagttgtgtttatggatactaatggtactattaccgatgtggtaacagtgggcattttacctgatatggttacttttactcatgacggaacaagagtactgacggctaacgaaggagaaccaaatgatgattatacagttgatccggaaggaacaatttcaatcattgatgtttcaggaggtttaaacaatattctacaaacgaatgtaactactttaaattttaatgcttttgacagccaaattgccatcttaaaagcaaatggcattcgaattttcggaccgggatcttctgtttctcaagatttggaaccggaatacattacgatttcagatgatgacacaactgcttgggtaaccttacaggaaaataatgcattagctgtcgttaatttaacaaccaatcaaattacagatattattccattaggaaccaaagaccattccttagcaataaatgcttttgatgcttctgataatttaagtactatttttatgagtacttggcctgtaaaaggcttatacatgcctgatgctattgctcattatagcgttagcggaactacttatttagttacggcaaatgaaggtgattccagagattatagcggttactcagaagagattcgtgtaaaaagtaatagttatgttttagaccctactgcttttccggacgctgatttactgaaaaaagacggtaatttaggaaggctaaccgtaacaacagcctcaggtgatacagataatgatggtgattttgatgaaattcacgtttatggaggacgttcttttagtatatggaatgccgcaaccggaacattagtatatgatagtggtagtcaatttgaaaatataacacaagaagatgctacttttggtgatttattcaatgccagcaatgacaataatagctttaaaaaccgtagtgacaacaaaggtccggaacccgaaggtgtaactgtagctgaaatcaatggcaatcactatgcttttattacattagaaagaaccggaggcctaatggtttataatattacgaatcctaataacccgatttttgaaacgtatcaaaacagcagaagtactacttctttgggaggcgatttaggtcccgaaggaattatttacattgctccggctgataactcaagtaacaaaggcttaattgttatggctaatgaagtaagtgctactctaagtatttacgaaatgaataatgttaccttaaatactcctgatttctctactaccggagatcaatggagagcttatcctaatcctgttaagaacggaacagttttctttaacaaaacagctcaaaaactaactgtttttgatactaatggaagaaaagtattagaaaaagaaaacactgattttatcagtttagaaaccttatccaaagggttttacattgtaacaaatgaaaatatggaggctttgaaaatctataaagaatagaattagttagtaaccctctgcagctcctttcttgtttcatataagaaaggagttttctttttttgacaaaataagtctcaatctttgtatttttacttcctaaaaaccaactaatatgaaacttgtatttgcctcaaataataaaaataaaattgccgaaatcaaacaaatgctgcctgctgaaattgaattgttcagtttacaggatattggctgtaccgaagatattccagaaacagcagatacaattgaaggaaatgctattttaaaagccaattatgtaactgaaaaatacggttacaattgttttgcagacgacacaggattagaagtagaagcattgaatggcgcaccgggagtttattctgcccgttatgcaggcgaacaaaaaagcgataaagacaatatccaaaaattactgaacgaattaagccaaagcacaaatcgaaatgcccaattcaaaacggttattgcacttaacctaaacggagaacaacatctttttcccggaattgctaaaggctcaattatttttgaagagcaaggcgaaaaaggttttggctatgatccggtttttcaacctgaaggactgaatgtaacttttgcccaactttcaatggaagaaaaagcaaaactaagccatagaggaattgctacccgaaaactaattacattcttaaaaaatattaccctttaatcgataatacaggtaagctccagttaaagcggaccgccattaaacggaaaatgataataaacaaagaagtaaccaattcgtttacagaatcgtccaatcttaaaaaacgcagtacaaaaaacagaattccgcctacaatacaaatcgtagcataaatagtgccttttctcaacaaaagcggaatctcgttacatagaatatcccggatcaagcctccgaaacttgctgtaatagttccgagtgctatacaaattgtcggatgcaagccatattctaaacccttctcaatgcctattagagtataaactcctaaaccaatcgtatcaaacaagaataaagaaaccctgagtttattcaaataatttctaaacagtattgcaactacacatccccaaataatgatataaacataacttagatcttgcatccatcctaccggcattcttcctatcaaaacatctcgcaaagttccacctcccaaagccgttacaaacgcaatgataaatacaccaaacaaatccagttttttgttgattgctgctaaaaccccggaaattgcaaatacaaaaacccctattatatctaagatttctatcattatttatttttttgcaaatgtacaagatttctatttttctgtctttttatatccctgaaaacatattttccaattaccctaaatacgtctcaaacataattatctaaaaatcaatgactaacaaattagattatctgattaattaaacgtacctttgcacccaattttaaatacatacatgaataaatttgaacaattaggtcttaatgaatcgctactgctggcgataaaagaccttggatttgaaaatccatcggaagtacaggaaaaagcgattcccattttattggaaaaagacactgatattgttgctttagcacaaacaggtacaggtaaaacagctgcatttggttttcctcttattcagaaaatcgatgctgaagacagaactactcaagctttagttctttctcctacccgcgaactttgtttgcagattacaaatgaaatcaagttatattccaaatacgtaaaaggtttacataccgtagctgtttatggtggagccaatattaatgagcaagctaaagaagttaagcgaggtgctcaaattattgtagcgactccgggtagaatgcaggatatgattaaccgaggaatggtaaacattaaaaatatcaactattgtgttttagatgaagccgatgaaatgttaaacatgggattctatgatgacattacctctattttatctgacacaccagatgaaaaatcaacttggttattctccgctacaatgccacaggaagtagcaagaattgcacgcgaattcatgcgtaaaccacttgaaatcactgttggacacaaaaactcaggttctcaaaatgtatcacacgaattttacttagtaaacgctcgtgaccgttatgcagccttaaaacgtttagcagacgcaaatcctgatattttctcagttgttttctgtagaactaaaagagacactcaagcagttgcagaaaaattgatcgaagacggatataatgctgctgctttacacggagatttatcgcaagcacaacgcgatgctgtaatgaaatcattccgtggaagacaaattcagatgttggttgcaactgatgttgccgctcgtggaattgatgttgatgatattacgcacgtaatcaactaccaattaccggatgaagtagaaacctatacacaccgttcaggtcgtacaggccgtgccggaaaatcaggaacttcaatggtaattataaccaaaagcgagttgcgcaaaatcagccaaattgaaaagatcattaaaacaaaattcgaagaaaaaccgattccttccggaattgagatctgcgaaattcagttgttccatttagccaacaagatcaaagatgtggaaattgaccacgaaattgattcctatttacctgcaattgaagaagttttaagcgagctttcaaaagaagaattaatcaaacgtattgtttctgttgaattcaaccgtttcttggcttactacaaaaaatcaagagatatcagtactgatacagcaggaaataaaagaggtgaaataccaactaacggagctgtacgttattttatcaatattggttccagagataattttgattggatgtctcttaaagatttcttacgcgatactctagaattaggtcgtgatgacatctttaaagtagatgtaaaagaaggcttctctttcttcaatacagatgtagagcatgctgaacgcgtgatggacaccatgaacaatatccatttagaaggccgtaaaataaatgtggaaatttccaaaaatgacggaagccgaaatcaaggtcgtagagatcatggtggaagagaccgtaaaagttccggtaatcgtgaaagaagaggaaattctgatcgcaaatttgaaggacgcagagatggaagatcatccggagaacaaaaaggaagaagaagtagtaatcctaataacgaaaaaggcttttttgacaaagcaaaacgctccagaagaagctaggtttcgttaattttaagataaaaaactaagaaactataaaatatctcagtttgattcgtatttttgaa

SEQ ID NO: 1189 - DNA, 24413 bp, synthetic construct
  source 1..24413: mol_type = other DNA
  misc_feature 1..24413: note = Synthetic
ttacttataaatcaataaaattcgtacctttgcacaaacaaatcactaatgcctaaaaaagcactcattacaggaattacaggacaggatggcgcctatcttgcggagtatctcctcaagaaaggctatgaagtacatggtatgaagcgccgttcgtccctctttaacacagatcgtattgaccatctgtatcaggatccacatttggaaaaccgcaatcttatcttgcattacggcgaccttaccgatagtatgaacatcactcgccttatccaagaggtacaacctgatgagatctacaacttggcagctatgagccacgtacatgtgagcttccaaacccctgagtatgtaggcaatgctgatggtttgggcaccttacgtatcttggaagccgtacgcttattagggctaactgagaaaacacgtatctatcaggcttctacttctgaattgtatggattggtacaggaagtaccacaaagtgaaaagacacctttctatccacgctctccctatgctgtcgctaagctctatgcgtactggattactgtaaactatcgtgaagcgtataagatgcacgcttccaatgggattctcttcaaccatgaatcacctatccgtggggaaactttcgtgacgcgcaaggtaactcgcgccctaagccgtgtagccttgggtatgcaagagcgtttctatatgggaaatctcagctctcagcgtgactggggacatgccaaggattatatcaaggctatgtaccttatcctacaacaagatacaccttctgactatgtaatcgctacaggtatcactacggctatccgtgatttcattgctttggctggaaaggaaattggcctcaccatagagttcaagggtgaaggtatcgaggaaaaaggatatatcaccgcggtggataaagtagttttctctgaaaaagtaggcgaaaaatacctcgctcatataaaagaaaaaatagctaaaaatgaagctgtagtattggtggatcctcagtatttccgccctaccgaagtggatttgcttataggagaccctaccaaatcacaaactgtcttgggttggaaacctcagtatgatctcaaatcattggtggaagatatgatgcgttctgatatcaagctctttaagcgggatgcctaccttaaggaaggtggttttactattatgaattatttcgaataaaaaagattctatggaacttactcaaaagctcagacatatcttcatcagtgacttagaaaagtgctctcctcttatggaagaggatttgaaagggttacttaccaatagtaccattccctaccttgaaggcaaagatgaaacagatgtgagggctttttgctttgagtatgaccatgacgacatgtctatttctttctatgccttaggggaaaagagtgaaatcatctcagacatatgcctactccttactgaaagggaagaaaatcactttccttcggataggtatgcctcacaggaggagatcttggaagatcttttatatgaaacctctcttgaggaagcccaaatagaagaccttttaagtgaatatagaaaagaaaaactatctattttcactcattggtttatagctcgctggaaaaatgtaacagaacagctcaacataacgattgatgcctatttctccaaaatcaatgccttctataaaacggatctgaatagcttagaacctatcagcactgaagaaatagaggaaaaatacaacacgtaatataataaaacacaaattcatattattattttatgagaagatttaattttatgtatgctgccgctatgggattgcttacctttggcagtaatctatccgtaaatgcacagacaaaagtgcattattctgagaaaaggttgaaggctgatacctcaaaagcggattttgatgggccttacatcttctacacccagacagaggcagtggtaaaacaaattgttgaaaaaaatcaacaagcgactctggtaagtgagacgttcaagaatcctattgcaggaaaaaaactcacctgttatgtagacaacaaagagcatttctcttttaaagtacaggagctactacagaaccaaccttctgtgtatcaaatgcctgaaaagctcattgctatctctgacatagagggacgttatcaggaattcaagcagttccttatcgccaacaaagtgatggacaaaaactacaaatggacttttggtaaaggacatttggtaactgtaggagacttctttgatcgtgggttgttagtcaatcagaccctttggcttatctactctttggaagaacaagcagaaaaagcagggggaaaagtgcattttatcttaggaaatcacgacctcatgaatatgaagaatgacttccgctacactcgcaagaaataccttgaaaatgccaaacttatgggcgtagaatactacgatttgtacaaacctaatacagagttaggccgttggttagctactaaaaatatcttagaaaagattggtgactatatctttatccatgcaggtatttccaaggaagtaagtgatcttaaccttggagtagagggtattaataagttcgccagaaacttctacttcgataatgtagaagacagagcaggggtagatcctttgcgttctgtagtctatatgcgtggaaaaagtcctacctggtaccgcggatatggtaaagaaactattgacaaaaatgagtttgctgccatcgctaagaatatgggggctaagaagtttgtcatcggtcatacccttcatgagtcagtaacctaccttatggacaagcaagtaattgacttggatgtacttcatgcccaaggaactacccaaggactgctcattgaaaacggacaagaatacatggtggatatacaaggacagaaatccgctatcaaagaacgtgctaaggaagttgatgacgattaatcatttataaactaacaactatgaaaaatcaatttagaatactttcttggttattctaaattgattttttacttatacactattatgaacaaaaatgcgaaaatttatgtagctggacaccgaggtcttgtaggatcggctatttggaaaaatcttaaaaataagggatatacaaacctcataggacgtactcactctgagttagacttgcgcaatacacaagaagtcaatgctttctttgaaaaagaaaagcccgagtatgtattcttggctgctgccaaagtaggaggtatcttggccaataatacctatcgtgcagactttatctatgaaaatctcatgattcagaataatgtgatccatgcagcttatgagaatggggtaaagaagctccttttcttgggtagtacttgtatctaccctaaggaagctcctcagcctatgcctgaggactgtttgcttacctctcctttggaatataccaatgagccttatgccattgccaagattgctggcatcaagatgtgtgagagctataacttacaatatggtaccaattttatctcagtaatgcctaccaatctctatggacctaatgacaattttgacttagagaaatctcacgtattgccagctatgattcgtaagatccacttggccaaagctctccttgagaatgattggcagacaatcaaaaaagacctcaacaagcgccctatcgaaggctatatcacaggagagagcaaacaggaagatattatcttggcacttgccaaatatggtatattcaaggataaagtagtcctttggggtactggcacccctctgagagagtttctctggagtgaggacatggccgatgcatgtgtatttatcatggaacgtatcaactttaaggacacctatactaccgataacaaggaaatacgaaatactcatatcaatataggaacaggcgctgatctaagtattaaagctcttgccgaactgattagtgaagctattggctacaagggaacaatagagttcgatagctccaaacctgatgggactatgaaaaaactcaccgaccctaccaagctacacaacttaggttggaaacatacggtttccttagaaaaaggcgttaagatgatgtacgaacattacctaaaatgaaattccaattagtatccgattttaaacctatgggcgaccagcctgcagccattgcctccttagtgaatggtattaatgaccaagaaaaataccaaacactcttaggggttaccggctctgggaagacttttaccatagccaatgtagtggagcaggtgcaggtgcctactttggttttagctcataacaaaacccttgcggctcagctgtataatgagttcaaggctttcttccccaataatgcagtagagtacttcgtatcctattatgactactaccaaccagaagcgtatatccctgttactggggtgtatatagagaaagatttgtctatcaatgaggatattgagcgaatgcgtctcagtactacctctgccctactctctggccgtcgcgatgtgctcgtggtagcttctgtgtcctgcctatatggtatcggaaaccccttggagtttcagaagaatgtcatctctatagaagaagggcaaacgctcacccgtaccaagtttatgcaccaactcgtacagagcctctatgcgcgcactacggccgacttccttcacggaaactttagggtaaagggggatattatcgatatcttccctgggtatagcgaaacacctattcgggtacatttcttcgggaatgaaatcgaactgatagaatcctttgaccgcgagacaaataagaccatagaacgcttagacaagctcaatatctatcctgccaatatgtttgttacctctcccgatgtgttgcaggccgctatccgtgatattcaagatgacttggtcaagcaaatagagttcttccaatcggtagggaaaactttggaagcaaagcgtttggaagagcgtaccaattttgacctagagatgatacgtgagctgggatattgttctgggatagaaaactattcgcgctacttggacagacgcccaccagggagtcgccctttctgcctaatagactatttccctaaggacttccttatggtgatagatgagagccacgctactgttccccaagtacgcgctatgtatgggggcgacaggagtagaaaagaaaacttggtagagtatggtttccgccttcctgctgcgatggacaaccgccctcttaagttcgaagagtttgaagcgctacaaaatcaggtgatctatgtgagtgctacccccgcagactatgaattgcagaagtgcggaggcgtatatgtggaacaggtcattcgccctactggtttgctcgaccctaagatagaggtacgtcctagcaaaaaccaaatagatgacctcttggaagagatacagaagtgtgtagaggaagaccaacgtgtactggtaaccacccttaccaagcgtatggctgaggagctaactaagtacctaaccaagatggaggtacgttgccgctatgtacatagtgacgtagatacgctggagcgtattgagattatgcaagaccttagaaaagggctttttgatgtacttataggagtgaacctactcagggaaggattagacctcccagaagtatccttggtagctatcttggacgctgataaagaaggttttttgcgctcggctcgttctatgacacaaacggtaggacgcgctgcccgtaatatagacggacgtgcaattatgtatgccgacaaaattaccgacagtatgcgcgtaaccattgaggaaactgcctaccgaagggaaaagcagatgaactataatctcacccacggcatcacccctcagcctctccataaaaagattgaaaatgcgctaagcaaaagccccattacagaatttcattacgagaataccccgaaaaagaaagaacactcccctaccaaacctatgagcagaggagaactcgagaaagagatacaacaaactcgcaagctgatggaagccgcttccaaagaattggacttcattcaagcagcacactatcgagacctactcaaggaacttcaggaaaagcttcaagaaagctccttataggcattgtgtatcagcaaataatcagcaagcaccaaggcagacatcgcctctacgatgggtaccgcacgaggtactacacaggggtcgtgtctgccttttccttggaactgcaccacctcccctgccctattgatcgtctcttgctcttgcataagggttgctaccggcttgaaggctacacggaaatagatatccatcccattggaaatccccccttgtatgccccctgagtagttagtacgagtggtaccatcaggtaggaatatatcattgttttggctacctctttttctagtagaggcaaatccccctccatactcaaatccttttacagcattgatagagagcattgccttacccagctcagcgtgtaggcgatcgaaaacaggttcccccagtcccacaggcacgccttgtataacacaagaaacgatcccccctacggtatctccgtccttgcgtacctctttgatataggcttccatttgcgctgctaatacaggatctggacagcgtacaggattcttttctatttgggaaaaatcaagctgactataatcctcttcaggtaatgataactcccctacggctgatacataggctgtaatttttatgtttttcaggaactgcttggcgatagctcccgccactacacgaacagctgtttcccgtgcagaactacgtccgcccccacgatggtcgcgcaatccgtatttctgttcatacacataatccgcgtgagaggggcgatatagctctatcaagtggtcatagtcctgagaatgttgttgggtgttggctatgataaacccaataggtacccctgtggtctttccctcaaagatacccgaaagaaactgcaccttatcagcttccttgcgttgggttacgatagccgactgcccaggccgacgcctatcaagttccctttgtatttcctcgaagtccaatgtgattcccgcagggcaaccatcaatcacgccacctatagcctctccgtgcgattcgccaaaggtagtgagcctaaaaagattcccaaatgtatttcctgccataatactgtttttattcagatagttttttgtccatgtaggcaatgtacaaagatacatctttcctacaaaatagtcaatgagaatattatttttcccaaaataggattcaactaaaaaagagccttagcaataaattgctttcctttctaaaatatcttctacttgtgtgtccattcttttatcatttaatttcttattagtaagcttattttttatttccaaaataggattttaagtatgcaaaagtatgattacacattgcacacaccacacttacccccactaattatgcgaataactcagaaaaatctaactgagaggcatcatctgagttagggagggttgctactttttccaattgcaaaagaaaagcgtagccctctcggaatttttcttccttttctacttcttttttcctcagacctattatatttactttgtatttcccattagcaataggatacttagctgccttataagctatctgtttttctccctcataggtgagataataataggtttctatggcagtacatccctccaagtccttgtaattccaagcttccaattgctcaaagctaactacccaaagcgccccatcctttatttccaaacaaaatgtctctttagtaggaacaaagtcccattgctcaagagtttgcctattatcacctattgtaaagaaaacttggtaatagtacgaatgaatatgagagatagggataaaagccccttttgctgcaaattcataaaagagaggaggattcttatcgaaataagagagcatttttttagaacgaatcttatgctccttgcattgttcgtggaatagttgcgccgagataatagctataccatatccgctggagcttatgggcttatctgtctgtatcattggctttattattcttatattaaaaagttaagagctgctttgcatttgctaaaatataatctcctatactaccaaacacttttaaaccctctttctacaaattttttctttagctcccttgtcatcaacttctttttatcaggagttttacaatctgaaattctcaggttgaccaagtttgggaggtctaaaattgcctctgcgttagttacattcttaccatatattagcgtaatttcctttatctgaggaacctccaagaaggcactacaatccgtatcacaataggttgagttgatccaaatagtttgtaacttttttaatatgccaatacccttaaaagtaaaagaatcttgtgcactccctaaatctaagctttctaaagtattactaaaaggagctaaagattcaaaaataggtgttttcacaggagcaaatgctaaatgctttatagtagaaaatgcttgtaactgcgccaaaaaagaacctttatcatcatttccaaactctacatattccaaattaggaaattgctctggtgaaagctgaatatactcttctatagatttagaatttgatagatgaagtatccttaaaaaaagtagattttctaacttcaaatcttttaagagtttatccttttgaaaaatctttttatttcttttaaaaaagtcattaaacgcactttcatttataatcttcaaacttctcaaagactttggaaatgacaataattaaatcttttccatataaatagcaggaaacgatagtgtatgcagggaggtcattcttcctaactccctttgtaatacctcaaaactacgcccttcagaataacttacttctaaataatgtattttgttcagcacctcaagaggaattggcttatctatatctatgagttgataataatttttatcactcccttcatagtactcttgctgtgtttctaagcaataaacattctctatgtcaaattctcttggaattgacttatacttttttgtaatttcacttattataagcatatctatataattctcttgtttgtattatactaagttctctttatataaaaaagaaaaatccttctttactaactttatccttctatcggtctgatagtaacttcataaagctgctcaaaaagctgttctacatagctggcttcagccttacgcacctctacaaggagcgtacagttcagttctaaggtctgggaaacaacagtcaggttcctatccttgatgattttcatcaccttattcatatccttataatcaaagacaatttggtaagtaaggtcaatggtgcgttcctctatctcagcctcttgaagagtgagctgagcggtggttttgtaggcggtaataagtccgcccactcccaacttgatcccaccaaaatagcgcactacaatcagtaggacattggtcagctcaaaggattgtatctgcctatagataggtagccctgccgtgccgctgggttctccatcatcattcgctctataggtaaattgctctttgcccaactgataagcatagcaccaatgtcgtgcagaaaagtgttctttctttatggcctccaagtgcatttttacttcctcttcggtagtaatagggtacaaataacctataaacttactacttttatccttatagataatgttagtaacgggttgagtgatggttttataggtatctgtcatgggaagtgaagaatgaatagtgaaaggtgaaaaataaagtgcaaagatataaaaacaacccctatattactataggggctcctttagatgttttcacaacggaataatccttattgtgagttgctttcaaatatgggacaaaagtacaactttttttctaaataacaaacttaaatatgaaatttttttattaaatttgtagcgaattaaacttattaaatatatgaaatacataaaatacatattaggattagacataggttccaactccattggttgggcgcttattcagctagatctcttgcaaaaaacaaaaagaattattgccgcaggaagtagaattatccctatggatcagaaagttttaagtgattttggaaaaggaattactatttctccgactgctcaaagaacctcctatagaaatgcacgacattgtcgagaacggcatttgctacgtcgtgaacgtcttcatagggtactccatattttaggcttcctgcctactcactatgataagcagattgatttttcaaagagatatggcaaatttgtagataatacagaacctaaaatagcctataacgaagggaaattcctctttatggatagttttcaagagatgttgagtgattttaaatcacatcagcctgacttattctatactaaaaagaatggagaagaaagcaaaattccctatgactggacaatttattaccttaggaaaaaagcactttcacagaaaatcagcaaagaagagttggcttggattattctgaacttcaaccaaaagagagggtattatcaattacgtgaagaagagggaaataaggagaatgattttgagattatttcctcaaaaattatatctgttattaagaaagataaagataaaaaatataataagtattggtatgatataattttagaaaatggattggtataccaagctgctttttataatgattttgtatataactggattaatcaggatagagaattcataatagaacgaacttctttaaaaaatggggctgaaaaagtaaaactttcatatctacctacttttgatgaaattgataagatggataagaaagaacaggataaatactacaaaaagataaaaattaaaaccgaaaatagtattggaaataaaacagtaggatgctatatctatgatcatattctgcaaaaccctaatgaaaaaatcaaagggaaattagtccgtaccattgagcgaaaatattacaaagaagaactaaaggctattttagaaaaacaaatagctctacagcctgaactatttacagatcaattgttagccgattgtattcgagaactctatagcaagaatgaagcacaacagcgaaatctcgcagcaagagatttcgtacatttgtttgtagaagatatcatcttctatcaacgccctttgcgccgtcagaaatcaactattgctaattgtagcttggaatctcgttcctacatagataaggatagccatactcgtaaaggagcccctttgaaagtatgctccaaatctaacccttattatcaagagtttagagtactccaatggttgcaaaacctcaaaatatacgagatagagagcgatcaagaggtaactcatgaatttataaagaccttagaagacaaacagcaactctttgattttctaatggctcaaaaagagattgattgtgaggaattattgaaatatttcctcagcctaacatatccaaatgccaaagaaaaagcactaaagagtgagctgaagaaatggaaagatacttatcgctggaactatgtatatgatataggagaaaaatcgtctaagaaatatcctatgaatgagaccagatatgagcttaagcgatatttagaaaaagtagccaacttgcctgatgatttcctttcctctgaagtagaatacctactatggcatctgatctattcggttactgataaggtagcgtatgagaaaggtctaaagaaatttgctcaaaaacatcacttagatgaagactcttttgtagagagcttcaaaaaattcaaaccctaccccagtgaatatggtagtttttctgaaaaagctatccgaaagttgcttccactgatgcgctttggctcttattggaacttcaatcatatagataagaatactcaaaagcgtatagacgaccttattacaggggtagaaaacgaggaaatacgcactatccttagagaaaaagctgaaaaatatcagcttgagaaggaaactgatttccaagacttacccctttggttagctcaatatattgtctacaaccgacatgctgaggcttcctctcttgagaaatggacttcagtgaatgacttggagacctaccttaatgagttcaagcaacattctcttagaaaccctatagtagaacaggtagttacggaaaccctacgtgtagtcagagatatttggcaacaatatgggcaaggacaagccgatttctttgatgagattcatatagaactcggaagagagcttaagaaaactgctaaagaaagagaagaactatccaaacaaaaccaaaagaatgaagataccaacctgcgtatcaaagcattacttgcagagttaggtgaggatagtgctatagagaatgtacgtccctactcacttatgcaacaggaattactcaaactatatgaggaaggcgtatttagttcctctatggagattgaagatgatataaagaaaatacacaagaaagctactcccagcaaagcagaattacaacgctataagctttggttagaacaaaaatacaagtccccttatacaggacaaatcatctctctgaaaagactcttcacggaagattatgaaatagaacatataatcccacaaagccggtattatgatgatagcctttccaataaagtaatctgtgaatcagctgtaaataagctcaaagacaatcagttaggattggaatttatcaaaaatcactatggcgagaaagtacatgctgccggtaaggaagtaagtatatttaccgaagaacaatataaggaatttgtcaagaaccactatgctaataactcaggaaaaatgaaaaaacttctcttagaggatattcctgaaaagatggtggctcgccagatgaacgatacgcgctatatcagtaagtatatttcagaaatactctctaaaatagtacgtgcagacgagcgagatgaaggcgttaattctaagaatgttatcttatgtacaggtaagattaccactgcgcttaagcaagattggggtgtaaatgatgtatggaatgaccttattttacctcgctttgaacgtatgaatgaccttacccagacctcactatttacctcctataatgaaaagtatcaaaaatacctccctactgtacctatggaatatagcaatggtttccaaaagaagcgtatagaccaccgtcatcacgctatggatgccattatcattgcttgtgctaccagagagcatattaactatataaacaaccaacatgccttagagaaaggaaaagataaaaaggaaaaacaagaaaaacgtgatacacttagagaaagactttgcataaaaaagtataataataaaagtgaaggaaactacaattgggtattcaaaaaaccttgggatacttttactcaagaagtacgagctgccttagaaggtattgtagtaagtttcaagcaaaacctacgtgtgattaacaaagccaccaactattatgaacgttgggtagaagaaaatggtaagtatattaaaaaaatggtcaagcaggagggtactaactgggctatccgaaaacctctgcatgaggaaacagtttctggaaagattaccttggaaagagaaaaagtaagtaaaggaaaaatcctcacagctactcgtaaggctatagatagtacctttacagaaaaggtaattgaaggtatcaccgatacaggtattcaaaagatattgctcaactatctcaagtttaaaaaaagccctgaaatagccttctcgccagaaggattagaagagctcaacaaaaatatctctctctataacgatggtaagcctcacaagcctatccgtaaggtacggatttttgaacaaggtagcaaattcccattaggagaagtaggaaataaatctcaaaaatatgtagaagcggctaagagtaccaacctatattttggcgtatatcaaggaaaagacaagcgttctttcgcaaccattccgcttaacgaagtgattgaacgacaaaaacaaggactctcctctgttcctgaatataatgaaaaaggagatcccttactctttagcctctctcctaatgacttagtatatgtatctatcgaaggagaaatcatagaagatattgatttccgaaacctttctaacgaacaaaaagaaagaatatataaggcggcaagttttacaagaaatgaatgcttttttataaaatcaagtatagcttcccttatcaaaaactatgatgccaaaacaaaaattggagaattaggtagccagaataaattggaagtaactatttgtaaaggtataagaatcaaagaagtctgtatcaaactaaaagtagaccgtttaggaaatattagtaaagcataaaaagtttaataacaataagctatgttatatcgttccttttttattcccaaaatagaataaaatagaaggttttttctttttgaacttttgtaataacctacagacaatcaatctctttaaaagattgaggttgtttgaggtcacaaaattacgaatttgaaagcaactcacaacaggcgttcacattctatttcagtgagccttgttgtttgaggtcacaaaattacgaatttgaaagcaactcacaacttgttgctctttctccattatctctatgaagttgtttgaggtcacaaaattacgaatttgaaagcaactcacaacatggaagccattggaatcttttcatctttggttgtttgaggtcacaaaattacgaatttgaaagcaactcacaacaattatagactatgcgtctgccagctgggttgtttgaggtcacaaaattacgaatttgaaagcaactcacaacgcatattcaccccataagctgccagcatatgttgtttgagatcacaaagttacgaatttgaaagcaattcacaacttttaaaatatttgtacaaatattttaaaagttgtatctttgcaaagtcaaattaaaaagataattaaaatgaaaagtattttaaaactaagcttaattcttacattcttggtaggatgtaatggtggtactccctctgtattttctccttcttataattctgtaagtgattttgaaggggagtatatagcctacgatgaagatggaaaaatcctatatggaggaaaaccattcgccaaggttgaaaaatttaataatgattatcactttgttgctttagctgatactctcaaagattttaatgtgcaaccagttctttctatgattgaaaaagaagtcatagaaagatcctctaaaaaaattccaagatatgaactaaatatatcaggagtgaaaggtaattatgtatttctatgcaagataaaaaagggagaaaaattctattataacaaaaaaacggctcctactaattttatgttggatttaaactatgtagactattcaaaaaccttcttcatagaaaaaaataatacaaaataataattataatacacatattaaatataatacattaaaattaattagccatgtttcaagataaattaagaaatgatatagatacctggttctattataacagaccaggtttcgaacccagtagagagtttattgataatatcatcaataatgaactaaaggatgaacttgtagacctggaaacaggaaatatgaggattatcctaagcgagtatctacgtctaaattatggaagcttagctttcgagattattcaggaggttttgggagaggatgaatttgaagagtaccgaaatttccttgataatttaataccttttgtaaagcaaggggatatggaaatgctcgtcaatagagtagctcagagacgaattattgagaagtatggtagtgaactaaaggatttattagataaccaacctctttatgaagaaatcagggaggtaattagggaagtaatgaaaacctggaaagacttcgatgtataagatattgtttttcttttatgcagcagataaaagtaagggagctttaagctcccttatttaatttcactaaagattttattgtacatataatagaaatagaaaaaccttgttttactcccacttactatcctttttatcctgtttggaaaggctataaattcctttattttattgtttgagtgggtaatagtagtcttatacttttacacccatattagtagtttttttcagatcaaaaagttacgaatttgaaagcaactcacaacggcaggaggatatggaacggcactttgatggttgtttgaggtcacaaaattacgaatttgaaagcaactcacaactgtttggttcagtagatagttccttttcttgttgtttgaggtcacaaaattacgaatttgaaagcaactcacaacactgcttaccaacttggaacgtacagggctgttgtttgaggtcacaaaattacgaatttgaaagcaactcacaacgaattggagtgcgaaagctcccttaatagtgttgtttgaggtcacaaaattacgaatttgaaagcaactcacaaccagggtgtttttcgatttctaggactaatgttgtttgaggtcacaaaattacgaatttgaaagcaactcacaacgatatacgccgttcctaatggtggcagtcggttgtttgaggtcacaaaattacgaatttgaaagcaactcacaacttcaatataaacgaactcaaatttggcgaggttgtttgaggtcacaaaattacgaatttgaaagcaactcacaacactgctttggctattcttatctgtgaaatgttgtttgaggtcacaaaattacgaatttaaaagcaactcacaactgcggtctatctttgcctgcaagccgtcgggttgtttgaggtcacaaagctacgaatttgaaagaaactacaaaaagaaactatgtaagaaacaactcatggtatcttacatagttagatgatagatgttttgattcttgattggctctatttattacctattccctatctacattctaatcactacgcttccccaggtgaaaccactaccaaaagcagctaagacaagcaaatcattttccttgacacgtccttgttccaccgcttctgctaaagctattcctatagacgctgctgtcgtgttcccatatttctgaatattgttgaacacctgagcatcagaaagtttgaatttctgttggataaactgggatatacgcaagttggcttggtgggggatgaatagatctatatccccttcagtaaggttgttagccttaagcccctccataatcacttctgagaaacgtactacagcattcttgaagacaaactgtccattcatataagggtaataggaggtatcttctggatcattttccttgataagatcggtaacccacttcttccctaccccaggggtaacgatagccaattcctctgcatgcgcaccctcactgtgtaggtgtgaagagagaatacctttaccttcctgggtagtgcgagagagtaccacagctcctgccccatctccgaaaagtactgccatattgcgccctcgtgtggtgaggtctaaggcaggcgactgcatctcagaagctattaccaagatattcttatacatccctgttttaataaactgatctgctactgatagggcatatacaaagcctgaacattggttgcgtatatccaaagctcctatggtaccaagtcctaactctttctgagctaaaaccccacaaccagggaaataataatcgggactaagggtcgcaaagataagaaaatcgatatcttctttatttattttcgctttttctatagctctctcagcggcacgtacccccatggaagtagtagtatctttacctcgtgtagcaaatcgtcgttgttctatccctgtacgctctctaatccactcatcggaagtatccatcagcttagagagatcatcattggttacaatattttctggcacataatagcctgtgcctatgatagttgaattatacataagttatttaacattaaaaagaaagccttgataacaaggctttctattacaatatgatacttggttactttagtacttcttttactttgtcagctgcttcttggaactgaatagctgaatgcacagccaatcctgatttgtcaataatctctttagcaatctctgcattagttccctgtaggcgaacgataataggcactttaatatcagttcccatattcttataagcatctacaataccttgtgctacacggtcacaacgtacgatacctccaaagatattcaccaatattgcctttacatttggatctttcaggatgatacggaaggctgtttctacacgagcggcatcggcagtacctcctacatccaagaagttagcaggttctcctcctgcttgcttgataaggtccatggtagccatcgcaagaccagcgccattgaccatacatcccacattaccatccaagtctacatagttaagacccgcggctttggcttctacctcgataggtcgctcctcacgagtatcacgcaattcggcatagtccttatgacggaaaagagcgttatcatctatggtaactttggcatctaccgcaagtattttattatcagaggttttgagcactgggttgatttcgaacaaattcgcatcagaagtgatataagctttgtatagagaagttacgaacttgaccatttccttgaaagcctctccttccagtcctaaattaaaagctacatttcttgcttgaaaagggagcaatcccaattctgggtctatctcttctgtaaagattaggtgaggagttttctccgctactgcctctatatccatacctccttcggtagaatacataatcatattctttcctttagcacgattcagtaggatcgacatgtagtattccttaggctcgctttctcctgggtagaatacatcctcagcgataagtacttggtgtactttttttccttccttaggggtttgtggagttaccaaatgcatccctatgatttgggaagaaatttctttaacctgctccaagttcttagcaagcttcacgcctcctccttttcctcgtcctcctgcatggatttgagcttttactacataccattgtgttcctgtttgttctgtaagcttttctgctgctttgacagcttcatcggctgtagtggctacaataccacgctgtacacgtacaccgaagcttgagagaatttcctttccttgatattcatgtaaattcataatataactttaatttgtagtggcaaatgtacaaaaaaaatatgacatttccatgtttttttcatattttttttctcagtccttttttccttagaaatcagtcttgtgtagagagttcttttaacaattctcctaccaaggcatagatctctctgtaggaaagttcttccttgctcatatagagcaacgccaaggagtaggtacgctctgtagagagcagcaccttctgatggcgatagctctcccttatcaggcgcttcattctattcctatccactgcttttttcataagccttttaggaacactgatgagcagttgggtaggttgtgtagagccttctataggggtatataggagcttcaatggatattttttcaatacctttgcctctcggaagagcttgtttaccctatggtaattacacaatctttctgccttggggaagatatttcttttttcttttagagaaaccattttatttagataaagtcgcataagcgagtatgtgagtaaaaaacagccagtattcacagctgtatatgcaataacaggtaacaaacaaaaacactttgcccattacctgttattttatctttttatactatattaggcgttttcttcttcctcttctttccctgtaagaagtcggaaaccttcgccatggatatttacaatttctacattctcgtctttcttgagatatttacggagttttgctatatacacgtccatactacgagaagtgaagtaattgtcatctttccatattttgttcaatgccaactcacgaggcatcaaatcattttcatgaagggctaataggcgcaatagttcattttctttaggagagagttttaggggttcttcatctctgtagcggaggaaacgaagcttagagtttaggaaaaagtctcctatttggaattcgaattttttgctatctattactgtatcaattgactttctttggagcattgcacgaatcttcatgagcaatacttctgaatcaaaaggcttattcaagtaatcatcggctcctgatttgtatcctttgatcacatcctcacgcatagttcttgctgtaaggaaaatgataggcactttctcattcttttcacgaatttccttagcgagggtaaaaccatctttgtaaggcatcataacatcaagaatacacatatcataaggatccttgcggaacttatcaaaaccttccatcccgttcttggccaaagtaacatcgaagccactcatggataggtaatctttcaatacggtcccaaagtttgggtcatcttctacaagaagaatttttttattaactgcttccataattttcaacatttaaaaataatatatttttttacgtttatacaaaatttcatttattagatgataaggggcaccttgatcacaaacgtacttccttttcctttttcactctcggcatatacttccccatcgtgatattttacaatacgctttacataagcaaggccgagtccatgaccttttacattgtgcaaatcgcctgtatgttccctgtaaaatttttcaaagattttcttcagtacagccttgctcattccctgtcctttgtcctgtatacggatcaccaatttgttatgagcaatttctgtaaagacatctatatctggcgcctgtggtgagtacttaatagcattctctaatatattgacaatcacattggtaaagtgcatttcattggccaatatatctgagttttctgcatgtaagtgcttcttgatctttcctcctctatcatcgatcagtagctgtacatgagcgatggcattgtctatcagctcatgagcatccagtggctctttttctatttctacttggttcttgtcgagctttgagatctgcaacacattttccacatgggcatgcatacgcttattctcatctcggagcattttcagatagaaagacattttttcagtatccttcatcaccacagggtttttcatcgcatccaaagctaaattgattgtggctataggggttttgaactcgtgggtcatattattaataaaatcagttttgatttcattaatctgtttctgagtacgcatttggataaaggtcttggcaaatgcccagatgataattgctgtaaaaatacatacccaaatagccattacgataactgaggatagcagatagcgttgcttatcagggaaatgcacctttagctcataatgagattctccttcttggtttctgaacaagggtatggtgtacatattccttgctgaagggttgaaccttgaactagcaacagaggttttttccttatctacagaaagagacttatcatatacggcaaattcaaaatctaagttcagccctctgtttctaagctctctctctatgagtatctccagctgtgaagctgttatcctattctctatagagagtttcactgaaacttcccgaaagagttcctcgaacatggctttgtcaaaggaggtaatgcgacctgttttttccttaatggtggtactgctgaatcgctgtccgtctaaccctttactagggccaaaagtacgagaggtctgtcggcttacataattgcgtatctgagtagtatctcctttaggcaaattgaaaagctccgaaggtacggtatacccttcctccaatacttgatgcttgtaagtgaatgtctcctttgtattcttattctcttgaacaaaaaccaaatcacgaatctgtgaggatttcaaagaacctaagctatctttccctttcaattctatgaatcgggtgatatacttatttatttccttcagttctactgattctgaaactgaattcaaagcctgtttcaccgaatgggtaaaagcttcttctttattatctatagaacccttaacccaataaaactgaatagaaataagacctataagagctataggcattaatattaaagtaacaatataacttctcttattcatcaggcaaaattataattattttttttatataattcatttttaacaacgtttaactttttggttaatttcttacattttcagctgtcattttcactattttagaatgaattatttcgattttatccaaatttttatcgatttctctattttcaataacaaatgttgataattctatttttttttcatcattccattgattttttattcttttttctaccgtttctctatcaatcttatcacgaagcataactctttttattcgctcttctaatggagcggttaccataataataaaatcacaatctcggtaggagccactctcaaagaggatagctgcttctttgatcacatagggcgcctgctgggattgcttccattggaggaagtcctgctgcacataaggatgtattatagcattgagtttgtccaatttttctttattagaaaaaacctcttgagctacaaaggcggtattgtaccttccctccacaaaggcttcttctcctaagagggcgactatttcctgctgtagttgcttgttattcgccacaagttcctttgccttggtatcggctatgtatataggtatagaaaagtgtaaggcaaacagattggctatagttgtcttgccactacctatccctccggtaagtcctacagttgctatcattcgtgtattataaggtattctacttctttttgttcggtaaaattcacgttcaaggatgtgggtttcttccttacctccaatggtatatatctatctttacgctgattataatctgctactatagtaatgtccgttggcttgagattgcgtatggtctccacatctcctgtaagtaataggggtacttcttctggaaatagcttcacttctacggagaagggctggtgtatgagttgcaccttggccttaatttcttgctcagttacatgtaccatttgcagggagaaggttactttatctgtatcataatgcagcttaggggtatcagtaatgcgtatttctcctgaataagaggcggttacattcctcttgtatttcttctgtaaatagactcctgtgatggtatccaaatccgcagccaaaccactcactacaaccgagtcaggaaatactttataagaatctacttgataatcctcttgtaaagttcctgaaaattgtaatcttacaggcaccttcttctgttttatctttttcaaatatatttttatagtatctggctgtatttcttctattctcacatctggaaaatactgcctattaagctgctgttttagattttctgtaaaaacatacttatcttttcctacttttttcaacttgtgtactgagagggaaaccactgggggcgaaaaggtatatttgaacaaagaaaaacctactcccctgagttttacttttattgtaggagatgcctccatctctacaaatctctcagtaggcacttccatatagcgtaacttaatagtatattgctgggtcgcttccttggataactttcctaccaaccaagtaagtgctgccaagagaatacagaaaagtatccctatagttcgttttgaaaaaaaatatctattgagtttcattgtggcaaaattataattttatttttaaaaatacaaaaaaatttcctacttttttacacaaaaaaatacactttgtaaaaataatcttacaaagtgtatgcttagtttttatatagatttaggcttcagcctcttgtgaagctacaggggcttcttcttcgaggaatcctttgtcaataagtatgttataccattgtataatcttctttatatcactgggatataccttatcttcatcataattaggaattacagagaagaaataagcttccaattcatcctctgttgccttgtgagaaacggctgttttttgaccattctctttttcttttatggctttgaatacttcttcaagaggtttctctccttccaaggtataaatagcaatttctgagagcagactcacattgttgcgaagtcctatactgatacgcttctggtcaagaagagaaagagctaagaatcctgaacgagtacgagattgtaattggtaaagacctggtttgcctgaaatagttaatatctgatttaacttcatgtgtaattat

SEQ ID NO: 1190 - DNA, 24410 bp, synthetic construct
  source 1..24410: mol_type = other DNA
  misc_feature 1..24410: note = Synthetic
tgtaattgaccttgtactttatgtatttaaatctctaggttttgaagactttactgcacaaatttctttaagagatcctgaaaaccgcgaaaaatatatcggtacagacgaaaattgggaaaaagcagagagcgctatcattacagcagctaataaaaaaggtcttaaaacagttgttgaatatggtgaagcggcattttatggtcctaaattagactttatggtaaaagatgccctaggtagaaaatggcaactaggaaccatacaagtagactataaccttcctgaaagattcgatttatggtacacaggatccgataatgaaaaacacagacctgttatgatccaccgtgcaccttttggatctatggagcgttttatcgctatcctaatcgaaaataccgcaggagacttcccattatggcttagtcctgagcaatatatcatcttgccaattagtgaaaaatatgtagattatgcgaaaaaagtttcgcaattattagaaaatcacgatatttgcggactgatagacgagcgtaacgaaaaaacaggaagaaaaattcgtgacgcagagcttaagaaaatcccttacatgctagtagtgggagaaaacgaagaaaacaatggtagtgtttctgtaagaagaagaggagaaggagacttaggtcagatgtctatagatgatcttgtgaaacatatcaataatgaaatcgctaaccaattaaataagtaataccatagcactaagaagacccaacaacagacctcctatgcgtaagcaagaagatgcgcatatgattaacgaaaaaatcagagcgaaagaagttcgcttggtaggtgataatgtagagccgggaatatatcctgtttccgtagctagaaaaatggctgaagagcaagaactagaccttgttgcaatttccgacaaagtagaaccttatgtttgtagaattttagattataaaaaattcttgtacgaacaaaagaaaaaacaaaaggaactaaaagcaaaacaagtaaaagttgttgtaaaagaaattcgttttggtcctcagactgatgatcatgactacgaattcaaaaagaaacatgccgaaaaattccttcaagaaggctctaagctaaaaacttatgtattctttaaaggtagatctatcatcttcaaagatcaaggagaaatccttcttctaaaactagctcaagaattagagcatgtaggaaaagtagatcaacttccaaaactagaaggtaaaagaatgattatgatgatgagtcctaaaaagaccaagtaataatcttcaatatccataccctataagagaggttttcaacataaacctctctttatttgcatcattataaatatttttcataattttgcaaactcgaaagaatattgataacacaaaataaaaagcaaaacaatgcctaaattaaaaactaaatcaggagctaagaagcgttttgtacttaccggttctggtaaaatcaaaagaaagcatgcttacaaaagccacatcttgactaaaaaagaaactaaacagaagagaaatcttactcagtcaggtctagttagccaagtggatacaagaagcgtacttagacaattagcaatcaagtagtttttataaatctcattcggtttataaggattcaaaaatcatttaaaagttaaccctgaagtggagcaaataagagtaaaataattaccgccctcttcaaaaaaacaaatttattatgcctagatcagtaaacgcggtagctagtagagcacgcagaaaaaaagtattgaagcaggctaaaggttttttcggtagaagaaaaaacgtttggactgttgctaaaaacgcggtagaaaaagcaatgcaatatgcttaccgtggtagaaaagaaaagaaaagaaatttcagaagcctttggattactcgtatcaacgcgggtgctagagagcacggaatgtcttactctcaattcatgggagctcttaagaaaaacaacatcgagcttaacagaaaagttcttgctgaccttgcaatgaaccaccctgaagctttcaaagctgttgtagatcaaatcaaataagtaaataatttctgttatcaatagaaactctcagtttttctgagagtttttttttatatttacagcaaaattaactaacagaaaaatgaaaaactcagtaaacagaagagactttttaaagactacttcaatggctggattgggcgctctaattccagctcattctctatttgattcttctagcttcaatgctaaaaaggtaagaataggctttatcgcagtaggcttacgtgggcaaactcacgtttacaacatggccaaaagagatgatgtagaaattgtagcttttgctgatccagatcctaaaatggtagaaatggctcaaaaaatcttaaaagataatggcaagcctgctgctaaagtatatggaaatggtgattacgattacagaaacttattaaaagacaaaaaaatagatgctgtctttgtatcttccccttggaactggcaccgtgcacatggcgtagaagcgatgaaagctggtaaaattgtaggaatggaagtttctggagctatcaatatggatgaatgctgggattatgtagatacctctgagaaaacaggagttcctttaatggctcttgaaaacgtttgctacagaagggatgttatggctgttcttaacatggttagaaaaggaatgttcggagagttagtacatggtacaggtggctaccaacatgatctaagacctgttcttttcactaaaggaaaagacggaaaaggagtagcttttggtgaagatggatacagcgaatctaaatggagaacccaacaccacatcgatagaaatggagatctataccctacccacggtttagggccattacacaccatgatggatattaataaggggaaccgattggtaagattatcttctttcgcttctaaagcaagaggacttcatcaatatattgtagataaagctggtgaagatcacccaaatgctaaaatacagtggaaaaaaggagatatcgtaacaactactatccaatgtcacaacggggaaactatcgtccttacccatgatgttagcttacagagaccttataacctaggcttcaaagtacaaggtaccagaggactttgggaagatataggttggggagactttaaccaaggatttatctatttcgaaaaattaatgaaccacagccacaaatgggaaagttctgaaaaatggatgaaagagaacgatcacccaatgtggaaaaaatacgaagaaaaagcgaaaggagctggtcacggtggtatggattatttcttagacaatacatttattgagtgtatcaaaagaaacgagccattcccactagatgtttatgacttagctacttggtacgctattactccgttaagtgagaaatctgttgctgagaatggtacagtacaagagattcctgacttcacgagaggtaaatggaaaacagctaaaaatatatttgcaattaatgaagactactaaaaacgcgactttacttgtcttagcaggaggcttaggcagcagatacaaaggaaaaaaacaaatcgaccctatggggccttctggagagtgcttaatggaatactccatttacgatgctgccagagctggatttacccaattggttttgattattaatgactacttcaaccaagaaactaaagatcattttcaacaaatagcggataatgcaggaatacaattggacttcgtggtacaaagattaaatacaaaattaccaatccaccacgaagacaagcttgaaaatagagtaaaaccttggggaacagggcatgctattttagctgctaaagatgtcatcaaaaatcctttcgtcgtaattaacgcagatgattattacaatcgtcacgcttttgaaaaagcatatgagctaattgctagcgacaagattaacgaacaccaatacggtatggtttcttatccgttatctgctactttaagtgaaaatggaagtgtttcaagaggagtatgtacaattaacaacggccaacttgtaaccgttgtagaacataccaacatcaataaagaaggagataaaattatctgtactcttgatgataattctaaaaaagaattagctcctgagactttagtatctatgaatttctgggtattagatccttctatcttcaacgtgctagaaagaaaattcgaccagtttttatctaacctaaaatcagaaaaagctgaatttttcattccgtttgtaattgacgaaatggttcatgaagaaggtttaaaagttgtggtggaaacctctaaagacaaatggtttggggttacctatcctgaagacaagcaacttgccatcaattctattcaagaactcgttagcaatggagtgtacccttcagctctttggtaacaaaaatgaattacagtacaatactcaatacatttattacaacccaagagagtgataatgtgtccatccaagcaattacggatggacatattaacactaccttacaagtaagtattcttgaaaacggagatactaagcactatatccttcaaaaaatcaatcattatattttcaagaatcctaaagcaattatgaattccattgaagtggtaaatcaacacttacaccaaaatggatatccttatgaaagattagaaactatccccaacctaaagggagagttactaagcattgatgaaaacggaaattattggagaatgaccaagtatatcccgaatacttactgtgtaaccaaggttgaaaataaagagcaagcttatgaagctgcccaaacgctaagcgttttttattcaaaaattttagatttaaatccagagttaattgaatcttctatccctgggttcatcgattttgaaaaaagaatcaacgattacaaaaaagcgctggaagctgctagtgatagcagaatacaagaagcacaatcagaaatagatttcattaatctacatctggatttgcccaatcgttttgtagaaaaccagaaaaatgggaatttcccgcttcgagtagtacatgcagatcctaaaatcagtaatgttctatttgataacgattcccataaaggtcgttgtgttatagatctagatactcttatgcctgcaacaattttatatgacttcggggatatggtaaggtcatataccaatctaagagaggaagacgaccctattgcagacaatatttttagtaaagaatattttgatgcagtaaaagaaggtttcctttcccacacttcagaatccttaactgattttgaaaaacaaaacttagactatgcaggacaagttgttgtctttatccaggctgtccgtttcttaaccgatttcctagataacgaccaatactacaaaataaattatcctacccacaacctagacaggactaagaaccaaataaatcttgtaaaagaattattaaaactagaaccagctttataaaaagctggttttttctttaaagtgctaaatacttctccaacaactgataaaattttcctaaatggaaaccatctaccaatccatgattagcttctatagaaacaggaagccaacactcaccatcttgccaaaaatatttcccaaaagataacttagggatactatctcctgtattaaaacgagtaggatgtaagatagccgtaaaactaacccatggtactgtagtacaacgaaccaaatctaccttccctttttctacattttttcttaatcctttgctattttcaacttcagatacctctgcttttaaattttggtaaaagatttcaaaatcctcatcataatcaaacctagcgaaagcaaatgtagtatcctttcttcctatagttgtcccacaatgtatggtctctaactcataaacctcatcttcaataattctgtatcttaattcaggtatatgatttaaagccttcattgctgcgtgcatatacaaagcaaaaaaagacaacttttcagccttagacttatttaaagttgctgtacatttaacattagctgttagcccaacataaggactgtccatttgaaaaaaaactgaaaatgctcttttctctcccacttttctatatctattttcttcatgatttttataaaaacaaataggctatcccacggaatagcctattgtctatatgctttgattttttattatctcttagcattaattaactccataaactgctctagcttaggtaaaacgataatttccgttctacggtttgctgctttaccagctgctgtattattgtcagcttttggcacatactgagatctagcacctgcagtcattcttgatggatttactccaaattttgtttgaagtgttcttactactgaagtagcacgcaatgcagacagatcccaattatctttaattaaagcattaggcttcattgcatcagtgtcggtatgtccttctaccaatacgtcatagtcgctataatcattaattacagtggcaactttacttagtacgttctcagcagttggtaaaatttcataactaccagatttgtacaacatattatcagaaagagaaataaatactacccctttttgtacttttacatctacatcctgatcgtttaggttatccaaagatctttttaacttattagaaattgctaagttaagggaatcttgtttagatctagcatcttgaagtcttttaatataatcttgagactctttaatctgagaaattaactgagcaatattggtagatcccttactacttgttgcagcacaatctgccaaactttgttttaaaataccattttggtctttcaataatgccaactgatcttctaaagaagtaatttttactttctgagtttggatagtgctttctttttgtccagccgtttcaaggcattgttgataattaagttgtagagcatctaactttttttgagttccacaagaagccaatgttaatgctactccaccaaccaaaactgttctaataagatttttcataattgttattatatttttgggtatttcaccgggttactttcattcattaaaccataaattttctctatcatttcatctgcagatggtttagagaaataatctccatcagaagcgtatgccgggcgatgttcctttgccgaaattgttaaaggcgctgaatctaaatacctaaagcctccttgttgttcaataatatgttgaagcatataagctgtagttccgccagcaacgtcctcatctattactaccaatcgatttgtttttttcaagctttctacaattttatgctcaatatcaaaaggcattaaagactgagcgtctatcacttcaatttctatgcctaaattttcaagctctttagcagcctccataacaattctccaagtagagccgtaagtaacaactgttacatcctttccttctttggtaacttctaccttacctacagggacggtaaactctcctatattgctaggcattttttctttcaatcggtatccattaagcggttctacaattaaacacggatcatccgattgcatcatagtattgtaaaatcctgcagctttagtaagatctcttggtacaagtacgtaaatacctttcaccaagttaagaatccctgccattggcgaccctgaatgccaaattccttccaaacggtggcctctggttctgataataacaggtgctttttgccctcctttggttcggtaatgtaccgtagccaaatcatcactcatcccctgtaaacagtataaaatataatccaagtactgaatttccgcaacaggacgcaatcctcgcattgctaagcctattccttggcctaaaatagtcgcttcacgaattcctgtatctgcaactctatctgctccatatttttgctgaagaccttctaaaccttgatttacatcaccgatattcccgctatcttcgccaaagataagaaactctggatacttctcaagaattttatcaaaattatctctcacaacaatacggccatctacccattgggagttttcctcgtatttaggttttacctctgcaatattagtagctttccactgagactcgctataaagatgagaagaataattatcctcttccacctcagccatttctgtataaatagcttttaatgcaactctttcttgaagatcctctcctcttgtcacccaaagacttctccttactaagtggaatatttcctttttagcaatactaattagatttttaaatttctctaactcagcattaaccttttctgaattttttgatgctaaagctaatttttctacacaaggtaaagctttctctttaatctctttaatcgagttttggtaagcttcccacgcagacttttgactattcttggtgatttttttcgcctctttttctatagcatctaaatcctcattagtagctaaagtaatcttatttccgtcaatttcaatttcataatttagaatccattctctaaattttttcaatccatcatgatcagcttcccaagccaaacgttctgtagacttatatctctcatgagagcccgaagtagagtgcccctgtggctgggtaacttctgttacatgaacaataacaggcaccctttcttcacgtgcataatattcagctttttgataagcttcctgtaacgctggataatcccaagcttttactttgataatttcacaaccttggtttcctcctgcctttctttggaacccttgtagcatctcggataaatcagcttttgctctctggttctgagtaggcaccgaaatcccatagccatcatcccaaatagacatcaccattggtacttgcaaggcacatgcagcatttatggtttcccaaaaatgtccttctgctgtagatgcgtcccctatcgttccaaaagcgacctcttttcctcctttggaaaatctttcagaacctggaaaagtattattttggtaataattggaagctgctgccaagcccaaaagtcttggcatttgtcctgcggtaggtgaaatatctgaacttatattttttatttgagttaaatccttccaacttccatcttcattaagagaacgggtagcgtaatgcccattcatctggcgaccaccagaagctggatctctctctacactagtatctgcatatagcgacgcaaaaaaactttctggagttaaagctccaacagccatcgcaaaagtctgatctctatagtatcctgatctaaaatctccatttctaaaaactctggacattgcaatctgagggagttcctttccatctccgaaaattccaaatttggcctttcctgtaagtacctctctcctacccaacaagctcatctctctagaaatgcgagacaatttataatcctctaaaatttgatttttgaaatcttcaaaagtcacttgagaattctccatatttataacttccattgtttggctttttgacaaatataagaatttatgatttatctaatatttattttttccaaaatttattaatttatctggaataattttcacaaatacaccatacagattaaaaaataatcaaataaaaaataaaaatatttaaataatgaatttttaatacacattctaaataatgcttatgtatatccaaaatctacatagaggccgattaaaaaactataaaaaaagaaaaagccccgaagagagtcgaggcgctaaatattttagctcgcgatgttttttcatttattgtgttcgctgaaacatttgggcataaaaaaacctcctgattatggacaagaggtgacccaaatgttttcacaacggaataatccttattgtgaattgctctcaaaattttatagttcaaagataaataaaaaaaaataactaccattacggtttcccgtaaaatttttaaaaaaaatattctgtacttttaaaaacacaattaaaaaataaagatatggcaaaaaaaatactcggtttagacctgggaaccaactcaattgggtgggcgttagttaatttagaagaacagaaaatattgggaatgggaagtcggattattccgatggatgcaggcgatatggggaaatttgccgaaggcggctccatttcacaaacagcaaaaagaacaggctacagaggagttagaagattaagagaacgtcatttgcttagaagagagcgcttacatagagttctgcatattctaaagtttttaccaacgcattttgatgctcaaatagatttcgaaaaaagatttggaaaaataaaaccaggaatcgaacccaaaatagctttttctaaagatggtttcttgttcaaagattcttttaataaaatgttggaggattttaaaacccggcaacctgattttttaaaaggcaaaaatggggaagatgttttagttccttacgattggaccatctattatctgcgaaaaaaagccttaactcaaaaaattgaaaaagaagagttggcttggattatcttaaatttcaaccagaaacgtggttactatcaattgcgtggtgaaagtgaggatgaagataaaaaagaaataaaagaattttgtaaattactgaaagttgtagcaattgaaaagggagatgtagataaaaagaataataaaaaatcatggtataaacttatattcgacaatggttgggaatattctgctactttttcaactgaacctaattggattaattcagaaagagaatttttgattactgaagagtatgatgagaataataatataaaaattgtaaaagacaaaagaagtgataaaacaggaaaggaaaaacgtagaataacgccattgccatcttttgatgaaatcaacttgatgtcaaaaaaagatcaggataagatttacaagaaaatcaaagccagaactgaattcactatcagaaatagtaatacaactgttggaacctatatttatgatcacctacttttaaatcctaaacaaaaaattaaggggaaattagttcgtacaatcgagcgtaaattctataaggaagaactaaaacaaatacttataaaacaaaaagactttcatcccgaattgcaggatgaaaatttgttaatggattgcattcgcgaactttacaaaaacaataaacaacaccaacaacagctttcttccaaagattttgtgcatttgtttttggaagatatcatcttttatcaacgtccgttaagaagccagaaatctttaatcagtaattgtagtttagaatccagaacatataccgacaaagaaggaaaagaacatctacaacctttgaaagtagtctcaaaatccaatccttatttccaggaattcagattgttgcaatggttgcagaatttagctttctataagaaagaagatgacaccaatgtaacctcagaacttcttccttcttcacgagattgggaagaattattggattttttaaatcaaaggaaagaagtagatcaaaaacagattctagactttttgcttaagaaaaagttggatgtaaaaaaattacctaaaggcgaaacagaaaaataccgttggaattatgtagaagataaaacgtatccatgcaatgaaacccgatatttaattcaatcaaaacttgataaagtacaagaagttctttcagggtttctaacatttgaaaaagaaatggaattgtggcacattatctattccgtaaatgataaaattgagtatgaaaaagcactgagaaagtttgcggctaaaaataatttagacgaagcatcttttgtggacagtttcaaaaaatttcctcctttcaaaagtgattatggtagtttttcggaaaaagcattgaagaaattattgccgttaatgcgatttggtagttcttggtcgtgggattcaatttccaaagaatcacaagctcgaatagagaaaatcatcaccggtgaggtagatgataaaattgccgataaaataagagatctggcattgaaacatcaattagtaaatgaacaagactttcagggattgcccctttggttggctcaatatatcgtttatggtcgccattctgaggctacaatttcagggaaatggaattctccaacagaattggaagcttttttaaagaatttcaaacaacattctttacgaaatcctattgtagaacaagtaattactgaaacgctgagagtggtaaaggatatctggagttattatggtagcggagctaaagattacttttctgaaatccacatcgaattgggtagagatatgaaaaacactgccgaagaaagaaaacgcctgaccaatcaggttactgagaatgaaaataccaatttacgtatcaaagcacttttggctgaaatggccttggatggaaatgtagagaatgtccgaccgtattcgcctagccaacaggaaattttaaaaatttatgaagaaggcgctttaaattcagatattgaaattgatgaagctattctgaaaatcagcaaaactcctcaacctagtagctcagatttaaaacgctataaactgtggttggaacaaaagtatagatcaccctatactggacaaattattccattgaataaattgtttacctcttcgtatgaagtagaacatatcattcctcaaagccggtattttgatgacagcttttccaataaagtaatttgtgaagcggaagtcaataaattaaaagacaaacaaattgggctggagttcataaaaaatcatcatggtgaaaaagtaactattggcaataaaacggtacaaattttagaagtttcagcttatgaagattttgtgaagaaaaattatgctaaaaatcgaagcaagagaaataaacttcttttggaagatattcctgaaaaaatgattgaaaggcagatgaacgatactcgttatatcagtaagtacatttccaatcttctatcaaatattgtgcgtgacgaaaggccaggagctaatgatgacggttttaattctaaaaatctgattccaggtaatggaaaaattacaactcgattaaaacaggattggggcctagaagcagtttggaatgagttgattttacctcgtttcgagagaatgaacaccctaacaaaaacaaatgatttcacaaaatggaatgaaaaatatcaaaaatttttacctaccgttccattagaattgtcgaaaggtttttctaaaaagagaattgatcatcgccaccatgcgatggatgccttagtaattgcttgtgcttcacgagatcatatcaatttgctgaacaacgaatctgctcttcctaagaaaaacagaagcaaagaagaacaaaagaaattcagaattgatctacaaaagaaacttagaaaccaagaatcgtatttggataaagatggagttaaaagaacttcttttaccgagttttataaaccatgggaaaactttaccgttgatgctaaaaatgcgttagaaaacattgtggtaagcttcaaacagaatacaagagtaatcaacaaagctactaattactatgagaaatatgtagagaaaaatggtgaaatgataaaaacaaaagtgccacaagagggtattaactgggcaattagaaaaccgttgcataaggaaaccgtttcgggtaaaatacatcttgattatgttaaagtagcaaaaggaaaaatactgacagctacccgaaaaagtttagacacaacctttaacgaaaaaacaattttatctataacagatacgggaatacaaaaaatcctattgaactatttgaaagcaaaaggaagtcctgaacttgctttttcacccgaaggaatagaagaattaaatgaaaatattaagtcttataatgacggaaaataccatcaacccatatttaaagtccgaatttttgaacaaggttctaaatttcctttaggagaaaccggaaataaacaagcaaaatttgtcgaagctgccaaaggcaccaatcttttctttgctgtttatgcagatgaaaacggaaaaagaagttttgatactatccctcttaatattgttattgagaggcaaaagcaaggtttaagctctgtacctgaaatcaatgaaaaaggagatcgattgctatttcatctctcaccaaatgatttggtgtatataccaactgatgatagatttgataatctaaattcaaacaatatttataaaatggttagctgtacaggaagcgaatgtcattttattccatttaggattgcaagcttaattaaaaattatgatgcaaaaactaaagttggagaatttggtagtttaaataaacaagaattatcggagtcacttcttaatccagttagagttaaagaaaagtgtattaaattaaaagtagatcgcttaggtaatatatcaaatgcctagaaaaataaatatgaagtatatttaaaaaataaccttcccccttccaaagtttggaactttgaaaggggttatcaagaaaaaacgagataaatatgattccattagaattcggccgttactaccacatttacaaccacgccaatggtgaggatttactgtttcgtgaagaaaagaattatactttctttctggaaaaataccacaaatacctagattccgtggtggaaacaatagcttggtgtctgatgcccaatcattttcatctgttggtcaggattaaaagcgatgaggaaatcgcagaccatccaggtttcgaaaacctagatggtctaagcgataaagaaaaatcaaatttaatttctaaacaattttctaatttttttaacagctatacaaaagccttcaacaaagtatatcaacggagaggctcgctattcctcaaaaattttaaaagaaaagaaataaccgatgacaagtatttcagaaatctgattctttaccttcataacaatcctgttcatcacagatttaccactgattttgaaaaatatccctggacttcttatcagtcctttattcatcagcaatcagattatttaatccagtattttgatgatgtgaaaaactatcatcatgctcataaaatttatcatacgaccatcgaaatggaatttgaagaataatttaaaaaccaaaaccatgattacccgctccatttacatcggcaatccagcttacttgaagctgaaagacgaacaaatgtatattctagatccatcaacccacgccatgaaggggaaaattgcagttgaagacttgggggtactgatgttggaccattttcagattaccctaacccatcaactcatccagcggatgatggaaaacaatgtggtagtcatcagttgtaactattatcatcttccacatggaattatgctccccttgtatggacataccgaacattcccagaaagtaaaattccagctggaagccagtgagccactaaaaaagcaactttggaaacaaacggtagaagcaaaaatcgagaatcagaaacatgttctgaagcgattgggtaattattacgaacccatggagtattaccttcaaaatgtaaaaagcggagatacgaccaatatggaaggaattgctgcccagcattactggaaatatctcatcagtttggatttcatcagagaccgctatggcgattatcccaatttgtttttcaatttcggatattccgtattacgaagtatgatcgcccgtgcaattgtagaaacaggccttctcccggtattggggatttttcataaaaacaaatacaatccttattgtttggccgatgatttaatggaaccttaccgtccttttgccgatttattagtgatgcaatggattgaaaagagtcctacagttgaggaactcaaccaggattttaaagcctatatattaagaattgcgaccatggatgttcgtattaatgataaaatgagaccattgatggtggggattaaaataacgacttcttccttatacaaatgctatactggcgaaaaacgcctgattgcttatcccgaattaccatggaatccgaacgattaaacgcttaccgaattatgtgggtaatggttttatacgacttgccaaccgaaaccaaggcaatgcgaaaagcagccaaccttttcagaaaaaagttggaagatgatggctttgccctttttcagttttctatatacatccgacattgccccagccgggaaaatgccaatgtgcatatcgagcgggtgaagaaaatgttgcccaaagcaggaaaagtcgccatcatgtgtattaccgataaacagtttggagatatcgaaatattttctgcccaatccaaagaagaaccgccacccacctggcagcaattggaacttttttaaatatctggaactgaaaattcttagcaaaagttctttcccatgcatatttcctaatttagaatttatcattcaatattttctttattctaattttaaaccacataaaaacataaggaaataaagcaaaaaaacatagaatctgaagatagaaacatagcgatgaggacgaaattcatttgttaaaaattgaactttctgtaattcgtaatttctaattaaccattcaaaattcatcattcatttagaaatgcacgtaaaagtaaaagctgtgggtggatttagcgaaaaggctgagctaaagcaatacaaccaacacaaattggattttctgtttctaaaaggttatagtagaaattgaaaaatcatggtatatcaaaaccttggtgtcaaaagatgctattttttctgaataaggaaatccaagtaacaaactgatatttaattcattacttggattgaggttgcgacgtatcgcgaatttaaaaattttgaaagcaattcacaaccaactccgagaatcaaaggttttgcaatgggttgcgacgtatcgcgaatttaaaaattttgaaagcaattcacaaccagctgcatctactacagatgtctgcaaaagttgcgacgtatcgcgaatttaaaaattttgaaagcaattcacaacaatggtcttgtttctacatttcttgaaagcgttgcgacgtatcgcgaatttaaaaattttgaaagcaattcacaacgctcgcacggatagagcttctcaggctattgttgcgacgtatcgcgaatttaaaaattttgaaagcaattcacaacgctcgcacggatagagcttctcaggctattgttgcgacgtatcgcgaatttaaaaattttgaaagcaattcacaactgtcttaaagtggcttttttcggtctttcagttgcgacgtatcgcgaatttaaaaattttgaaagcaattcacaacatcttccggagttgacaaaaagtcaagaaggttgcgacgtatcgcgaatttaaaaattttgaaagcaattcacaacgcaatagtgtgattgattatagtagccgttgttgcgacgtatcgcgaatttaaaaattttgaaagcaattcacaacgtgattttaaagttttcattttgtaaaattgttgcgacgtatcgcgaatttaaaaattttgaaagcaattcacaacttttatcctttactttctttcttattacctgttgcgacgtatcgcgaatttaaaaattttgaaagcaattcacaacgcactttattgcaggcctgatgtatccaaagttgcgacgtatcgcgaatttaaaaattttgaaagcaattcacaactcattattagttgtaaagataaagaagaaagttgcgacgtatcgcgaatttaaaaattttgaaagcaattcacaacgaaatgtacaatatacaatttcgcctgaaggttgcgacgtatcgcgaatttaaaaattttgaaagcaattcacaacctcaaaatgctttaggattagcgcaaacacgttgcgacgtatcgcgaatttaaaaattttgaaagcaattcacaacaggaaaactcttctagcttgaaattttctgttgcgacgtatcgcgaatttaaaaattttgaaagcaattcacaactcgcaatgtaaagtggtgcgtctaattcttgttgcgacgtatcgcgaatttaaaaattttgaaagcaattcacaacgaatttctccagttaaagcctttactgtttgttgcgacgtatcgcgaatttaaaaattttgaaagcaattcacaactattgacggtttctacttggcgcccaatttgttgcgacgtatcgcgaatttaaaaattttgaaagcaattcacaaccggtattagtacagcgctcatctataaatagttgcgacgtatcgcgaatttaaaaattttgaaagcaattcacaacaaagaacatcgccaccaaaaaggacagcttgttgcgacgtatcgcgaatttaaaaattttgaaagcaattcacaacctcttatatcataatgtataaaagatttatgttgcgacgtatcgcgaatttaaaaattttgaaagcaattcacaactgaagccgttttacaaagttgggcgtaatggttgcgacgtatcgcgaatttaaaaattttgaaagcaattcacaaccagcacaattaattaacgatggcagaaccagttgcgacgtatcgcgaatttaaaaattttgaaagcaattcacaacccttagcgatttctttcaaagcatcgataagttgcgacgtatcgcgaatttaaaaattttgaaagcaattcacaactgcgtacagttgctcctgaacgtgtttttggttgcgacgtatcgcgaatttaaaaattttgaaagcaattcacaactagagttgctcttcgctgcttgtttatatccgttgcgacgtatcgcgaatttaaaaattttgaaagcaattcacaacccttttacttcccttcctaattcatctttggttgcgacgtatcgcgaatttaaaaattttgaaagcaattcacaacgaccagattaggagtctttttaggcttatggttgcgacgtatcgcgaatttaaaaattttgaaatccaagctaaagcacaagcaaaggtggattcagcgaaaagcgcagggaaagtaagggctgagctaaagcaattccaagacgtgaaaaatttacgattcaaagttcaatactcaacgttcaattgcgtaattcgtaatttctaattcaaaaatcattttgaaatccaagctaaagcacaagcaaaggcgaattcagcgaaaagcgcaggaaaagtaaagactgagctaaagcaattcacaactataattacaagaatatttttccagcgaaaatgcattacattcttgttaacaatgtctttatcaacatcatttctcatcatcatttatcttgtttttactatatttagacaatatttaagatgtaaaaactaaaaaatataaaaatattaaccttaaaacactgaaaatgaaatataccataccttctttcatactagtgcttactatgattagctgcaacaatgttgaaaaagaaaaaattctccataaaagagaaaaagatttagcagagagagaagctttattgtctaaaaaagaagctcttttccaatctcttctcaagatgagggatagcatacaatctgtttcccaaaaagatagcacccaaacttctatacttcctagtgagcttttaggagaatggtcttccaaaatcatctgttatgagactaactgccccgaatatgccattggagacaatcgtgttgaaagctggtttttcaccaatgactctttaggttcttatgtaaagagcatccataacaaacaagaaaggttatattcggtacaatctaatgatcgacaaattctccttaattattcttctgtacctgctcctaatagaaaggtgaatgttaatattaacttgaatgagattagccccaataaaattaagggtacaaaaataatatcgctagaagatggcaagtgtaattctaaattctctgtagaacttaccaaaactcaaaaactataatttatgatgcatctactcaacatacacagtcttaccttacctctagaagatcctatcttaaagtttttggtagtgctcatcattatattaagtgctcctttgcttttaaataaaataaaagttccgcatttgctagggttaattattgctggtgctgttattggccccaacggcctcaatatcttacctcgagatagcagcattgtagtaagtggaactacaggtcttctctacatcatgttcctggcgggtctagaaattgacatgggggattttaagaaaaacaaatggaaaagcctcaccttcggattgtacactttctgcattcctttaggtttaggaattttactttcccattacatactaggttttccgtatctcacttctcttatttttgcgagtatattctccacccacaccttaatatcttatcctattgtgggaaaattaggcttagtaaaaaatagggctgttaatattaccgtaggaggaactatgattacggatatctttgccttactcatcctcgctgtagtagttggggttacacaaggagatgttaatacagccttttgggtgaaaatggccgtttcttttaccatttttggtattgttgttttgggtggatttcccattattggcagatggtttttcaaaaaagtacaagataaaatttcccagtacatttttgtgctggttatgatatatctggcagctttatttgcagaaatcgcaggattagaagctattatcggagctttttttgcaggtttggctctcaatagacttatccctcatacttctatattaatgaatagaatagaatttgtgggaaatgccatcttcattccctttttccttattagtgtgggaatgcttatcgatttttctgtattcttcaaagatgctgaaaccataaaggttattgtattaatgacagttgttgctgtggtatccaaatatattgcagcgctgttgactcaaaagacatttaaatttaaccctttagaaagagggctgatctttggactaagtacttcccatgcagcggctacattagctgtggtaatggtgggatataacattattattggagagactgatagcggaaaacccatccgtttactggatgaaagtgtcttgaacggaagtattgtccttatccttatttcttgtactctatcttcttttataacccaatcagcaggtgaaaaaatgctattggaagatgatgaagaaaaaattaacgacaccaaccaacctaatgaaaacatcctactagccttaagttatgataatacggtagatcctatggtaaacctaggagtatcgatgaaaagcaaaaatcaagagcgaaaattgtatgctttaaatgtaattaatgatgctcaagaagagagctctgaaaagcattcggaaaagctcctcaaaaaagctactgataacgcttctgccatcgacatacaagtaaataccatgaagaggtatgatgataacattatgagaggaattagcaatgttgtaaaagaacaaaaaatcagcgacctcatcttcggtttagaaaagaataaaggcttttccccatctttccttcttaacttctacaacagcaagctctttgaagcggaaaccaatatttttatttaccatgcctttcaaccaatggcaacaataaaaaaatatacgatagttatccctcctaatagcgaaaaaaacagaggtttcctatcctctttactcaaaatatggaatcttgctaaaaattcaggagctaaatttgttttcttaactactgaaaacattatccaacttctcaaaagaattatcgccaagtccaatattgatgctgaatttaaagttcacaaccaatggagaaatctagaacctattatgaagcaaaaaaccgaaaaccatgcttttgtcttctttatgtttaaacctgaacctaacttattctttttcagaatgaaaaatattccggaaatgattaataaaaaccttaccgaatccaattatctattggtttacccttactctactccttttgtagatgaggatagcaaactggtaagtaaccacggagattatgtgaaaattggtaatatgattagcagcctctttagaacctaatctttatccatatttccaaaaggagagcagattttgaaaatttgctctctttttttataaaaaaaatccttcaagtttgcacttaaaggacttcaaaaaaagtaaaatttaaaattatgaataagggatttaattggtgttttcattaaaaaaatcatctataatctggaaagctttggcttcatcgtgcacctctactttcaacttaaagctatcattttctgaagaaaagggaaaagacattgggcctttttcaagctctgtagaaatttcattttcttctaattttctttttagtttttccacttcttccaaaagttcaccttcatatacgggaacccacattttttctctcattgttcaaacttaaaagttatgttataaaagtattaataatttttgtatttgcaaaataatttggtgattttctaaaaaaaacttcaaaaaagtatcattttacaccctatcatacatccataccttccattctggaatttggattttacttacataaacctcatctctcacttcgggaatagggtttaattttaactctattttctggctgctatgtttaattacttcctgtatcgcatcgatatgaacgatgtattttctattgattttaaaaaacaaaagcggattgagcttggtaataatatccttaatagtatcttcatatagataagtcttcccttctctagttgttataaataagtactttccagaggcaaaaaaataagcaatatcctcttcccgaagcgagactagtttgtttccatcattaactaaaaaacgattgacttcatcatggtgattcactaatttggacatcccttgtaaagtggtattgggactgtaattttcccgaatagatgcaaacttgtgcaaggctctgtacaaatcatcttcttcaaaaggtttcagaagataatcgatagtaaaatgtctaaaaacttttaaagcatactcatcataggctgtgataaaaataatgggagtaaaaagttccacctgctcaaaaatctcaaagcttttaccatctcccaaatggatgtccataaaaataaggtccacctcattctttgaaaaaaaatctatagcctgtttcttagatcttaatgctacaatttctattacctgaataatattttgctcttccacaatattcttcaagtaattgagtgctagaagctcgtcttcgataatggctaccctcatgctattctttatttaaaatcatgagctacaaaaatacaaaaaaaccgtttaggcttttttgcccaaacggtttaaggatctgttaattgaatatctttttacatttgaagtaataaaaagataaaggaggtttattgtaaataaggattatttttctttgcactttgagggatttctatcgtgtatctcacatcattttgttgcaagatatactctttaccatttacctcatgagtaatggttttttgatttgctcttctcaaatcataccatctttgcccttctaaagcgaattctctaaatctctcctctaagataaagctcatgaatgcagagttgttcatcgcatttacttggctttgaagttctgcatatcctgttgcattgtatctggttttcaataccggcaacaaagcttccttcgcttcttggagtttattaagctttaataatgcttcagatttaatgaaatacaactcagcagttctaaaagaaactctatagtctgtacttcctccttttttcactttatattggtctccatttctctcaaaatacaagtcaaatctcttatcactatcggtataactattcaacaaatcctgggaagcatatcctacgttttgcacggaattgttaagtgctaaatctagtgccaagatagactctgcagcatcatagcggttaggaataacatcactactgttaagatctaccaattgattattaattgccaatgcttggttagcataatctaaagctttttgccaatcttgttggtacagagctactcttgcttgcaaagctttaagagcaacttttgagaaatggaaattttctcctgccacttgcttttcagtaatcatcaactcttcagcttttgttaaatcggcatggatttgctgatacacttcttgtacggaggatgctggcagtactttttccaaatctatttccaagctaattggcactcctctatcagaagatgccgttgtagagttataaggtttaccataaaggttcaccaaatcaaaataagtataggctcttagagcataagcttctgctagaatttggtttctctcatttcctcccgccatcgttttagaaccttcattaat

SEQ ID NO: 1191 - DNA, 24404 bp, synthetic construct
  source 1..24404: mol_type = other DNA
  misc_feature 1..24404: note = Synthetic
atacaaccaaagatggattgccaagtaatcttgtatataaaatagcgcaagataaagaagggtttttgtggtttgcaacagataaaggcttagtaaagtataatggtaataccatgaaaacgtttactacaaaagatagtttggctactaacgatatttggggtatttacccagcgccagatggaaaaatatggtatgtagcaaaagcatctaagcttggttatatagaacatgatactattttttcttttgagagtgatttaaagggagagatttttaaccctttattttctagcttagttggtaatgatttttctttatcgagctctacaaaatttcattcattaaagggtgataaatggcaacgtgtaaataaagcgttagaagaagataaaataataattactccattattacatccaaatgttagtggatttcaaacaacagaaaatttagattctattgaggttctagggcattctaatcaagttcttaaaaggtttccatttacgaaagttcttaataatatgggtgttagaggtcaaatagctgatagtttgttctattgggcaacagattcacattatactttttttaatctaaatactttaaaaattcaaaaaagaaacctgaaagacgaaataggaattgataaatctaaatttgttagaattaatgttgtaaatgatcaattacaaattacaggtaaaggctttgtaagtgttttaaataaagagttacatgctaccaatacctattatataccagaagatattaatgcacattttgggttttatgataaatcgggttctatttggttaacgactttcacagatggtatttattatttacctaaagaaaaacaagatattatctatggtttagaaaatcaaaaaatcacaggagtaaattatatagataataagattattgtagatgtttttaataagggattttatcaatataataattcaaataaatcatttgttccttatttgttaaataatgaacatgtctttagtgctgcatatataaaagaattaaccactgagtattatttgtctaaaacaaaaataagtgcttttaaaaacaataaattttctgttacggattacgctaacactatatctaaagtaaatgaaatagctcgtcagttagtatattatgataagcatttatatgggaataattctataggaattaataagttaaacaccaatagctttagtttagaaaagcattattatcagccaggaataaatcaattactagtttataattctaaatttttattggctacatctaatggtttgttagagtttaagaatgaaaaattcagatcaatagattttaaaaatcaagattttaataaaccaacattaaatataacaatcctaactgatacagaaatcttaataaatacagatggttttggtacttatatttcagatttagaacgtattaatcttttaccaaattcagaatttttaatagtaaatagtgctattgtggatggcagctcagtgtatttagcaacagagtctggtgtatataagtatcaaatagaaaatggtaattattgttttattaaacagttaactacaagcgacggattgccttctaacaatgtaaatagtgtattaaaaagtggtaacaaactaattgttggtacaaatagaggtgtagcagttattccagaagatttaaaaaagacgtcacaattgctaaatgtatattttgaaagtgttacatacaatcaacaatccatttccagtgtaaattcagtgtttaattacgaaaataataatgatgtaaatattgtgatttcaactttagattattcggtagatgattcagatttattatataattataagttagaacctatacagaaagcatggaatacatcacattctaacgaaattaattttaacgatttgcaacctggtgtttataccttttcggtaagtttagatactatcgaaagagaggtgcgttttactataaaaccgctttggtggcaaactttgtggtttaagatttttgcggttattgcaagtgttattgttgtttatttaatttcaagatacatttctaaacgtgcagcatttaagaaacatcaaaagttatttgaagacaaacgtctttctgagttacagttaaaagcattacgatctcaaatgaatcctcattttgtgtttaattccctatctgcaattcaatattttataaatagtaatgattatgagacttcagagcattatttagttaagttttctaagctaattagacagttttttgagctttctaaagagaatgatattacgattaaagatgaaattacattattaaaaaactatctagaaatagaaaaactaaggtttagagaaaagttgtcttttgactttgatatagatgagcaacttaacttagaaacttcaaaaatgcctactatgcttttgcagcctatagtagaaaacgcaataaatcatggtatttttaataaagaggaaaatggtttagtgcttattaggtttgtaaaagatgaagataaaattaaaatagaaattattgatgatggtgtgggttttgctaaaactatgcagaggtctaaaaataaaattaagtcatctcatgtgttaaaagataggttgtattttttaaaccaatcaggcaaatggcaaatagaatataatgaagaagaagcttttagtgataaagaagataaaggaaataaggcaacgtttataatacaggaaataaaatgagtaaaataaaagccatactagtagacgatgaaatttctaaccttaaaggattagaattaaaggtaaataaactatttcctgaaattaaaattttaaaagcttatcaaaaaccagaagatgcactaaaaggtattttagaattaaaacctgatttactattcttagatatagagatgccaagaatcaatggttttgaattattgtctaaattaaataacatcgattttcaggttatattcgttacagcatatagtgagtatgctttagaagctataaaaaaatctgcaatagattacgttttaaaaccaatagataacgacgatttggtgttagctgtaaataaagcaaagcatgttatttacgataagcgtcagagtgataccaattctaaaatggttagattattaaacgatgttattgagaatagcaataaaataattattccaactgcaaaaggggtttcatttattccgcaagatgaagtactacatttagaaggttatgaaggttacactaagattcatcttcaagataatgtaataatcagttcgtataatctaggtaaatttgaaaaaaacttaagcactaaattctttaagtgccataaatctcacattatcaacttagaaaaagtgagaagttttgagaacgaaggctatgttgttctcgaaaattctatccgaataccaatctcaagagcaaataagaaagtgtttttatcactttttaagtagtcttttttaccgttggttgcatcaaagcgatcgttagttctacctgattgactgttggttagatagctcgttttatatgtaaattatcttatatttttgatattagaacctacaaaaaaatataacccaaatcatgaagaattttaaatttctatttagcatattaattgctatgattatgcttacatcatgtgaatctgatgatgaaggcacttccaacactaactacaatacagaattagattttggcctaagtattcaaagagattttacgggtagaattgttgatgaagctagtgcacctattgataatgtaattgtaactataggaaataaagttgccactactgatgataacggaatgtttattattaatagtgccacagtaaaagaagaacaagcttttattatagcagagaaagctggttatttaaaaggtatgcgtagtgttgtgccaactgatggagcaaacactgtacgatttatgttaatcacagaaaatgtagcaggtacagtagcttctggttctaatagtgaagttacacttggtaatggaacaaaagtaaagtttgatggagaatttaaagacgaaaatgataatccttattcagggaatgtagatgtattaatgtatcatttagatccatctaatccatcaattgatgctattatgccaggaagcctgcaagcacaaaatgaagatggtaatgaaagagttttagaaacatacggaatgcttaatgttgagttaagaggtgattctggagaaaaattaaatatcgcagatggcagtgtcgctgaaatagaaattccagttgatactgcacaaataggtgtagcaccttcaacaattcctttatggcatttcgatgaagacaaagggtattggatacaagatggtgaagcaaatttagttggtggaaaatatattgcaaccgtttctcatttttcttggtggaactgtgatgcgcaattcccaacagttatattatgtcttaatgttgttgatactgtaaatacgcccttgtctaatgtagtcgtagagctatggagaactggagcaacatacggaagacaaggcatatctaacggaaatggcgaaatatgcggtttaataccagcaaacgaaactttaacattaaaagcgtttgatcaatgtggtgtagaggttcattctacaacaattggtcctttctctacagatacaaattatggtaatgttgttttaccgtctgtaacatcatctgttattacaggtaatttggtaaactgttctaatgctaatgttactaatggttatgttgcattaacttatggtggtcaatacgctacaataccagtaactaatggaagtttttcattaagcgttattgaatgtgcttctttaccagattttattttagaaggtgtagattatggtacgtttcaaacgactacagaaatacagtataattttagtaatccaagtgttggtaatataattgcttgtaattctattacagaatttatatctgtacaggtagacaatgatccggcagaattttatttaaattcactttcaggtcattctaatggaccaaatgcatttagtgttggtgcacaaaatgccactggctctagtttcctgtcaggaggtaattctataacgccaggtacctattcatttacaagtacaccaagtttttggatagagtcttctaatataaatatcgattataacgtgcctaatacacttcagtttacattatctaattacggagcaattggaggttatatagatatgattatatccggaaattatacagatttaagtggaaacttaagaacgctttcttgttctattcatgttgttagagataactaaaaattctaatttagaaattaaaaaggagactttaagtttaaagcctccttttttgtgttaaatcaatctgtatttgtttgtaaactgcttaataagattagtttaaggtggcgtttgtgtgcttgttttttctaaaattgtgaacggtctttactttgtttgtaattaatctcgtttcaattcggataagaataagactatccgtaaatttacagcttcaaaaaaacaagcttggaaaaatatctcagtcaacttaatgaggcacaactagaacccacaattcaggtcaatggacctatgataataattgctggtgcaggttctggaaaaacacgtgtgctaacctatcgtattgcgtatttaatgagtaaaggtgtagattcctttaatatattggcattgacttttacgaataaagcggcaaaggagatgaaagagagaattgccgatattgttggtgatggtgaagctaagaatctttggatgggaacgtttcactccgtttttgctaagattttacgttttgaaggccatcatttaggttttccaagcaactttaccatttatgatacccaagattctcagaaattaatgggttctatcattaaagaaatgggtctggataaagacatctataaaaccaagcaagtttatagtagaatttcttcgtataaaaatagtttaataactgttaaagcatattacaaaaatcctgaattaatggaagctgatgccatggcaaggcgaccaaaaatgggagaaatttataaagaatatgtagatcgatgctttaaagcaggcgccatggattttgatgatcttctcttgcgaaccaatgaattgttaacgcgttttcctcaggtattagcgcagtatcaagataagtttcgctatatcttagtcgatgagtatcaagatacaaatcattcgcaatatttaatagtacgtgcactagcagatcgttttcagaatatttgtgtggtaggtgatgatgctcaaagtatctatgcgttccgtggcgcaaatatcaataatattctaaacttccagaaagattacgataatgtaaaaatgtaccgtcttgagcagaattaccgatcgacaaaaaatattgtaggtgcggcaaattccgtaatagaacataataaaaccaagcttgataaaatagtttggacagccaatgacgttggagaaaaggtcattgttcacagagcattaaccgatggtgatgaaggccgttatgttgcaagtaccatttgggagacaaaaatgaacgcccaacttcacaatagtgattttgcagtgttatatcgtacaaatgcacaatctagagcaattgaagatgctttgcgcaaacgcgatattccttatagaatttatggtggtttatcattttaccagcgcaaagagattaaagatgttacagcatatttgcgtttaattcttaactctgcagatgaagaagcgcttaagcgtgttattaattatccggcacgaggaattggtcaaacaacagtagatcgtttaattgtggctgcaaatgcaacgggtaaaacgatatatgaccttattaaggatattgatacagtaaatatcaatattaataatgggactaaaaataaactaaaagactttgtgacccttattgaaagttacaaggtaatgaaccaaactgcaaatgcttttgatttagcagaacacgtcaccaaaacaagtgggttagtaagagaattaggaaaggatggtacaccagaaggtgttaccaaaatggataatgttcaagaattgttaaatggtatcaaggattttgttgaaggccaaatagaattagccgatgcaggcgattctttagcagaatttttagaagatgtcgctttagccacggatttagatggagataaaggcgacccaaaccatgtggctttaatgaccattcatttggcaaaaggcctagaatttggacacgtgtttattgtagggatggaagaagatttatttcctagcgctatgagtatgaataccagaagcgaactagaagaagaacgacgactattttatgtcgcattaacacgtgcagaaaaacaagcctatttaacctataccttatcacgttatcgttggggaaaattgatagatgcagaaccaagccgatttatagaagagattgatgatgagtttgtaaccatcacaacaccattaaaagaacgatttaacccgatgttagacgcttccatatttggagatgtagagcctaataaagtaagatttgcaaaacctaaaactgcaaaaatgccaaaaaagacaactaaagctaaaccagaaaattttaaaattagtacacctaaaaaaatggtgcctgtaagtaaagcagaaagccaaaccgatgcaacaaatacaagtttagaagttggtacaaaagtgaatcatcaacgctttggaagaggagaagtgattactttagaaggcactggtgcagatgctaaagctgaaattaaatttcaaaaaggcgaagtgaaaaagttattattacgttttgcgaaacttcaaattttaagaagttaatctcgtttaccattcaagcagtataaaaatagttctgaaaccttgttttagtagcactaccacgttttttatgccgttataacaaagggttacgaagtgaaaactagacttgtagggatttaagggctacataccacaattgaaacccattttcttattacagcagcattaaaacggcaatcaaggcaacctatttataaatgcgtttcaataaaggcttttagttttaatgaggtgtctaataaattcagaccaacccaaccatgaccttcattaggatataaggtaaactcatgggtcacattaagctcagcaagtttactttgcattgcggtaccttgagtggttggtaccaaaggatcttcgccaccataaaataaaatagtaggaggtgaggcgcttgtagctctatgatatgggctaatttcttctaaatacggtacagaggtatcaatgcctaaattattcaatagtgcttgtaaaataggattggtattttctagatatgcaggatcagtaaaattggttgggccaaccacactacaaaccatttctgtttgttgttcggtatcaaagccataactccataacaacgatagatgtgcaccagcactgacaccaacaaaaccaatagcatcagaaatggtgtaataattttcattttcggccataaagtctataacactcgtaatgtcatcaatttgcataggataagcttggttgttttcgtctgccagtctgtagttcatattaacaatggcataattaggcagttgatctagtataaaatctttaaaagcgtccatgtcttctttatcgcctgcagaccatccaccaccatgcactaagatgagtgtttttgtgctaagtgatcgattggctggtaaatacaaatcaaaaacctgatccgaatcactgccataagacacattaagttctgtatatgcttctaaagggtttaaaacctctggttgttggttgtcatcagtactatcagaattacacgcaatacatgttgccattgtaatccataaaatgaaaataagctttattggtttcatgcgtctatggtattgaaaaatatagttactttgtaaacgtattggaaagatacttattatggctgaatttattaaaatatatccagaaaatcctaatcctaaggcaattcagagtgtggtaaaaacacttaaaaatggtggattaatcatttatcctacagataccgtatatggtttagggtgtgatatcactaatataaaagcgttagaacgtattgctaaaattaaaggagtgaagttagaaaaatctaatttttcctttgtctgtgaagatttaagtaaccttagtgattacgtaaaacaaatagatacaaccacatttaagatcttaaaacgtgccttgccaggaccatatacgtttatcttgccaggttctaaaaatctacccaatccatttaaaaaacgtaaaacggttgggattagagttccagataatgccatagctttagccttggttagtgctttaggaaacccaattgtatcgacatccattagagatgatgatgatgttttagaatacactacagatcccgaacttattttagaaaaatgggataaattagtagatgttgttatagatggtggttatggcgacaatgaagcatctaccattatcgatttatctgaagacgaacctgtcgttgttagagaaggtaaagggagtttggagattttttaggagtgttttattgttaagccttttagtatttcccataaacatttttatttatatattctttttcttacatttataattccccctttaatactaattaaatagcgattctttgtaatcgcttttggtgtttgttgtcgttaattataggaataaaaaaaggcgacaagaattaacctgccaccttaaatgttttcacaacggaataatccttattgtgaattgctttcagtactgtaaatatataaaaagaaaattatatacctaatacggaattccgtaataatattgttttattaagtattaggtttaaactagaattaaataaattattaatgaaaaaaatactaggcttagatttaggaacaaattcgattgggtgggctcaaatagaattagattttaagaataaaaagggtaatattaaaggtgttggcagtcgcataatacctatgagtcaagatattttaggaaagtttgatgcaggacaatccatatcccaaaccgcagaaagaacaggatacagaggagtaagacggctttaccaaagagataacctgcgcagagaacgtttgcacagagtgttaaatgttttaggaatgcttccttctcattataaagcaagtatagattttgaaaaaaagttgggacaatttaaacctaaaacagaggttaagttgccttatataaggaaagaagatgaccaatactcatttatttttcaaaactcatttcaggaaatggtcgaaatttttaaagccaatgggtacactgaaaatattccgtatgattggacaatttactatttacgaaaaaaagccttgactcaaaaaattgaaatagaagaattggcctggttgcttttgaattttaatcaaaaaagaggctattatcaattaagaggtgaggaagaagaatttaataaaaacaaaagcgaggaattttatgcacttcaagtagcagatgttcaagcaactgaagataccaacgcaaagggaacttggtacaatgtggttttagaaaacggatggatttatagacgtcaaagcaaggaaccgctttttgagtggaaaggtaaaaccaaagaatttattataacaacaagtttggatgaccacggtaatgttaaaaccgataaagagggaaatgaaaaacgcagctttagggctgttgattctgaaaaagattggattgccataaagaagaagactgaaaatgatattgaagactcagaaaaaaccgttgggacctacatatttgaatcgctagttaaaaatccaagtcaaaaaataagaggtaaactcgttaagaccattgagcgtaaatattatagaaatgagctcgaaaaaatacttgataaacaattaaaggagtattcaagtatatttaatgatgatactttaaagtcttgtgtagaagaattataccctagaaatgaagcgcatcaaaacacattaatgacaaaagattttaaacatctttttgttaacgacattattttttatcagcgtcctttaaaaagcaaaaaatcctctatttcagattgtccttacgaaacacgttcttattataaagatggcgagcttttaaaaagaccactaaaatgtattccaagatccaacccaatttatcaagagtttagactttggcagttcattcataatttaaaaatttatcaaaaagaaggcgaagaaaatggaaaaccagtgatagatatcgatgtaaccatacagtttttggacaatcctgaaagctatgcaacactttttaaacagcttaacagtaaaaaagaagtaaaccaaaagcaattgctctcattgtttaaacttaatgaaacctctcatcgttggaattttccagaggataagaaatatccatgtaatgaaacacgaagccagatagcgagcaggctttcaaaattggatggttttgatgttgatgctttcttaactcaagaaaaatttcacgctttatggcatctcatttattcagttaccgataaagtggaatacgaaaaagccctatccacttttgccaagaaaaataatttacctgttgctaattttatagagaatttcaaacgattccctccatttgaaagttcttatggtgcctattctgaaaaagccattaaaaaactattgccattgatgagaatgggcaaatactggaatgaagaagctatttccaatgaagtaaaaaatagaattacagatattgtagagcgcctaaattctatagattatcaaagtgataaacttgatactattgctgatgatgatgtgccaatgcgcttattaaaatcctttgttaaatctaaaaatcgaacgcatccattacaaggattaaatacatatcaaacgtgttatgcagaatataatagacattccgaaattggaaatatcgtccaatggaagcagccagaggatattgataattatttaggaacatttaagcagcacagtttgcgaaaccctattgttgagcaagttgtattggaaacgctgcgcgtggttagagatgtatggaaatactatggagaaaaagaaatcaaaaaaggtagagaaatttacaaaccactttttgatgaaatacacgtagaattagttcgtgagatgaaaaacgacaaaaaaacaagagagcgcatatcaaaagcaaatacggaaagggaaaacaccaatgaacgtataaaggctttgctcgaagagttaaaagccgacccagaggttattgatgatgtacgaccatattctccaagtcatcaagaaattttaaaaatttacgaagatggattgttttccagcttaaaggaagttgatgagggtatcgaaaaaattagaaaaaagaataagcctaccaagtctgaaattgtgaagtacaaactttggttggagcaaggttatatttcgccatatacaggaaaaataattccactatcaaagttgttctcaacggcttatcaaattgagcatattattccgcaatcgcgttattttgataattctatgaacaacaagattatttgcgaaagtgctgtaaatgaagaaaaagataataaaacagcttacgagtttataaaagaaagaggaggagcacttatagatttagggcacggaaaatcagtttctctatttactttaaatgattatgaacagcattgtcaaacatattttaaaaagaacaaatccaagcttgaaagacttttaagtgaagatatcccagaaggtttcataaatcgccagctgaatgacagtaggtacatcagtaaaattgtaaaaggattattgagcaatattgtaagggaagatggtgaacttgaggctacttcaaagcatcttgttcctgttaatggagcaattacttcaaaattaaaacaagattggggactcaacgacaagtggaatgaaattatagtaccccgttttaaacgattaaacgaaaaaactaatagcaatgatttcggatattgggatgaaaagattaatgcctttagaatacaagtgcctaaagagctcgaacgtaattttagtaagaaaagaatagaccacaggcatcatgctttggatgcattagttatagcctgtacaacgaaagatcacatcaattacattacttcaattaacacagaaagaagaaattttgctttagtaagtaaattaagaaatacagaaaccattattaatagtaatggaaacaagagaactgttgcaaaagaatacttaaaaccttggaaagattttactactgatgccaaagatgtattggaaaaaacagtaataagttttaaatcaaacaatagggtaattaataaaacgaacaacaaggtttggaaatgggttaatgaaaacggacagttaaagaaaaaactggtaaaacaaaacagaggtcaaaattgggcgataagaaagcccatgcataaagaaactgtttcgggaaagataaacatggaggttcccaaaggaaaaattgcaaccgctacacgtacagagctaactgatattaaaaccagaaaacgcctagagtctattacagatatgagtatccaaaaaatacttgataatcatttaaaaaattatacagacgatagcggtaatgagaattttgaattggcgtttaaccaagacggtgttgacgaactcaacaaaaatattcaaaaattaaatggaggaaaacgtcatcatccaattaaaaaagttaggttatacgaagtgggagttaaattttctattggagaaacaggacagaagtctacaaaatttgttgaagcggctaaagggacaaatctttttttcaatatttattgggacgagaaaaaacagaaacgaacgtttgaaactgtaccactaaatgaagtcattgctcatcaaaagcaagttgcgcacgtaccaaaaaatgaaagaacagaggtgcaaattgataattctaaaggtaaatttctattttcattatcacctaacgatttggtatttgttccgaataaagatgaattgaataatccttcaatggtcgtttatgaaaaactgaatagagagcaattagagcgaatttacaaaatggtcagtagcagtggtaatcaatgttttttcattaagtcggaggtagcaaatttaatttggaacaagaaagaatattccgctttaaataaaatggaaaaagatattaatggtaacatgataaaaaatatttgctggaaattaaaaacagatagaataggaaacttgaacggtctaaaattatgataaaacgcaccctgtttttcggaaatccagcctatctcagtaccaagaatgagcagttggtggttaattttcctgaagaagttaagggtgaaaagaccattcctattgaggatttaggttatgtggtactggaaaatccacagataaccgttaccaatggcttgcttatgaaattggttcaaaacaaaacggccgtcattacctgcgacaaacaacatttgccctgtagctttttacagcccttggttggccatagtgagcagacagaacgcatgcgtcatcaacttaatgccagcctgccgctaaaaaagaacctttggcaacagacggttacggctaaaatagacaaccaagctgggcattttattgttagaggtaaaaatgcattacgtttaaaacgctatgccaaggccgtaaaaagtggcgattttaacaatcaagaagccttggctgccgcattttattttcaaaacctttttgatatcgatggttttagccgtaaccaaaaaggagtgccgccaaataatctgctcaattatggttatgccattcttagagctgtcacagcaagggctttggtaagtagtggtttattgccttcggttggaatttttcaccataataaatacaatgcgttctgtttggcagatgatgttatggagccttaccgtccctttgtagatgctttggtctatgatattgtggaaaccggttgcaatttagagacgctcaataccaatataaaatccgatttgttgatgattcctgcaatagatgtggtcattgatggtaaacgaagcccgttgatgaatgccatgagtcgtaccacggcaagtttatttgagtgttttgaaggcagtaagagaaaaatattatatcccgaacttaagagtgcgctagaaacctttacaagttaatatgaccgcgacctatggaatcttatctgtcacgcctaaaccaataccgttgtatgtgggtgctcgtattttttgatttgccaaccgagacgataaaagagcgtaaagctgcaacccgatttcgtaaaaatttgttgaacgatggatttggcatgttccagtttagtatttatacacggttttgtcctagtcgcgaaaatgcctcagtgcatataaaacgcaccaaaaatgctttgccaaaaaaagggaaggtgtgtattatgcaaataacagacaaacaatttgggatgatggaactctttcacggccaaacggaaatcgaaccagaaccaccaagccagcaactagaattgttttaatctatagattgtccccttgaggggactttaggggtgtttttttgtaatgtttaaacagtgccatgaaaaacaggctacagcaagtgtcctgagaataatcaattacctttcgactttgattaaggcagcaattaacacacttaaatcgattaaacgagattcatcgaattccattaaaaaatagtggaatgcattaaagcaattaaactgacgttttattatttgaattgaaaaaatgaatagaagataaataagtctgttataaaaaacaagaattatgcaaattctaagcttatatataaaaaacaggataccagcctgttacagcaagtatcctgtgaatcatcaataaaattaatgaactgaaagcaattcacaacggaaacggttttatgaacggttattttcctcctgtgaatcatcaataaaattaatgaactgaaagcaattcacaacgcctgttgttatttgttttacttcttgtttcctgtgaatcatcaataaaattaatgaactgaaagcaattcacaactatgactgtcgcgaagctttttattgttgacctgtgaatcatcaataaaattaatgaactgaaagcaattcacaactttaccctttgttacattttttaatactcccctgtgaatcatcaataaaattaatgaactgaaagcaattcacaacttacatttttaattgttattgtttgtttgcctgtgaatcatcaataaaattaatgaactgaaagcaattcacaacttacgggaaattaattcgctgttgtgggttcctgtgaatcatcaataaaattaatgaactgaaagcaattcacaactatgcttgtcgggtcgtttttacgtgcctcctgtgaatcatcaataaaattaatgaactgaaagcaattcacaactacttcctgttaattaaatcgttctcaaaccctgtgaatcatcaataaaattaatgaactgaaagcaattcacaaccctctatacgttgttctagtttagtgatgtcctgtgaatcatcaataaaattaatgaactgaaagcaattcacaacaggctacggactaagcgtctacatagacacctgtgaatcatcaataaaattaatgaactgaaagcaattcacaacaaaataaagatgcaaacggatttattaaaacctgtgaatcatcaataaaattaatgaactgaaagcaattcacaacacaaagcattaaactaaacaaaatgatagacctgtgaatcatcaataaaattaatgaactgaaagcaattcacaactacaatctgcataggtagtatatgaaatttcctgtgaatcatcaataaaattaatgaactgaaagcaattcacaactattatttttgcactcatttttcttcttaccctgtgaatcatcaataaaattaatgaactgaaagcaattcacaacattattaacaactataacaccagtatcatccctgtgaatcatcaataaaattaatgaactgaaagcaattcacaacaagtgctatattgcttagtgagtatttgtacctgtgaatcatcaataaaattaatgaactgaaagcaattcacaacacattacctttaataacaccacaatctaaccctgtgaatcatcaataaaattaatgaactgaaagcaattcacaactggtgtgcctagcactaaaacagtcttatgcctgtgaatcatcaataaaattaatgaactgaaagcaattcacaaccagacacgcagtttgatttggttggttatgcctgtgaatcatcaataaaattaatgaactgaaagcaattcacaacacggtaagtgttttagacagccttcattgtcctgtgaatcatcaataaaattaatgaactgaaagcaattcacaactgtttcgtcgtcgttttcgttaatgtcttccctgtgaatcatcaataaaattaatgaactgaaagcaattcacaacgccgcttccaaataaacagtcaagccatcacctgtgaatcatcaataaaattaatgaactgaaagcaattcacaaccggtactgtaaacgaattattacagcgttacctgtgaatcatcaataaaattaatgaactgaaagcaattcacaactagaaatgaaaacgttataattgaaactacctgtgaatcatcaataaaattaatgaactgaaagcaattcacaactctaactgcttatctaagatagtgttattgcctgtgaatcatcaataaaattaatgaactgaaagcaattcacaacaattagaatatatgttgatggtaagtttttcctgtgaatcatcaataaaattaatgaactgaaagcaattcacaacgtgataacttacataatttaccttaacaaccctgtgaatcatcaataaaattaatgaactgaaagcaattcacaacagaaacgactattactgtaaaggattaggtcctgtgaatcatcaataaaattaatgaactgaaagcaattcacaacagataatccttttatttcagtacaggaaaacctgtgaatcatcaataaaattaatgaactgaaagcaattcacaacttacgtgaaattaattcgctgttgtgggttcctgtgaatcatcaataaaattaatgaactgaaagcaattcacaacacgttttgaactcgctgtctttttcacttacctgtgaatcatcaataaaattaatgaactgaaagcaattcacaaccggtactgtaaacgaattattacagcgttacctgtgaatcatcaataaaattaatgaactgaaagcaattcacaacagacttgataaagggctactatctataaacctgtgaatcatcaataaaattaatgaactgaaagcaattcacaacagaaatggaacaaactccagcagagatggcctgtgaatcatcaataaaattaatgaactgaaagcaattcacaacgacctctgtattcattatattctgttttatcctgtgaatcatcaataaaattaatgaactgaaagcaattcacaacagcaatatcaaacatactaggcgaagaaagcctgtgaatcatcaataaaattaatgaactgaaagcaattcacaactctacacgatgaaactttttagagttcgccctgtgaatcatcaataaaattaatgaactgaaagcaattcacaacttaacgtcgtagtattattcatccactcaacctgtgaatcatcaataaaattaatgaactgaaagcaattcacaacacaaataacgaaaactaaaacatgtcaaaacctgtgaatcatcaataaaattaatgaattgaaagcaattcacaactgtgcaagcaccataaatcaaaacaataaaccagtgaattatccataaaattacggaactgaatcctgaaactcaaaattaaagaacattttattatgccctcactggcttttttacactataaaataaaaacaagccaataacgccagtaataaagaagcccataaaaagaggtaatactgaggttgttataaacgtacctatataatatgcaataggtacagccattatggtagaaataaatccgttgagcgcagaacctatgccagcaatatgtcctaagggctgcatagccaaagctctataattaccaaataagaacgctacacttgtaaattgtaaaattaaaaatacaattaataatcctatacttgggttatcgccagaccaaaataaaataacatatagtaaggaaatactaacaaatgccaatagcgcaatatttactaaattccacatcccaaaacgcataactatggcactatttaaaaatgtagccaatccaatagtaatcgctaaactggcaaaaatgtaaggaaagtaatggcccaagttatattgtacttgaaaaatttgttgcgctgtacccaaatagaccataaatgaacccatgattaagccagaaagcaacgtgtaaacaatagcagattttatttgaaaaaatagtattgagcctgttttaaaaatagaccatctaaatgtttttctgtatttgttttgtaatgtttctggttggcgcttccaaaaccatagcattattaaagagccaaaagctaagttgacattaaaaatagattcccaaccaaaatgatgcaataaaaattgtcctagcataggcgcaatgacagggactaaaataaatgtcatcgttactatagatagaatttttgccatatgatcgccactataagaatcgcgaacaatggcgatactcatggtacgtggtgaggataaacctataccttgtaaaacgcgcccaaaaagcacaatttcaaaatttttagtgctaatacaaattagtgaagcgataataaaaattccaaaaccaacatagaccatgggtttgcgaccaaagctatcagacagtggaccaaaaataagttgcccaaatcctaaacctaaaaatatagtaaatattaatttttgattttcagtggcattggcgctgtttaaatacgcacctattttaggtaaagccggcaaaaccgcatcaatagataaggcgacaatagacattaacgcagccattaatactacaaattctaattgggatcggttttctttttgcatggcgcaaaagtagttgaatataaccctaatttggggacactttaacatattaataatttcttaatatgtgttgcgttgttatgccatgaactcatgtttttgaatccgctgtaattcgtgttattttcaataacaacagcttatatttgcataaagaccattcgctatgaagcattataatgcaacgtcaaaatctaccaaaaccgaaaagccaaaagtaaccttaaagaccgcctttaaaaccatcatttggcctagacgtaaattggtgttattagggttaatacttattataatccgaagtttggctggttttgtattgccgttagaaagtaaagtattacttgatgaggttgtaccaacaaaaaattacaatcaactatatacgttaatcgccattgtaattgctgcgatattagtgcaagcattaacatcgtttttattgacaaaagtactcagcatacaggcgcaatacttaattagtgaattaagagctcaagttcaaaaaaaggtactgtcgttacctattagcttttttgacaacacaaaatctggtgctttagtctctcggattatgaccgatgtagaaggtgtaagaaacctcataggtacaggcttagtgcaattggtaggcggttcgtttacagccataattactttagttattttattacgcatgaatgtgtggatgacgctttttacatttattccgctctctatttttggtgttattgctctaaaggcgtttaaatatatacgaccaatttttagagcgcgaggaaaaataaatgctgaggtcaaaggccgtttaaacgaaaccttagctggtgtaagggtaataaaagcgtttaatgccgaagcacaagaaaacaaagtgtttgagaaaggtgtagaacatatttttcagaatgtaaagaagagtatgaccgcaaccgcaataatgacaagttcgtcaacgtttttaattgggttagccactacaggtattatgggaataggtggacactacatgattaatggcgaaataacaccaggcgactttttgcaatttacctttctgttagcttttatggtcgcgcctattgttcaaatgagtaatattggaagtcagttaacagaagctttggcaggcttagatagaacagaagagttaatgaatttggctgctgaagatgaacaagaggatagaaccatagaattaccagccattacagggcatataaaatttaatgatgtctctttcgcctatgaaaaagggaaacctgtgcttcatcatattaattttgaagcgccatcaggatctgtgattgctttagtgggtagttcgggttctggtaaatctaccattgcaggcttgtcggcaacgtttcttaatccagattctggagtgataactattgatgacaaggatttgtctaaagtgaagttgagtagttttagacaacacttgggtgtggttttacaagatgaatttctgtttgaaggttctattagagaaaacataatgtttccaaggccacatgctacagaagcgcaattgcaatatgccgtgcaagccgcttatgttaatgaatttacagaccgttttgatgaaggtttagacactttaattggtgagcgaggtgtgaaactctcaggtggtcaaaggcaaagaatagctatagcaagagccatattagcagacccaaaaattattatattagatgaagcgacttctaatttagatactgaaagtgaaagcttaattcagaaaagtttatcagaattaaccaataacagaacaaccattgttattgcgcaccgtttaagtaccattaaaaaagcagatcaaatattagtcatagaagctggaagaatcgcagaacgcggtacgcacgacgagttgttaaaggcgaaaggacgctattatgatttatatacgtttcaggcaaaaatttaaatttatttgtaataaaaaaaaactatgataaccgatactttaatcattctttttgagagagaccttaacaaattaatagaagaggtagggctttataaacaagcctctaatttatggaaaacagatgggcaaatttcgaattctgcaggcggattatgtcttcatttaattggtaatttaaaccattttattggcgcaattttaggagattctggctatgtaaggcaacgcgatctagaattttcattaaaagatgtgccagcatcagaattggttttgcaaatcaaagctacgctgattgtggttaaaaacacaattaaaaatcttacagaagagcaattacaggccgattatccacttgaagtgtttaataagccaatgaccactatgtattttttaatgcatttagaatcgcatttagcctatcatttggggcaaattaactatcatagaagattacttgaccaataaattttggtggtctacactataaagcgcatttgcggaagtgcatatagctttatggcaatggcaatcaataaaaaaaaccttacctgttggttaacgggtaaggtggttgtacgttcttataaaggtatatttccgtgtttacgatgcggtctgtccacgtttttatgttctaacattttaaaggcttttatcagtttgcgtcttgtgtattgtggttcaatgacatcatcaataaaaccacgttctgcagcactataaggatttgcgaatagttgcgcgtattctgcttctttttctttccacatagcctctttgtcttcggcagcgttgatatcgcgcttaaaaataatttcagcagcaccttttgcacccataactgcaatttcggcattgggccatgcaaaattcatatcagcgccaatgtgtttagagttcatgacatcgtaagcaccaccatacgcttttcttgttatcactgtgattctaggtacggtagcttcgctaaacgcatagagtaatttagcgccatttacaattataccattccattcttgatcggttcctggtagaaatcctggtacgtcttctaagaccaatagcggtatattaaagcaatcgcaaaaacgaacaaaacgcgctgcttttttagagctatttacgtctagaacacctgctagaaacataggttggttggctacaataccaatgcttttaccgcctaaacgcgcaaaaccaacgataatgttttcagaaaaatctttatgaatttcaaaaaatgaattgacatcaatgataccgtttatcacctgatgcatatcataaggtttgtttgggttttcgggtacaatggtagataatacatctctcagttcttctgcaggtacaaaaggcaaatcgtctggtctactgatattgctttgtggtaaataactgagtaaggttttaatgtgttctaggcactctacatcgtttgaagcggttttatgtgctacgccagacttagaagaatgcacactggcacctcctaattcttcactgctcacttcttcattggttactgtttttaccacattaggaccagtgacaaacatataactggtgtcttgtaccattaaagtaaaatcagtcatggctggtgaatagacagcaccacctgcacaaggtcccataattgctgagatctgtggtataacaccagacgcttgtacgtttctgtagaagatatcggcatagccaccaagggatcgcacaccttcttgaatacgagcgcctccagaatcgttaagaccaatgattggcgcaccaacattgacagccaaatccattattttacagattttttcggcatgggtttcggataaagaacctccaaaaacagtaaaatcttgcgcaaatacatagattagttttccattaactgtgccgtaacctgtaacaacaccatcaccataaaattgctgattagccatcccaaaatctttggttctatgtgtcactaaggcaccaatttcttcaaaagacccttcgtctaataggtacataacacgttctcttgcggttaattttttcttttggtgttgtttgtctattcgtgcttggccacctcctaattttgctaaggcgagcttatcgtgtagtgttttaattttggaatccatattttatttttttgttattctgaccgtat

SEQ ID NO: 1192 - DNA, 24401 bp, synthetic construct
  variation 9671..9684: note = n is a, c, g, or t
  source 1..24401: mol_type = other DNA
  misc_feature 1..24401: note = Synthetic
  variation 15968..16024: note = n is a, c, g, or t
  variation 18720..18765: note = n is a, c, g, or t
  variation 15810..15874: note = n is a, c, g, or t
gggcatcaacaacgattaatggaaacagacttccgacagccgaagaagaaaccacttccagagcaactgcatttgactttttcccgacagaactgatttcttacgtacatgtcaacaaatctttcactcccgatatggaagcagacggaattggcggcggcgtgaatttcatcaccaaaactcctcccatgaaaaccgagttcagaggaactttaggaaccggatacaatgcgaagtcggataaaggcgtttataatctgggattgctttacggaggaagaacaaaggataaaaaattcggatatcttgttaacttttcgcactttatcagaaactggtcaacggataattttgaagccagaagaagtggtgacgaaggggttttcagaatggaactccgtgattacaacggggtaagaaaaactaccggtgcaaacgccgcattagaatatgtgctatcgtcaaaaagcacattgtatctgaaaggaatgtacggaactctttctgacgatgaaacgcattacaaacacagagtgcgattcgataaattcagtgctgcgaacaatacggcgagagttgaacttcagaatattcataatttgctgattacagaactcacttcagtttctttaggcggagttcatcagttcagtaaaagtaaaattgactgggatctttcgtattacaacaaccttttcaagtacggaaatgttcccgacaagcagaataattcctattttgtcatcaaatatactcaaaacggtgtaggtattaatccaaattatatttcagatcaaggaaatggtcccagagcttactggaaggcagatggtggaaagttagatttaaaggatcctgatgcattatttggtttttacagtgatccgaactttaaaatggatgccggacaaatgagattcaccgatttggaattctacaaagtctacgttcaggaaaaagataaaatcgttgcaggtttcaatcatgaaatcacagcctctgatgaattaactttaaaatacggattaaaataccgagataaagaacgtaacgcgcgcttttctgatattttctataattggtcaaatggaacggctccactgttatcagattttggtcagcatatcactacccaagatggaggtgcgaattatctgagtgagatgaatacgaatatcggaaacaccttcggtccggttctttccactggcggaatgaatcagttctggtttcagaatcagggaaatttaaccatcaacaataccgattctgaagcactggaatacaacaaagcattgggaagaaatttcgacgtttttgaaaaacatgcggatgcctacggaatgggaacctacaaaatcaatgacagaataaccattttgggcggtttgagattatccaacacgcacaccaaagtaaaaggttacaatgttattgaagatgttttaacacctgtggaaaataccaaaaactatattgcggtcttaccgatgctgcacttgaaatatatgatcagcgacaaaaccaatttgcgatttgctgcaacacgtacgttctcaagaccaaattttggtgatttaactcctggcggaacttacattgaagcggacaatgagtttaaaggcggaaatccaaacctgaacccgacatactctgtcaaccttgatttaatgggtgaatattatttctccaatatcgggattttgagtggtggcgttttctataaatcaatcacagacccaatttttcaggattctttcattggaaattataatggaatcaatggcgtacaattcagtgctcccaacaacggaaaagcagcatggctcggcggaatcgaactgggaatcaacagaagattcgactttcttccaggcttcctgcagtatttcggaacgcagctgaatgcaaccttcatgacttctgaaatggaaaaaccaagtggcagaatggtaaaacttccttatcaggcgaaggaactgtacaatattcaactgttcttcgagaaaaaagggttcaatgcaagactggcttacaaccacaaaggaaagtttgcagtggagtatgctgaagaagatctttacgattcctactacggaaaatacagcaaccttgactttggaacctcataccaaatcaataaacacatcacggtttttgctgatgtcaacaatattctgaacaaacctttgatctatcatttcggaaaagatgagcaaagaccggagcaggtagaatattacggtgtacgaggaaatatcggagtcaaacttaatttctaaacgatgatgacctctccatcaaaaaacaacacagtgagtgtaactctgaaagcggccatcgctgctttcggggtctacttctgcatgtatgctttcagaaaaccttttgcggtggcctctttcagtaacctggaattctttggttttgattataaaattttaatcatcattgcgcaggcagtaggatattttatttcaaaatttatcgggatcaaatttatctctgaactgaagcctcagaaaagaatccttttccttttggttttcataggaattgctgagcttgctttgttgggatttgcagtagttcctgcaccctacaatattctgttcatgttcatcaacggaattcctctgggaatgatctggggaatcgttttctcctacgttgaaggaagaaaaaccacagaaatcatcggtttgtttctctgttcaagctttgtggtttcttcaggtgtggtaaaatctgccgggaaatttttaatggacagcttcgggattacagaattctggatgccttttgccacaggcttactcttcatcattcctctgattgtttttgcagttctgctcaataaaattccagctccggatgaagaagatattgccttaaaaaaagaaagaaaacctttgagtgaagaagaaagaagttcgttggtaaagaaatttttccttccgttggtcagcattacgattctttacatctgtctgacagttttaagggatttccgtgataatttcagccgggagatctgggacgaaatgagcggcactgcagacagttcggttttcacactcactgaaattcctatttccatcatggttttactgatcctgggattgatggtgaaagtaaaaaataacagaaaagcatttgcttactatcattacattctttttggcggaattattttagtggcgttctccacgattttatttcagggcaacattatttcaccatttttatggatgacggtatcgggtttcgggatgtatctctgctatattccttttaacggaatttatttcgaccggatgattgctgcttttaaaattaaaggaaatgtaggattcttcatctatttcgtcgatgccttcggatatttaggaagtgtttcagtactctttctcaaaaatttaggttcatcgaaccgctcatggcttcagttttacattcatcttaattatattatcgcagcagttgttctcattttttcggtgattgcttttttggcatttcaaaagaaatcagtatcaaaatccggtgcagacaacggagaaacatcacagccgattcgtttcgatgcttttaaaatttaaaaaaataaatatgaatactcaatatgatcttatcgttgtgggtggtggaatattaggaacattccacgcttatcacgcattacagaaaaacctcaaagtagccattctggaaagaaactctgttctgcagggcgcaaccgtaagaaatttcggacaggttgttccatcaggaatggacattaaatggcagaatttcggaaaggaaagtttaaagatttataaagatctgcagtctgaaactgatcttaccgtaagacagaacggctcagtctatatcgcctccaacgacgaagaacttcagctgatcgaagaactggctcagattaacaaaaacaatgattacgagtctgtcattctttctaaaagtgaatgtattcaaaagtttgacggactgagatctgattactgcaaaggcggactgttttttccacaggaaatctcagtagattcgagtgagatgattgttaagcttcatcaatacctgaaaagtcaggaaggtcttgatattttctacaacacaacggtggtagagactaaggaaaattattcgcagtgcacagtcataacctctgacggcaagaaaatcagttcttcaaagatcatcatctgtggcggacacgagtttaaaactttgtatcccgaagtttttaatgaaagtgatctcgaagtaagtaaactgcagatgcttcagaccaaaccgcagggaatttattcgttacctggaaatattctgaccggactttccatcagaaggtatgaatcgtttaccgaatgtgcctctttcgccaaaataaaagaaagtgaggataaagacgcgtttgaaaagaaatttggagttcatatattattcaaacaggctctcgacggttcggtgattatcggcgattcgcacgaatatgcagacgccagaaatgctgatgatcttggctacgatctgaatatggacattgacgaatttatgatccgcgaagccaaaaagatcatcgatctgcccacatacgaaattcagagaagatggttcgggatttattctcagtgcaagaccaaagatattttcgagcacaatgtttcgcccaacattcatatcgtgacgggcgtcggcggcaaaggaatgaccggaagcggtggttattcaaaatttaatatcaatacaattttttcttaaaacaaatgaacatacaattattggttctggatatggccggaacaacggtcgacgaagataatgtggtgtacaaaacactaacaaaagctgttaatgattatggctacgaagtgattttagataaagttcttgaaatctgtgccggaatggaaaaagcggaagccatcaaaaaccttctcgaaaacatcggcggaaatactgatgatacggaagcgatattcgaaagcttttctgatgatctggctgtggcttatgaaaatcttaatgtaaaacctattgccggaacagaagaatttttattaaaagtaaaatccacaggtagaaaagtggttttaaatacaggttatactcagaaaatagcacagcaattgcttaccaaactcaactggaaaagcggtgtgcattatgatgcactgattactgctgatgatgtttcggaaagcagacccagtcctgaaatgattgtcctggcaatgaaaaaattcggaattacagatccgaaggaggtcttaaaagccggagattccgccatcgatattcaggaagggaaaaacgctggttgcggagtgaccattgccgttttgagcggagcacaaaccagagcacaactggaattggcaatgcctgatcatattttaaataacctctctgaggctgaacatattcttttttaattacttcaaaaactgattacgggagttttctgtaatcagttttatttcggtttccaaaaattaaatcaataaaataagtattatgaaaacaaaacttttttctcttctggttcttgcgtcggcattgataggcgcacaaaccaaaaaagtcctgttcatcgggatagacggttgcaggccagatgtgatgatgtcatccaacaccccaaacattcagggattattgccgacttcaatttattctttagatgccattactctggcaccgacctggagtggaaatggctggagcacgatgctttccggagtatttcataacaaacataatgtgcaggacaacaattttacggctcccaattttacagcctatcccgactttctctccagaattgaaacgtataattctaatttgagaaccatctctttagcacactgggctcccatcaacaacaatattattcagaatgcagatgtgaaaaccaatttctctactgaccttgcagtaaaaaacgcggcagtatatgctttgcagaatgacaatcccgatgtgctttttgtggactttgatgatgtggatcatgcaggacattcttacggcttttcttcagctgtgcctcaatacgtgaattctatccaaaccacagatgtttacatcggtgaaatcctgacggcaatgaaaaacagaagtacgtataataacgaaaactggttggtagtcgttacaacagatcacggagcaactgatacagctcacggtggagcaaaccttactgaaagagatattttttcaatttattccaatccgtcatttactcctcagcagatcagcaaaactcagattcagaatacgccaacgtataaccgaatgaattttcctgcaggaacgtatgcgaaaccatcagtgcagaccggttttaatttcggaacaacacaggatttcaccatagaattttgggtgaaacctaacgcgaattatagcagcgatccggtttttataggtaataaaaactggaataacggttacaacaaaggttttgtcatttcaggatattcggggcagacctttaaaatgaatattggtgacggcagcaacagactggatcttgtgggtggaaaattagtaaccaatcaatggaaacacatcgctgtaacgtttgacagagacggtctcgcaacaatgtatgacgatggagttccggtaacagtaggaaaaatgaacaccatcggtgacatcacgtccaacctgccattaaccatcaatcaggacggaaccaatacttatggtgtgaatctcgctgcttcctacaaagatgtaagaatatggaatgcaaaattatcgaatgaagccattgtgcagtgggctaatcaggatataacggcttcgcatcctttctattctaatcttttagcaaattacaaaatgaatgaagcgtcaggaaacactatgaccgattcagggcctttggctaataatgctgtcattaccggagcgccaacgagaaatcttcagacttcagaaacatttaccatccagaattatctgaatacgccgaggcaaaccgaccacttcccaacagtgctcaactggttgtgtattccggtcatgtctgcatggggaatagacggaataaacagaattcctgcctgcgacctcggaagcctggcggtaaatgagcatgtgaaaaacagttcggatcttacagtgtatcctaatccggcaagaaacgaactgacggtgaaatttaagtctgctgaaagtaaaatcaacctgcaggtcattgatttttcaggtaaaacagtattaactaaagatgtacagtcgtctacgggtgattacagtgaaaaattaaatatttcaaatcttcccaacgcaacttattttgttgtggtaaaagaaggcagcaaaagaacacagaaagcctttatcaaaaactaacaattagaataattaatttttggagtacagactgaatttttggtctgtacttttttattgttcatgatttatttctgtgctttcttaaaccagtttaagatttttaacgtttaataatcagacctttgtcctgtaaataaaaagcaatgaaaaacagttttatccatctcccgcagttatttctgagactgtccatttcggtgaccatgctgtctgcggtggcagatcgctttggactctggggcgaaaattccacatggggcaattgggaaaactttgaaaaatacacacagcagctgactttttttctgcctgaaagtatagggtgtttttcagtatatgcagctacatttttagaaattcttttttcgctgatgctgattacgggatttaaaacaaaattggcagcatggggcacaggctttctttttctgatttttgctctgtcaatgagcatttcactgggcatcaaagcaccgctggattattcggtttggatagcttctggagcagctttcttattggcagtacagacagaatttaaatattcaatagatacattaattaaaaaatcataacagttatgagcgcaagattcaacatggcaactgtacacagtgccgcttataaagcaggaataggaatggaggctgcccttcagaattcttttctaacacccattcagaaagaactgattaaaatcagagcatcacagatcaacggatgtgctttctgtctcgacatgcacaccaaagatgccctgaaatacggcgaaacaccacagcgtatcttccttctcaacgcctggagagaggcaactgaactttacaccgaagaagagcagatcatcatcgccattgccgaagaaatcacactcatcagccagaacggacttacggaagaaacttatcagaaagcaaaagctttgttcactgaaagccagattgccgatattattatggcagcagtctctatcaatatgtggaacaggatcgcgatctctacgcatctgccggtaggagggtaggagtttggaaatatcaggaattgcctccgtaaaaatacggagcaatttccgtgtttttacggttgcgttctgttgtttttgtgttttatatttacagttaaggattgatttcacaccagtcaaaaaaaacacaaaaacatttattttatgaaaaaagaacaaaatccgatggcgattgtgattgattatttggccgccatcctgcagaccctttgtgaaatcagggatgcactcaaacagaaaacatcccgggatgaagaactcattgatcaggccgatgcaaagagaattctaaaacttggagataccgctctgtaccggctgcggataagcgggaagattccctacagaaaaattggcggaaaaatttactacccgaaatcattcttcaacaatgccttcaattcctgaaggctttttttgtgcccattcttttgcttttcttcgggatcactttgggttttcttcggaaaaagtaccgttttcccgaacgaaacccgaacaaaacccaaatcattccgaagccaaacctcttccagccgttcaaaatcattcaatatctttcagaacagttcacttttgtcggaggcggttgcagtgaaggtattgtgttttaactttgggtcattaaccattaaaaacagataaaaatggctacatttaacaaaggtatccttggaggatacagaggaaaagtgggaacagtagtaggaactacctacagaggtatggacgtcatccgaagcctgccgaaaaaatcatctaaaccgcctacagaaaaacagctgcaacaacagatgattttcaaactggtaacggcatttctgcagccgctgaaaggcattcagaaccagtttttcggaagcaagcagggaacaaaatcgcgcaccaacatggcacagtcgtacaccatgaaagagtgtgtcagcgtcaacgcaggtattccatcgcttgtgtacacgaaggtgatgattaccaaaggtgagctggcaggttttcagaatgttctgagttctgcagagcccaatcaggttattgaatttacgtgggacgacaattccagtcagggcaacgccagtgccacggatcaggcttctgtagtatgctggtgcgaggagaccgccgcttttgaaatcttcgaaaacgtcgctacccgcacatcaggcaccgcctcggttaccctctcgtctttctattccggtaaagacgtccaggtctgggtcttcttcaccaatgaatcgcagaccaccgcgagcaacagtccgtnnnnnnnnnnnnnntttttttttggatagaacagttaaaataagaaacaattgttgaatcgtctacaaaacatttaaagctagttgccccgccttatatgttttgttcattatttatgataaacacaaaagtgttcacgaaacatttggacaaaaaaaatgccccgaagatagtcgaggcgctaaatgttttcacaacggaataatccttattgtgaattgctttcggtttcaaagataaaaataaattttttattgcaattgatgaaacccgtaaggaacttaatttttttctctttatttttaagcaatttcaaaaaactcaataattatgactaaaaatatacttggattagacttgggaacgaactcaattggatgggcgttaatcaaacaagattttgaaaataagcaaggtgaaattcttgggatgggaagtagaattattccaatgtctcaggatgttttaggagagttcgggaaaggtaattctgtttctcaaaccgctgcaagaactgattatagaggtgtaagaagattgcgtaaaagatttcttttaaggagagaaagacttcacagagttttgaatgttcttaattttctgccggtgcattatgcttctcaaattgattttgagaaaagatttgggaagttcaaagaggatactgaaccgaaattggcttataataaagaaggatttattttcaaaaactcttttgaggaaatggttgccgattttagaaaacatcaacctcaacttttagaaaacgataaaaaaatcccttatgactggacgatttattatctccgtaaaaaagcgctttctaaaaaaatagagaaagaggagttagcttggattcttttgaattttaatcagaaacgtggttattatcaattgcgtggtgaggaagaagaagaaaacccaaataaattggttgaattttattcattaaaaattacagatgttttagcagatgaacctcaaaaggggaaatctgatatttggtattctttgattttggaaaacggttggatttacagacgttcaagcaaaacgcctttgtttgattggaaagaaaaaacaagagattttattgttaccactgatttgaatgatgatggttcaataaaaactgataaagacggaaatgaaaaaagaagttttcgtgcaccaagtgaaaatgattggacactagtaaaaaagaaaaccgagcaggaaattgacaaatctcaaaaaactgttggaacctacatttacgaaacgcttcttcaaaatccgaaacaaaaaatcaaaggaaaattggtttgtacgattgagagaaaattttataaagaagagctcaaacagattttagaaaagcaaaaagaatttcatcaggaattgcaaaatgatgatttgtacagcgattgtgttcatgaattgtatcgaactaacgaagcgcatcaattgactttgagtaaaaaagaaattgtgaatctatttatggaagaccttattttctaccaaagacctttgagaagtcaaaaaacttctatttcaaactgtactttggagttcagaaaatacaaggatgaaaatggagtagagcacacgcaatttttaaaagcgattccaaaatcgaatccttattatcaggaattccgcatctggcaatggatttttaatcttaatatttataaaagagatgatgattccaacgttacaaaagaatttttaaatacaactgaagattttgaaaatctgtttgaatttttgaataacagaaaagaagtcgagcaaaaagcattgttgaaacattttaaattaaatgaaaaattacatcgctggaattttgttgaagataaaaaatatccttgcaacgaaacaaaaactatgatttcaacaaggttggataaagtcgaaaatatttctaaagatttctttacaagagaaattgagcagaagatttggcacattatctattccgtaaatgataaaattgaatacgaaaaagctttaaaatcttttgcaataaagcataatctagatgaaaattctttctttgaagcattcaaaaaattcccgccattcaaaagtgagtacggctctttttctgaaaaagcaattaagaaattattgcctttgatgcgattggggaaatattggaatgaggatgaaatcttaaaatatagtgatgattattttaaaaatatagaatctttattaggtgtgctgaaacaaagagatgaaaacatctctgacgctgaccgcgaaaattataataaaacaataaataataaacttcgtgcggaattagaaaattttcaaaatgcggaaatagaatcttttcaaggtttaagattacatattgctcaatatattctttatggaaaacattctgaaggagataataaaaaattcaattctgcagatgatttggaaaagtttttaaaagaatttaaacaacattcacttcgcaacccgattgtggaacaagtgattacagaaacgcttcgtgtggtaaaagatatttggacaaaatatggaaacggagctaaagatttctttgatgaaattcatattgaattaggaagagatatgaaaaaaacaagagatgaaagagcagatgcgacaaaaataataacggaaaatgaaaatacgaatctccgtatcaaagcgcttttggctgaaatgatgaatgatgtggaaatggaaaacgttcgtccatattcaccaatgcaacaggagattttgaaaatttatgaagatggaattttaaaatcagatatagaaattgaagatgatattctcaaaataagtaagacggcacaaccttcttcgtctgatttaaagagatataaactttggctggaacaaaagtataaatcgccttatacaggacaaattattccattaaataaattgtttactccagaatatgaaattgaacatatcattccgcaaagtcgatattttgatgacagttttagcaataaaatcatttgtgaatcggcggttaataaattgaaggataattacattggtttaggttttattaaacaatttggtggtactatcgttgaatgtggttttggaaaaaatgtaaaagtttttgaagcagaagaatatgaagattttgtgaaaaaacattatgccaacaatcggggaaaaagaaacaaacttcttttggaagaaatccccgaaaagatgattgagcgacagatgaacgatacgcgacacatcagcaagtatatttcaggtgttctttcaaatattgttcgtgtagaagatggaagcgatgaaggtgtgaattctaaaaatatagttcccggaaacggaaaaattaccacccagttgaaacaggattggggtttgaatgatgtgtggaatgaattaattctcccacgttttgaaagaatgaatcaactgaccaattcaacagattttactgcgtggaatgaaaatcatcagaagtttttgccaactgttccaattgaattttcgaaaggattttcaaaaaaaaggattgaccatcgccatcacgctctggatgctttaattattgcctgtgctacgaaagaccacgtaaatttattaaacaatcaatcagcaaaatctgatactaaacgttacgatttgaaaaagaaactgatgaagtttgagaaagtggtttacaatcatccacaaacaggagacagaatcgaaagggaagttccgaaacaatttttaaaaccttgggacaatttcacgtttgaagcgaaaaataatctagataaaatcattgtaagctttaaacaaaaccttcgtgtgattaacaaagcgactaattattatgaaaaatttgtggagaaggatggtgtgaaaaccaaagaaagagtagaacagaaaggaacaaattgggcgataaggaaatcattgcacgaggaaactgtttctggtaagatagatttaccttgggtagaaacgaacaatggagaattcataactgctacaagaaaatctctggatgcaagtttcaatttggaaaaaatcaagaagattacggatactggaattcagaaaatcctcagaaattatctaaaggcaaaagatgataatgcagaattagctttctcaccagaaggaattgaggatttgaacaaaaacattgaaaagtacaacgacggcaaatcacatcaacctatcgttagagttcgtgtctatgaaaaaggaaaaggaagatttgccttaggacaaactggaaataatattgataaatatgttcaaggttctcctaatttattttttgcaatatataaagatgaaaatgggaaaaaaagttatgaaagtattcgtttagatattgtaattgaaagaatgaaacaaggtttgcaagcagttcctgaaacaaatccaaatggaatttctttgtatcaaaacttgtctccattagatttagtttacattccaacagaagatgaaatagaatcaccacatcttattgatttcacaatattgaataaaacaaggttggaaaggatttataatgtaaatgatttctcgggctacacaatttattttagtcaaaattcatttgctaaaaatatttatccaaaagaaatggatatgacttggaacgaaaaaaagcaaaagccttcaggttcatttgattctaaaacagcttcttataataagaaatctataaaagacatttttattaaattaaagattgatcgtttaggaaacatctcaaaagtatcaaatacattatgatcacccgctccatatacattggtaatcccgcttatctcaagctcaaagatgagcaaatgtacattatggaaccttcctcaaacgagatgaaaggaaaagttccggtggaagatttgggtttgctgatgttggatcattttcagattaccatttcccatcaactcattcagaaaatgatgggaaataatgttgtagtggtcagttgcgattctcatcatttaccgcacggaattatgttgccactttatggtcacactgaacattctgatagggtaaaagaccaattggaggcgagcgaacctctcaaaaaacaactctggaaacaaaccatagaatgcaaaattgaaaatcagaaagaagtgctttgtcgattaggaaactattacgagccgatgattgattataaaagcaatgttaaaagtggcgatattaccaatatggaaggtattgctgcacaacactattggaagtatctcatcagtttggatttcctcagacagcgttttggagattcgccaaatcagttttttaattttggttacgctgttcttcgaagtattgtagcaaggtcaattgtagaaacaggattgcttcctgtcctgggaatttttcataaaaataaatacaatccctattgccttgccgatgatttaatggagccctaccgaccttttgtagatcttttggtcatgcaatggcttgagaaaaatcccgagattgaagaattaaccaaagaattcaaagcccacatcctgcagattgccacaaaagatgtgctgatagacacgaaaacaagacccttgttggtggcggtaaaatcaaccgcttcttcgctttacaaatgctacacaggagaaaaacgtttaatttcttttcctgaattaatttaaaactgcccataaaacaaccttccctttagaggtagttttgggaaaggcctatgaatgccgaaaggtttaacgcttacagaattatgtgggttttagtattgtacgacttgccgacagagacaaaaacgaatatgcgggatgccagtaaattccgtaaaggtttgctggatgatggttttacgctttttcagttttcaatgtatgttcgccactgtccgagtcgtgaaaatgctgaggtacatattaaaagagtgaaatttatgcttccaaaagctggtaaagtagctattatgtgcattacagacaaacaatttggtgatatcgaaattttctttgcccgaaatagagaagaaccgccgccgactttccaacagctcgaacttttttagctgcatgtcactacgagaaacgaagcagtcttgacttagaaatagaaatatccactattgtaattctttcattaagtaaaaaagcaaaaacagtatttctaaaacaaaaacaaaccctctgaaaaacagnnnnnnnnnnnnnnnnnnnnnnnnnnnnnnnnnnnnnnnnnnnnnnnnnnnnnnnnnnnnnnnnnagggttaaattttgaggctgttgtgtatcccaaagataccgaaaaatgaaagcaattcacaacatactgacacactgacactgactgacacacnnnnnnnnnnnnnnnnnnnnnnnnnnnnnnnnnnnnnnnnnnnnnnnnnnnnnnnnngctgttgtgtatcccaaagataccgaaaaatgaaagcaattcacaacgcggtttcgcttacgtcggtcgaaataaaggctgttgtgtatcccaaagataccgaaaaatgaaagcaattcacaacgccgcagatattgagcagatcgcgcaaaaagctgttgtgtatcccaaagataccgaaaaatgaaagcaattcacaaccgcccggcgcggtgatcgtgtttgtcgaaggctgttgtgtatcccaaagataccgaaaaatgaaagcaattcacaacatattgacgcggaaatttatagcggggtctgctgttgtgtatcccaaagataccgaaaaatgaaagcaattcacaacacctaatgtagagcttaaattttcgggatagctgttgtgtatcccaaagataccgaaaaatgaaagcaattcacaacaaagctgaagaaaatggatacataaatgtagctgttgtgtatcccaaagataccgaaaaatgaaagcaattcacaacactaatggtatagatttcattaaaattgaagctgttgtgtatcccaaagataccgaaaaatgaaagcaattcacaaccaaatatctacactcataatttatttttttgctgttgtgtatcccaaagataccgaaaaatgaaagcaattcacaaccaacgaaagccggtggtgacgtacgaatttgctgttgtgtatcccaaagataccgaaaaatgaaagcaattcacaacgggtgtaacctgctgattctcaatagcttagctgttgtgtatcccaaagataccgaaaaatgaaagcaattcacaaccatagcttaactcgtttgagaaaaaggtgtgctgttgtgtatcccaaagataccgaaaaatgaaagcaattcacaaccgcctccccgctttcgcttggttgccccgagctgttgtgtatcccaaagataccgaaaaatgaaagcaattcacaacaaagtttatgacctggaaaacgattcctttgctgttgtgtatcccaaagataccgaaaaatgaaagcaattcacaaccaacaaatggatgaacaatcgtggtcgagagctgttgtgtatcccaaagataccgaaaaatgaaagcaattcacaacactcagatcgaagaggtcgacgcggcgcctgctgttgtgtatcccaaagataccgaaaaatgaaagcaattcacaactgatgtcagcagtggtaatcattattgtttgctgttgtgtatcccaaagataccgaaaaatgaaagcaattcacaacaagttttaaacttgcaattgtatcactcatgctgttgtgtatcccaaagataccgaaaaatgaaagcaattcacaaccaatactgaaacttctatttcataaccttcgctgttgtgtatcccaaagataccgaaaaatgaaagcaattcacaacaaccttccccttcaatgatgtttcacagatgctgttgtgtatcccaaagataccgaaaaatgaaagcaattcacaacatctttcttttcgctgaaaattttggaattgctgttgtgtatcccaaagataccgaaaaatgaaagcaattcacaactttcattgggtttgtagcgcaaacaaaaccgctgttgtgtatcccaaagataccgaaaaatgaaagcaattcacaacagttcgtttagttgtttgttgaatattgatgctgttgtgtatcccaaagataccgaaaaatgaaagcaattcacaacttattaaactcaactccatatcctgaataagctgttgtgtatcccaaagataccgaaaaatgaaagcaattcacaacacgatgaaagaggtttgcaaatccgtcacggctgttgtgtatcccaaagataccgaaaaatgaaagcaattcacaacgtacacgatgagatagtagtagaagaacccgctgttgtgtatcccaaagataccgaaaaatgaaagcaattcacaacacggtatcgtttttaaccaacgtgtccaaagctgttgtgtatcccaaagataccgaaaaatgaaagcaattcacaaccggaatacgtcaaatccacaaatccattttgctgttgtgtatcccaaagataccgaaaaatgaaagcaattcacaacagcacagacgagggtatccttgtttctgaagctgttgtgtatcccaaagataccgaaaaatgaaagcaattcacaacgagcagtgaagacaatatttccggtggtgtgctgttgtgtatcccaaagataccgaaaaatgaaagcaattcacaactacggttttcatctgttgttagttcaattagctgttgtgtatcccaaagataccgaaaaatgaaagcaattcacaacaagaaataatgaggcaatggttagaggcgcgctgttgtgtatcccaaagataccgaaaaatgaaagcaattcacaactggcggttagggctttatcctgttcagcgtgctgttgtgtatcccaaagataccgaaaaatgaaagcaattcacaactggaaccagtcggcgatatactgccctgaagctgttgtgtatcgcaaagataccgaaaaatgaaagcaattcacaaccaaaaaaggtttccaatatcaaactgtttcgctgttgtgtatcccaaagataccgaaaaatgaaagcaattcacaactacaatttgtaacacttttaatttggttttnnnnnnnnnnnnnnnnnnnnnnnnnnnnnnnnnnnnnnnnnnnnnnagtctcggctgtagctgttgtgtatcccaaagataccgaaaaatgaaagcaattcacaactatagctttaaatatccttaaaagtgaggagctgttgtgtatcccaaagataccgaaaaatgaaagcaattcacaacaatatttcgtcaagtcctccgttggtagctgttgttgtgtatcccaaagataccgaaaaatgaaagcaattcacaactcgttttgagatgacaaagatttaacaacagttgttgtgtatcccaaagataccgaaaaatgaaagcaattcacaacccttacgtctgcttaaggtctttttacggtgttgttgtgtatcccaaagataccgaaaaatgaaagcaattcacaacctttttgttccggatcccaacaaagccaaagttgttgtgtatcccaaagataccgaaaaatgaaagcaattcacaacgcttatcttttatgagtttttccgttcggagttgttgtacactttgagtgtctgatttaaagcacaattatggaagccaacaaccggcagccatcactactttaacatttttttaaataccacaataacggcctcggcattatattttcttaagtattggcataacaccaaaaaaaataatattatgtctaagaaaattgccattctggcgacacacggtttcgaagaaagtgaattgagttctcctaaagaacatatcgaacagcatggctggacggctcacattatcagtccggagagtgggagcatcaaagcatgggcagagaaagactggggtaaggaatatcctgtagataaaactttagatgaggtttcagcttctgattatgatgcactggtattgcctggaggggtgatcaatcctgataaactgcgtgtcaatgaatctgcattaagttttgtaaaagatttctttcagcagcacaaaccggtagcagccatctgccatggtcctcagattctcatcaatgctgaggtagtggaaggaagaaaactgacttcagtaaaaaacatcagtgcagacctgaaaaatgcgggagccaactgggaagacagcgaagtagttgtggatcagggtctggtgacaagccgtacaccggaagaccttccagcctttaacgcaaaactggttgaagaagtaaaagaaggaaaacacagcggacaaaccgtttaaagtctttcagttaaaagaaaaattcagcattcgttatccggatgctgatttttttggttcaaggtttaggatttaaggtttaagatttaagattcagatagtgcgactttcggaggatttttccacccgtgtcatcctgagcctgtcgaaggaagggctggggaagttagatgcggtcattaatttaagatccaagatttaaatagtacaactttcggagcatttttccacccatgtcatcctgggcctgtcgatggaagggtcggggaaagaaaattgcgatcaatattttaagattcaagatttagatagtacaactttcggagcatttttccacccatgtcatcctgagcctgtcgaaggaagggctgggggaagaaaaatgcattcaacattttaaaattcaagatttagatcgtacaactttcggagcatttttccatccatgtcatcctgagcctgtcgaaggaagggctggagatagaaaaatgcgttcaatattaatattcagaaaatcaaaaatgaattgagtaaatcttataactgccagtcagacacctctctgagcttctccacgttacggctctttgagtcttaccaaaaacagatgaacccgctgtatcctctgtgttcagaacaaatttactcatgctacttcccgcaagtgatctgcagtacattcgcgttcagaggctgctcaattttacgttccagtttctcggaaaggaccgtcacataaatttccatggagcctgttcccactttcagatcaagaatatgtccgccgtaagcattgaactgatcgtcagtggccacaccatgaatatgaattgaagggcctttgtcattccacgcaaccgatccggtgaggcttcccatttctacttttctgaaggttttcggattaaactttttcttctcaaaatcataaaagccgaacgtggcatctgaagcaaagccaatgcccgtgaagttggcagaaggaatattctctgtctttgccagattctctatgtgttcgagtactttatcgccttcccgcagaaccattaaatatcctgtgggtgttttggtgtagcggcatatttcagttttctgagcggtgagcaggcttaccgatgcaacagaaaacagaagaatggtgtttttaaaaatattcataggtttggtgtttgtctgttcaatgaaatatctgcaccaaacttctgatttagattctccaggataaattagacatttacacaagctgtggcttcatttctttttcgagcacttcagtcaggtgatctctgtacagtttcatgtcacggtttatatctgcatttttttcaacatcgtgaaagtgaaaaccatcgattttttctaaagaaacaaatgcattcatcctgtgaaaaccatagagcggaccgtcatcaacactggtttcataaaagaattctccgggaatagtaaaagctgttttcggtgcattccagcttgtggtgaccatgtattttcttcctccaagcatgccgcctgtaccgtagttgatctcgggactgtcagattttctgccgtcactcatgtaaataccctttgcatgaccggctgtaaaaacttcgtcaatatactttttaaaaccgttcggcagctgaaaccaccagattggcgtatggtaaataatcaaatctgcccatacaaatttttcaacttcttcatttctgtcgtaatcttcgctcacattggtgatcttaacttcaatatttcccagtgagtttaaaacctgcactgtattttctgtaacagtctgattgtattttccacctgaatgtccgaagttctgtccgccgttgatgatgagtacttttttcataattttttagattatttaaatttatagtgcaaagttatgatgagaatgggtattattaaaataatataatttatacctttgtattataattctgatggatgatggatgatggatgatggatgatggatgatggatgatggatgatgaatgatgggataaggtttttatttgggcagctgtttccgccctccgttcccgcttttttgctcgtcgtacctcctcacaaaaagagctccactcaggtcgggctgcatgtagccgggaatcaaaaattattttaaatagacagatattaatttaaaagaatggcctgttaataacgggatcaacggtttggacaggcaacaataaatgacgtgggatggtcaatgatgagtaatgagtaataggtaatgagtaatgagcaatgagtaatttaaagtaaacttatcaccactaacactcaacctttacctcagcctcaacctcagcctcaacctcagccttaaccttaaccttaacctcagcctcaacctcaacctttaaaccaaacaactatggtaaatctcgaatggtaccgcacctttaaagcgatttataaaaccggaatgttaacgggagctgctgattctctttttatttctcagccgggcgtaagtttgcatctgagctcgctggaagcgtatgtgggttacaaactgttcgacagaacgggaagaaaaatgattccgaccgaaagagggaaggtcttattcaatgcggtttcagaaccactgtcgaaactggaagaagtgaagaagaattttcagaagtccacggagaagaatacaccaacaatcagcgtgggaatgtgttttgaaacatttcagactacgctggaacagtatgtttctacactggattttaatttaatcatcagcttcggcgattatccagaaatgctcgatcagctcgataaaggaattctggatctcatcatcacacccaaaaaaggtacatcgtccaatattttgcacgaggctttttcttcagagcagattgttttggtaggaggaaaagatgttgatgtggatgaatttaatgaagttttaaaatcaaatgactttctaagagttgaagaatggctgaagcaggaaaaatggtacggcacgacgggcgatatggagcatctctttcagttctggcagctgaatttcgggcataaaccaaagttcagacccaactacattgtcccgaatctcaattcgatagtccgctgtctgaaaggaggaatcgggctggctgtagttcccgattttctctgtaaaaatgagatagaatccggagaggtgaaactgatctgggaaggaaaacaaaagctggaaaatacactctatttcggctgccgcaaaaattcagtataccagaacgagatcggtcatatcaaaggtctgttcagaaaaatgatgactaaaacagaacagcttccaatctaatgtaacagagagtccagcatcccgaatccagcaccccgaatcccgaatcccgaatccagcaccccgaatcccgaatcccgaatcccgaacctcgaatcccgaatcccgaatcccgaaccccgcatctcgtcaaacccccgtcgatatctccatcagaattctccacacattcatgtgcagccattcattataattctgaagatgttggtattgtggcatttttaccgtcgtgggaatatcaaaaaagggagtttttttctccatcgcctttttcgtttcctcatacagatcttcaaaatactgaatctgaagatccaggtctttccgtgagccaatggggcgcacatgagccatcaggaggtcattaaagcttaattttttgatttcatataaatctttcagccagttttgtggacttgcatcgggaaggtaggcataaagtacgcggtcaggaactataaggtcaaccgtgaagactgcatcgtgctcaggaaaacggaacacagtcattccgctgccatggtttttcccgtaatagtacagttcgatattttgtttccccattttcagggtgtgcttatttcctttccatgtttcgtcagggttaatgacttcgggattgggagggaaatttttaaatgcttcctcatgggtcataaattttgcaccttcttttttataaatttctccacccaaattgtgatcccagtggttgtggctgtaaatcacatattttacaggaagtttggtatgcctgcggatagatttcatggtctctctggcgatattcctgctgattggatcgatgaccacaacaccgtcatctgtaatgtagtacagagaaaaaacgcggtctcccacaagatagagattgtctttgtagcgatactctttaatcggctcctgagcagcaacagagagaaagaaagttgataaaaaaaagaataagaattttagaaaaatattttgcagacatcatatattaaaatttggattggaatcgtgacggagatttatatgtcagctaaaatcattccgacaagcctgttgtaaagagattttaaagttgaaactgaattacgggatatggcattttggaaaaagacacagatttatattgaatgttctcattatgaatttgttaaatatgaa

SEQ ID NO: 1193 - DNA, 24401 bp, synthetic construct
  misc_feature 1..24401: note = Synthetic
  source 1..24401: mol_type = other DNA
agtttaaaagcatctaacattttattaaagttaagcattgagacgttacaacaataatctttttgatatttactattagccattgtagctaagattaaatcaaagaatgatttgtttacttgttcaatagtaaatcgattaaaaacattctcaaatactatataaggattcttacattcatctttattcaaatatttaatcttctttagttcttcatcagatatttcagaaattgtgagtccttttttataaaacttctttggttttagatatatcctatatcctgctttaaatatggattgtaaaacagttgcatcatagataacctcagaagcactgattttatcatacatcttatgacttaaagtatagcaacagtaattgcgtaattgctcttgaaaatattctatatcggcaagttcttttagccatttgagtagttcatacggacattcaatatcttctttcgtccataaatgagattctaaagtaaaatcatacgttttcataatttatttttttaggttactcataaagttaccttactataaatcagtaaactattcgcatttatcggtaaattatacgcttaaaactaaagatgatttaatttaataataatgagtactagggtttgaaggaaaaacgataggtagatataatatgctcttttagaatagattaccgtaatccaagataagaacttgcagttgttaaccttaaacactgtaagcttatgaaaactaaattagaaatcaacgaattacaaggtattcctcttgtcgttcaagagaaacttctctatgagataaacaatgggaatgttgaattaatctttgcaacaagtcctcatttttcagctatcaagcaaataacggttgttctaaataaagatataccagaggctaaaaggcaagaactacaagaatcttcttggactaaagaagtgtttgaacagtttggtgtagttgttacgttttgtaaacatattgtattcccttttgaaagtgattttcactttacttatttatctctttatctaaatccacagtttattatttattctcgcaaagaaagtagttggggaagtttattacagaacttttatactttctccattagaaggcaactcttacagtttgataattgggtattggagataaagcaaaaacacgaggattataaagttcgttttattgattcacttattaaacagaagcaatttcaagctttattgattatgtatgtgcatattatacgcctttaccttcacagcgttcaaaacatgttgtttcctaaaagtgcttttatctttaattcagatgtagagctattggaatcaatagaaaataactacccagaactaagtcaaatctttatcaataatgaaattgataaagcgtatctgtgtaatctattaaatgttgatagcaatagcgatatgacaatcgaagaaaatgatcttactaaagttgaaagtctatgtactgctataagcgaacaatttgaaaaaggagtcaataacttttttactccaagaattgagtatctactaagcgatttaaaaggaaagcaaattttctctaaagtcgaatatgaacagtttatgctgaatgctgtaattaaaagactgcttcaaagctaccgcattgacttaatctatttgatagaaagtaaagtttctaatgactcaatagaattccttttgtttatagtcagtgctgatatcaagattcaaatggaacagcacatgtcaaccttaattagaaatcactttaatcaacgagttgaaatcacttgcctattacataaaaccacttggacagaacgtcatggcacaaagttcttgccttttatctacaagtacatcacagatgataatgtagtatatagtagaacctcaaaaaagcattctaagtttattcttcctgtttttgaattgcccgaagatactgatagttctaattggcaaaaggacttttggaaactatgccaagataacttagagagccaatggttacaaatgaatttgtttagttgttctatctatcagattggacatgttgtacagttaggaagtattttcaagcaattgtgtctttcatttttatataagaagctgaactatgtaccccattttgctagttctcgttacttgtggaaactcgtgcaatgggctgatagagattatagcaatcagttaatgaatacagaacagtcagaagctcttttctattttctaaatacaaaactgccttactttccaagacaatctacctctgctaataatccttcccaagagcagtatataaacacactacatatttgtaatcacttctacaatcacatcaaagaattatataccaattaataacccttaaatattttaaattatggaaactaaatttcaattactaaaagagcagaagttccctgagaaccttgagaaaaagctcataagtagtataacggataaacaagttactactatttggtacggaagagtttataatttatataatactcttcataaccttaaagtattatggcttcgggtaaaaaacaaagaagaagttactaaggtatttagtaaagagtatattaaagcacttttagaagataaaaatacacatattgtattattggatgataatgattttgaattgcaagatgaaatagggagatcttttaccaaattatgcttaggtggaactctcttgctctataaagatgacaattgtgagttgccaaatgattattgctactcatctgatgttaaaaagtataagtttaaatacatagaaacttataagcttttatcttcttactctgatgatttcatcaaagaggaaacctctggagtgtcttatctctatttaaaattctttgaatatgatttaagtgtcattgaaacaatgctctttggaactactaatacacaatgtaacctcacagaaagattgttattacttgagcgaatttttgctccaattaaaactctattcataaagactgacgacaacctatactacataatagattcaattaaaagggactctgaaactgcgttatatgatgattgggctttagcacttgagaaagttcaggtgaagttacataacatagttatacagttacttgacaaaattgaattagattcaagacaatataagataaaatcaaaaggtaaaacaaagaagaaaaaagtattcaagtatttagataaattactacctctgattaaatccaagggagtagaggaaatttacaaatttcatgaagtagttacctttgagaatgaaagaactgctaaacatttttatcttttggtgcttactaccaaagaagaagttgatgaaatgcaaaaagtaattgatagttttagttgtaaagatgagaatgttaggtttacgattatcactcattcaagactcttcattcaaagatatagttttgaaaacatacatttttttgaaaatgtaataaaagaagaaaatataatctactcaaatgggtattatccttccattcattggatggataattatgattgtgattatagtgaaactgcctttaagttagattatcctatctccaaaattaataagttaattaagaagaatattattaatcctaaaaaggaaggctttatctcaaccaataaactacatagatgcttatatataaagctacagatgtatgtgctttttcatacgaactatttaccacacacaacaaatttaaaaacactcatagatttagccatttatgcagacaatgaaaatgcgtctaagctaagtaagctgtttagtcaattagattcctttttgcttacctatacgcaaaagaatactacacagaaagacaataatctaatcttaaataataatactattgattcattaaagcagttttttgattttattgatgcataaagtgaatgtggatattttttattaaaaattgcacaaaattaggtgttaaaaaagaggaatacacagataaatagttgtttaatccccataaaatcaatacattcatgatatgaaaaaagggcaaaaactaacagctatttcaactttagggactcaattattttgggatactgatattaataatcttgattatcagaaagcatatattcccattatagcacgtgtaattgaacgtggagatcaaagtgaaatagatgaaatagttcgactttatagcaaagaaaaagtgctttttacaatatataaagagattacgttcttacctaattacgctattgaaagagctattaaattttttccagaacttagaaaagaagatatgttttgttatcaaaacagaaaagacaaatcctatcattggatataaacaataaaaaaggtagaattactatggatggtattctaccttttttatttaatataatcttaaataattgtcttactaattttgcgaccttcgggagaaaaacgagtggtctttgatactgaaaatttttcaatttgtaaggacaaagacacatctcgataactataatattaaatcttagctgttaataatatatcagaaggttattctgtgatactaacttaatatctacaattatcttttaacatactattggcagtagatatactgtaactaaataatttaaacttaccaggaattcaatcaatgcaacatttgttaatagattctttgtattgatttgtaaaagaataaagaaagggggtagttatttcattaaataagcctcattatctattaattgttaaaatccgataatttaatagagtaattattcatacgaaatattgctatttagctttgtattagatttttataagatgtaaatctattaattccatattctttttattatattcaatatatattataagtttaagagtttgtttttgttattttaaacaaatagatttgcgtaaatttaaaaatttaacaatgaaaaaattacttttattaacaggtttatttctgtcaattggtttatttagctttagtgattctataaatcttaaccaattagaaggttgtatggatgatggtgacactagctccatggattcagatgctccaacttgccaaggtggagcacgtacttgttgtgttgcagtaagtcagaaacattcttaatcaacaattaatcagttaaaagaggaggcttgattaagcctccttattgcactcgagaacatgaaaaaaaaaataattaatatcttagtcatcttactttgttcattatcatttatattcttgttattgataatgtcaactaaagaaaaacaaaaaatacaattcattggtgaacgatcttttaaaaacactcctacaattattagcaaaacacaattagataataattacgcacttttaaaaatctacaaggaagatattcttgttacaagttgggaaggagataatagaggtgtgatttttaaattagacttaaagtctaataagtttaaacaattaataaatttaaaagaaatagtaaataaaaacatttcactagctgattatcagtttattaatcaagatggaggtgattttttatattttgtaaatatttcagattcaaagaatatatttatcgttgcgaaaaatgaagttgtcgaaaaatactcaactaatcatgctattcaaagagtaaattttggtaaggaaggggtatttactacaacgtgggattctactattagtcctcagtattttaaaagtaacttaaaaaatagaattaccgagcctattcccttcgattattctagtaaatttaattactctggaatattacttgacggaattgttagttctgatgaaaattatataactataacttcttatgcacaaaatgtagtattaatatttgataataattttacatttattcgaagcatgaatttaaattttgtcaatcctgaatttaaatttaacgagatttcaggtagaggtcctgtaattaatcctaataatatttatcctaatatacatgccgatttatataaaaaacatttgtatgttttgacgaatgatacaggtgtttttgaagatgggaactattatatagatatttatgatttggttacagataagtatttaaaaagctataagtttaattttttagcaggagaaacaccaaaagagattaagataatagaagataaaatctatttattaactaataaagctttatatatatatgagaaaaattagtttaaatactttcagatatggattagttattttatatttttatactttaatccataagcttatcgacttgagttttcttgaagagaatttaagaaaatcagccttattaacagattatgctcaaagtgtaaaatatatacttccagcaattgaaattttagtgattatcttactggcggttaataaacttgctttgaaggggctatatttttccttactactgcttctgtcatttacattttatttaatcgcacttaataacttttctttcttcgagggttgctcgtgtggtggtatttttaatgaaatggattatcaaacacatgtctttgtaaatatcgcttttattgttttaaatgtgattgctataattttatatgatcctaatgatttgatatgataaaaaaagtattaattattttgattctttttaatcaaataaatagtattgcttctaatcattttttattatttcctaaagtagtaataaaagatactctttcaacaaagagtcaagattcattaataatgaaagaaattataattatgaagcaagaccttaaaatggataagggagacattatatttgatgtatggagttcaaagtttaaagaaggttttcaatcaactgatatattaaaaagaatgccttttgtaattgtttctgatcaaaacatattaattaaaaatcgagataatatcattgtgtatgtaaataatgttaaaataaatttagaaggaaaagatatgatagaatatcttgataatatccctactgataagattaaaaggatcactattagtggaaataattcatctaaattagagtccaaagttggaggtgtaatttatataacattaaaaaacacaaaaaatgaagttggatattttttaaactcttctgtgatacagaagcagcacactaattattctaataatttttcaactaattataataaaaataatcttactcttcgttatagtataaatttacttaataatagcactatttctgatatagaatccgagtttagaggaaaagaatctcaatggcttaagacattttctaaagttgatagaaataaaatttctcaaaatttagatttagattatcaagtaagtagtaatttaaatatagggataaattataatttaatattaaataagtcaaatgtagaaagtaataaccaattaaataataatgatttaattagtcaagaagattattataagagagaaaatattaaaaataatattttacttttttattcatcctataaaatagatagtttaggaagtaatttatcttttaatacaacttacttaagtcagcaattaactgataataatgagttgtattctttgaactatttagattataaaacctctactcaaataaaaaattatgatactaaattagatgtattattaaaaagagaaaagatattttatgaatttggcactaagattaatttaacaaataatgcttacaccttagaagagacatttaattttaatgaaaatctttatagcttttatgcaactacaggatttaaaattattgaacctatagatataaaaatcggtttacgatatgaaaattataattataaaatcgttgaagattatattaatagaaattttttaattcctaatctattgatttcttatacaaataatcaacatgctttgagtttttcttacaataaaagagtcattagaccctattttacatatcttaatcctcataaacgatttacatctagtgaatcatttatacagggctcaccaagtttaagaccctcaatatatcacgatttgaatttaacttattcattggacaacaaatttttctttaatttatattactcagatatgaagcagctaatgtcagctactgataaattaaatcatggagtaatagagaaaaaatatgttaatgattctgatttaagagttgctggtacaacagtaaatgttttattatctccatttccttggttaagctcgcagatgctattggatggactttattctacttctatcttgtatgataaaaaggctatttccaaaagtggatttgcatttaatttttatttaaatactgattttaaaataaatgaaaatattttcctttcaacttcattttcatatatcccgtcaagtgcttctttaaatgttatttataaatcagaatcgtctttatcactcgcaatgaaagggacagtgattaaaaataaattaacatacagaatatttgcaaatgatatttttaggcaaggacgaaaagatcaaaaagtttattttcaagattatataaatattgtgcatagttataatgatagtagaagtataggcttttctttaaattataaatttggaaaaaaaataaaaagtaagtattcaaatctttctatagagcgtgttgaaatataataggattttttaaacaacaaaggtacctataaagtgcctttgttgtttaaaaaatagggttattcttttcattaaaactcatagttatttgctgttcgaattcattgaaatgatgctctagtagattatgtaaataagcatatatagtaagtttatcatctgcaatgacctgaacaatacgagaaagtattttgtggtgctcaggatcaatgtaaaatgatttaccatgacgagctgtgctttttacatctttaaaaaagagttcttcatactccttgatgtcatactctttgacatatatttgttctttctttgcacgttttcgcttctttggtatctctttagtctcttcttgctcatctcctataccaaagagtattcagttcagattctgtaaatcccttaagccttacaccatcaaccattagtgccatcatcgcttcttcgtcaattctctgtttctttttaaattctccttccataatttctagtgcttttatctgtttataattctgttcatttagctatgttattagtcaaacataattctaactttttatttgtatctcctaatatttcagataataagttatataagggtattatctcaagtctatttgtgcgtttaatcgttgggagctctgtaaagtcgtagctacgatattgcgtttgtccaaccaaagcattgattagacaaataactagagatatagacaaagaatgaaaaaaaggtatttaagtggcatacttggcgttaactaataggtgttgaacagtattcacattataaaaaacatattgtaaatatgttgaaaaagttactgcaaaagtaacagcaagttatgttttgaggcactcaaaattgagattcgagctttcaaaactacttgctcttgcagagggctagaaaactactccgaagtcgttagttttgtgtaaaatagtagatagactcaagatattgagggttttacggaattccgtaatagagattagtgaaattattttatgtttttgaaaaaaaactcatgttactcagtcatttggctaatcgttataagttagttaagtacataatttacctataactaattttattaaagagcattacaatcaatatgttaatgagtataactctactgtaaacaaattaatattttcataagttcataaatattagatgaaaaatataagcacaaaaaagccccgaagatagtcgaggcactaaatgttttcacaacggaataatccttattgtgaattcctttcggcgtaaatatagtaaattttttgtattaatggataaatattagttaatttaaagtttataactaaaaaaatgaaaaatatattaggactcgatttaggcactaactccattggttgggctttggtgaaggaagactttgaaaataaacaaggagaaattctagggttaggaagtagaattattccaatgtctcaagatatattgggagaatttggtagaggaaattctatttctcaaacggcagatcgcacaggatatcgaggtgtacgtcgtttgcgagaaagacatttattacgtagagaacgtttgcatcgtgtactaaatattcttggctttttaccgaatcattatgccaaagaaatagattttacaaaacgacttgggaagtttattaatcatgctgaacctaaattatcatttgataaagaatttatttttaaggattcattcaatgaaatgttgaaagattttcagcaaaatcaacctggttttataatcaataagcatggagaagaagctttagtgccctatgattggacaatttattatttgcgtaaaaaagccttaactcaaaaaattgataaagaagaattagcgtggattcttttaaattttaatcaaaaacgtggttattatcaattaagaggtgaagaagaggaagaaaacacgaacaaattggttgagttttattctcttaaaataattgatgttattgccgataatgaagtaaataaaaaaggggaagtatggtattctttacatttagaaaatggatggatttatcgccgttcttcaaaaatttcattagtagattggaaagataaggttcgtgattttattgtaactacagatgttaatgatgacggttctgaaaaattagataaagatggagttgtgaaacgcagttttcgtgcgccaagtgctgatgattggacattattgaaaaagaaaacagaacaagatattgataattcgaataaaacagttggcgcttatatttacgaaaacttattgctcaatccgaaacaaaaaattaaaggcaagttggttcgtaccattgaacgaaaattctataaagacgaattgaagcaaatactagaaaaacaaaaggaatttcatcaagaattacaaaacgaacaattgttgcaagattgcgtacgtgaactttataaatacaacgaacaacatcaacaaatgttggaatcgaaagattttgttcatttatttttaaacgatattatcttttaccaacgcccacttcgtagccaaaaatctttaatttctaattgtacattagaaaaacgtgtttcgagagatggcgtagtttttcctataaaagtaatttcaaaatcgaatccgtattatcaagaatttcgtttgttgcaatggctacaaaatttagcaatttatagaaaggatgatgatgtaaatgttacacaagagtttctgaattctatagaatcttgggagaatttgttgcaatttttgaatgctaaaaaagaaattaaacaagagcaactgattaagtttttgttggaacaaaaaggtttaaaaggaaattctttaaaaactgcaatattaacgtatcgttggaattatgttactgataaggtttaccctatgaacgaaacacgttctttaattcaagataaattaaagaaagtagaaaatgtagcaaccgattttctttcgtttgataatgaaatggcattgtggcatattatttattcggtaaatgataaaattgaatatgaaaaagcattagctaaattcgcttctaaacacaatttagatgaaatatcttttgtcgaatcatttaaaaaatttccaccatttaaaagcgattatggaagtttttctgaaaaagctataaaaaaacttttgccattgatgcgttttggctcagtttggaataaaaataatattgttccgtctgtcttagatcgaatagataaaattttaacaggtgaatacgatgagaagattaaaattagagttcgtgaaaaagcagaacaatttcagttaaaccaaatagaagattttcaaaatcttccactttggttagcgcaatatgtagtttatgaccgtcattccgaagctgagattgccggaaaatggaattcggttaaagatttagaaaattatttaaaagaatttaagcaacattcattacgtaatccaattgtagagcaaataattacagaaactttacgagtggtgaaagatatttggcaacaatacggaaatggtgttcaaaattttttcgatgaaattcatattgaattaggtcgagaaatgaaaaatactgctgatgaacgtaaacgaattaccaattctgttactgaaaacgaaaataccaatttacgtatcaaggctttattagtagaattaaaagaagatacgaatattgaaaatgttcgcccacattcaccaatgcaacaagaaattttaaaaatttatgaagaaggtgttttaaatgcagttgaaaatatcgatgaagatattttgaaaatcagtaaaacggcgcaaccgtcaaaatcagaattgattcgttataaactttggttagagcaaaaatatcaatcgccttatactggagaaatgattccgttgagtcgtttgtttacatcagattatgaaatagaacacgttattcctcaaagccgttattttgatgatagcctgagcaataaagtaatatgcgaagctgctgtaaataagcgaaaagataatcagttgggattagagtttattaagaatcatcatagcgaaaagattgaattgggtaatggtagaacagctcaggttttagaagtggaagcttatgaaagttttgtgaagaagaattacgataaaaatagaggaaaacgaaacaaacttttgttggaagatgtgcctgaaaagatgattgaacgccaattgaatgatactcgttatatcagtaaatttgttacgcatttattatctaatattgtccgtaaagacgaagtaaattcaaaagatgatggaataaattcaaaaaatatcattcctggaaatggtaaaattacctcacaattgaaacaagattgggggctgaatgatgtttggaatgaattgattctacctcgttttgagcgtatgaataatttgactaattctacagattttacatcaacaaataccaatggtaaaattattcctaccgttccgttagaatattcaaaagggttttcaaaaaaacgtattgatcatcgccatcatgctttagatgctttagtgattgctttagcaacgcgagatcatgtgaatttgctaaataacgaatcagctttacctaaaaaagatagaacaaaagaggaacaaaagtcatttagatttgatcttcaagtcaatctaagaaataaagaaaagtactttaatgtaaaagaaggccgtgaaaaagaaaaatttacaactttcaaaaagccttggaatacgcttacacaagatactcgtgatgcattagaaaatatggtagttagttttaaacaaaatcttcgtgtgattaataaagcaactaattattacgagagttatactgacgaaaatggaaacttacgtttagataagtatggaaatccgaagaaagagttgatttctcaaaagggaacaaattgggcgattagaaaatcgttacataaagaaacagtttctggtcaaattcatttggatagagtgaaagtaacaaaaggaaaaattgtgactgcaactcgaaaatctttggatagttcattcaatgaaaaatcaattgaatcaattacagatacaggcatacaaaagattctaagaaattatttgaaagcaaaagataacaaaccagatgtcgcattttctcctgaaggaattgaagaattaaataaaagcatctcagtttataatgaggggaaaaatcatcaacctattattaaagttagaatttttgaacaaggatctaaattccccgtgggagaaaccggcaataaaatagcaaagtttgtagaagcagcaaaaggaacgaatctatttttcggaatttatcaagataaaacaggaaagagaagttatgatactattcctttgaatttagtaatagaaagattaaaacaaggactttctcccgttcccgaaactaatgaaaaaggacatcaattgttgtttcatttatcaccaaatgatttggtttatgttcctactatcgatgataatgagcagttagattcaaatagagtttataagtttactgatagcagtgatactacctgtaattttattccgtcaaatatatctgctattatttttaatataaatagtaaagaacaagaaaagagaggtataaattatcctattcaaaatgaactaggtgttggaagtccacaatcaaagaatcaaaaatcatttgacggttttatgattaaagaagtttgcatcaaactaaaagtagatcgattaggaaatatttctaaaacttaaaattatgctcaaacgtaccatttacataggtaattcaacctatttaaagctaaaagataatcagttaaaaattgaagatcctttaactaaagaagttaaaggatcggttccgattgaagatttaggttttttggttttagatcattaccaaattacgctcagtcatcaactcattatagctttacaacaaaacaatgtggctattatcagttgtgatgaaagtcatttgccactaggattgatgttaccaatgaatggacacgtagagtatagcgaacgtttgcgtaatcaaataaattgttctgaacctttacgaaagcaattgtggaaacaaaccgtagaagctaaaatttatcaacaaaaggaagttctaagaaaaagtaaattaccttttgaacccatgataacatacatgaatgatataaaatcgggtgacagtacaaatatggaaggaattgccgcacaacattattggaaatatttattcgacgattttacacgtgaacgtaaaggtgatgctccaaataattttctaaattttggatatgctattttaagaagcatggtggcacgtgctttagttagttctggtttgaatccgaccattggaatttttcataaaaataaatacaatgcgtattgtttagcggatgatattatggaaccttacagaccttatgtagacttattggtagtcgattggttagaacaaactgatagttatgttttagataaaagtgctaaagcgcatttactgcaattagctacttatgatgtgtatattaacggacttcaaagaccgttgataactgctttaagcattacaacaagttcgttgtgtaaatgttttatgggagaaagtagggtaattcattatcctatgatcaaatgagttttagtagatataatgcctatcgaattatgtgggtattagttttctttgatttacctactgaaactaaaaagcagcgaagtgttgctactcggtttcgcaaacaattaatagacgatgggtttaatatgtttcagttttctatttatttgcgtcattgcccaagtaaagaaaatgctgaagtacatattaagcgtacaaaaaagaatttacctcctgaaggtaaagtaggaattttatgcataactgacaaacaatttggacaaatggaattattctttgctaaaaaagaaacacaattaccgaatatgtcacaacagctagaattattttaataggattaaaaaaagaagggattctctaaagaaaatcccttctttttttactttttttaagatttaaaaatccactgaacctaataaaatcaacgctttaagttgaggttgtaattcgtaggactaaatctacaaaatttgaaaggaattcacaactaaatatgcctataagctgtatttaaaaaagttgtaattcgtaggactaaatctacaaaatttgaaaggaattcacaacattacaatgcgtttaacaatatccatttcagttgtaattcgtaggactaaatctacaaaatttgaaaggaattcacaacggattcgctaaagtagtaaaagctgacttagttgtaattcgtaggactaaatctacaaaatttgaaaggaattcacaaccctgactatttataatattatttatattgagttgtaattcgtaggactaaatctacaaaatttgaaaggaattcacaaccttgatgttaaaacaacagacgacgcctctcgttgtaattcgtaggactaaatctacaaaatttgaaaggaattcacaacaataattaaaatacatatcgcaaaacatatgttgtaattcgtaggactaaatctacaaaatttgaaaggaattcacaacacaggaacagaagtaactgcagttcttggagttgtaattcgtaggactaaatctacaaaatttgaaaggaattcacaacgaataactataacttttatactgataccccgttgtaattcgtaggactaaatctacaaaatttgaaaggaattcacaactagctgattcttttcttaaaaaagcatctggttgtaattcgtaggactaaatctacaaaatttgaaaggaattcacaacaggtgcacgtaaataacgcaataaccccgagttgtaattcgtaggactaaatctacaaaatttgaaaggaattcacaacataatagcttgatacgtagacttaccttgtgttgtaattcgtaggactaaatctacaaaatttgaaaggaattcacaacggaaagtcttttactactatactcatttctgttgtaattcgtaggactaaatctacaaaatttgaaaggaattcacaacatgattttatgaaaccattacgtgtagatggttgtaattcgtaggactaaatctacaaaatttgaaaggaattcacaacgaaaagattatagttaaacaatcagaggaggttgtaattcgtaggactaaatctacaaaatttgaaaggaattcacaactgaaattctttcagcagaaaaattccatccgttgtaattcgtaggactaaatctacaaaatttgaaaggaattcacaacgtatgctcgctactgttccatggccagctagttgtaattcgtaggactaaatctacaaaatttgaaaggaattcacaaccatacatgatagaccttactaacacgcctagttgtaattcgtaggactaaatctacaaaatttgaaaggaattcacaacacagcttttactttaacggacataaaagcacgttgtaattcgtaggactaaatctacaaaatttgaaaggaattcacaacacgatttagatatgtttgaaaaagctaaaggttgtaattcgtaggactaaatctacaaaatttgaaaggaattcacaacagaggttcttctattaccaattctgtaacagttgtaattcgtaggactaaatctacaaaatttgaaaggaattcacaacttgaatcttttagagttaaaaataaaaacggttgtaattcgtaggactaaatctacaaaatttgaaaggaattcacaactgatcttgtatttaatgctttaagagggaagttgtaattcgtaggactaaatctacaaaatttgaaaggaattcacaacattatagctagtttttagtccatgagctaagttgtaattcgtaggactaaatctacaaaatttgaaaggaattcacaacgttgatacacaacgtaatgttattgttcaggttgtaattcgtaggactaaatctacaaaatttgaaaggaattcacaacgttgccagtttattaattgcattcatagaggttgtaattcgtaggactaaatctacaaaatttgaaaggaattcacaacaatcttccaatatcttgtaatgtgtctagagttgtaattcgtaggactaaatctacaaaatttgaaaggaattcacaacaaacacctgaagcgattgatataataacaagttgtaattcgtaggactaaatctacaaaatttgaaaggaattcacaaccatattggttcccaaataacttcccacatagttgtaattcgtaggactaaatctacaaaatttgaaaggaattcacaacaatggatatgaagttatgaaagttgttgaagttgtaattcgtaggactaaatctacaaaatttgaaaggaattcacaacatgattttgaatgtatagggatagcggggagttgtaattcgtaggactaaatctacaaaatttgaaaggaattcacaactaaatctcctaactccttcgcttttctagcgttgtaattcgtaggactaaatctacaaaatttgaaaggaattcacaactaggggactctcttgtaaaaagaaaacttggttgtaattcgtaggactaaatctacaaaatttgaaaggaattcacaacgggcagacccgtcttatcattgaacacctcgttgtaattcgtaggactaaatctacaaaatttgaaaggaattttatttattgatcccatgtgagaaccataatcccttgtacacccaataagctaaaatacaagccccaattttacactcagaaatataagatcgggctaacttcaatttcagcaacagcaagtgaataagcataggataatgagatggagtaagacttttagaattgattcacgagccacaaaaacaacgtaccaagtatttaatctataaaaaaacgaattatattagtagcaaacgtaacaaatggcgggtagaggtgtcttgttgtgtaaaaacaataagaacagaaattatagatcaactcgatgcaacattataaaacaagaatttttacactaattacatcggctttttttcttaaatttattcaatgtggcttttactttaagttacactgaattaaactttttttaatttccgccatgaagcccaaacccaaacaccattgcacgacagctttaccaaacgatatgtaaaatgaaaaaaacgattatacttttatctttatttgccaatttaaacttatttgctcaagatgatattaataaactaaattacgcgaaaattgaaatttctgttcctgaaaattgcactactaaatcagaattcgaaataattgattgtaatggcttttctgcccaatggttgtttttcaatgaagaaatggtaaaacaaaaagtaaatgaacaatttcaatcacaaattgaagaacaattagattataaaaagaaggaaaagattcaatttttttctcaaggtcaaaaatttattggagctaaatatgcgatgacaaatggaacctttagaattattggttttggtcgagtaaatgaaattcctcttctattaaatttgggatttgaaaaaaatccagaaaacaatcaaagcttaactgattttgaaaaaaactttatttattttaaataaagctatcgtgtaatattgtatttattgatcccatttgagaactataatcccttttacacccaataaactaaagtactaatatctaattttatacctagaaatataagattggtgggtaacttcaatctattaatccacggaaaaaaggatatagacagtccttacgatgggagtgaagtattatatgctaaactaagtggaaataaaaaagtatggttcagaacctattccaatttagatcatcatactattacaattcccttgctcttaagtgaagcaatactccgttggctttttaaacaaaagaagtaaagagctgttgcacaggttagtacaaaattgaaagtttcgactttctaacccgccacgattgcaaagctatagtttgttatcttagtagagttcaatgaaaaacaataatgatttagaaaaatgaaaaatattctagtactttttattttaaccttgttaagttgcaattcaaaaaatggggaagaattaattcgcgaggaagaaacaataactatcattcaaaccttacttgaagaaaaaggattagaaatgccaatggatttttatagtcaacagaaaatcccaatctgtctgaacttaaaaaaaaatattgtcaacacgaaatgctttgaaagaacaaaaactatcgatgaattagcagaaaagccattacctgaaaaaacatttgtaagccaagggggcgtttgcatcgaaaaaatatatagatcaagaccgattgataactcatttttcatgaaaaacgactcgttgaatattgttaagcaaaacgatatcattaaagcattcaaaattccaaaaagtataatccaaaactttaaaactgttgaatttactcaaagtttaaaaataactgaaaaatatgttcaattctctattcccatattttcaaaagataatacgaaagcatacttagaatttgactattacgctggcaatgaaagtagttctggtatatccctatatttagaaaaagtaaatggaaaatgggaagtaaagaatattgaaagaaattgggatatctaagcagccaataaacgtttggtacaacagcaggtgaggggcaacatttaaagtttcagctttctaattcttaaatagccaatcatattaagttttatgttaaatttgctaacgcaacaagccttttataaaatttgactagaatcgatcatcttaattttctgtcacttcgaaaagcgcaaaaacagttgtgaaacatcttaaaacaaacaaattcagtatgaaatattttaatttattgacggtatctgttagcttactttttttaacctcttgtggatcgcatttagtaagtgtaaataatgacaaaaaaattgacaaaaggttagtgggcacatgggttggatctgaaaaagaggaacaattggaggggttagaaaaaaattgggagatgcaaagaaatgaggatggtacctttgtgttagattttagattcaaacgagatggggaaattcaaaattcaattgaacatggtaattggtgggttgaaaatggtaaattttatgagtttcatgagtattccggaaaaactgattcatatcgatataaggttcttgacaaagatcaaataaagttttctgctgaaaatatagatgtagcgatggaaaatgagaattatacctttatagatactagaaaagatgccaaattaagagacggtttatcttttgatactgccttgaaagtgaatagtgtaaaggaagaatacgaatatatagaatcaaactgcagtggttgtcaatttagagatcaatctttatctcaatacaaaggcaatatgtatgatgtaataaaagtggagaagtcagatggttccattagcacgtattactttgatataaaatttttttatgggaagctttaaaacatacatgtactaaaactgatagctattatacaactctaagtgaaatataaaaaaacctcgcttaagcctttttagcgaggttttttttgggggataaatatagaacacatacacaataccaaatacagagcagaattgcttggggtaaaagatatatggtctttttactcgcttatatgaactgtattggcaatcgtaccaatgccttgtatttccaattctactagatcaccgtgctgtaattgtttacctaattcgataccacatccagtgcctactgtgccggagctccatacttcgcccgcgtgaatggttctacctttactgatactaacgagaatctcttcaaaggattgaacatgctcattggtatttccttcagaccacagttgtttattgacatacgccttcattgcacaagcattgatgtcgatttcatcttttgttacgatgcatggtcctaaggtaacggactggtcaaagtctttagcgttgtcagcccaaccttttccacttagcacattcttgatttgaagatcgcgtagggtccaatcgttaaagatggtatatccgaaaatgtaatcagcagcatctgctatagcaatgtcttttccagttttgccgatgacacatcccagttctaactcataatctaagcctttagtgccttgaggagcatgaatcgtttcacctgtatgtgaaatatacgtgtgatctcttagttcatataatgcttctttgctgttcttgattcggtcaatcatcttgtgtaactgctcacttaagatgctgacatcttgagtggtttgctgaccgattaacgctataatattttctgaagcagtagtaagatgattatcaggattcataaacatagtacccaatattcttttgggctgtataggcgccaataattgaatagacgatatcggaatactttgataagcatcttcattagacagtatcgcttttgctttctctaatccatcctgaccagattctattaaagactgcatagagctaaatatcacttcttgtggagcgatagatcttaagtctaaaatagcgtcattggaagaagtgattacgcccaaacgaacttctttattcagttgataggttacaaatttcatggtttacaggtttaaaaattgtagcgattcattccaagaactataaggatcccaggttggaatcgtatgattgtatttttggtcgtaaaaagctctaacttcagttaatgaagcaggtatgtcattccatggtggaataaactgaccttcttctttgctttttacaacggctaagatgctcatgtaaatgcgctcgggttggatccaatgtaagtatttcgaaatgtctattttctttgtgatttcctctgctgtaattccttttgtatactgtttgtctacttgctctaatacgaaagttaaatattgtttttgctcctccacaaagtcaacaccgcaaagactaccatgacccggaacaacaattttaggttttagatcctgtataatgtagtccaatacttttacccaattatggataccttgttcactataagccgtgcagccattgaatacaacatctcctgcaaataagattctttctttctccaaccacagcaatacatcactattcgagtgggagggagctacatctatcagctgtacttcggtagtatccaagtgtagagttgtgttgctcgttatttctatatcaggggtaatccactcaacgcctgttaaatcaaaaccttcaaactcttttgcaaagaagcgttctcctattgatgatgctaaggagtcttttcctcttttaatgatggtgtcaaaccattgtatattttcagtaaggcgttcttgagctgcattcttgtgcatgataatacatgaatccttaaataccttatttccccatgtatgatcactgttgtagtgtgaatttaccacatattgagggagttcctgattgcttacctgggtataaatatctttgagttcttgcgcgtgaaatagatcaaaaaaagtatcatatactaatccttttcctcgattaataaatgctgcattagcccagctaattcctctatatggagaaatagcagcaaatatattatgatcaatctctattacttttaaacgattggaagtgattattctttgcttgttcatggattttaatgtattgattactaatacaaaattaggtgatatgcgtttttaagcggtgaacaaataagtagaatagatgtgcaaatagtaagattttgtatctttgagcgaaagaccgcttatggaagtaaaacagcatacgattgattcaatcgttcaggataggggattggatttacagcaaaccatctatatttctaagcatacgaaagaaattgagaattacttcgcgaagcatcctcatgtgatcaatgctttcgtgattgggctttgtattggtggtcatgctaagataaaagtggatttggtagagcacacgattcaaagaggtagcttgataagtttggtacctaatgcgattgtttatcctataacagtttcggaggatattgaaatccattctttaatgttttcttttgattttatcacgacatctgtttctctttttaagacaacgttattagaaacactaaggcaacaatatgttattgatttggatgacacacaactggaattgttaggtgacctttatcaagcgacaagtaagtatcattattcagcgtatccaattgctgaggtacagacgcatttatttagtgccttgcttttggaaatccaaggtgtttatgtacatgcgaataagaataccaaggctgagtcgcgttatgagcacctaaccaagcttttctttgccttgttgtacaagcattttaaagcagagcgcgcgcttcaattctatgcagatcaattatgtgtaactcctcagcatctatctacggtgattaggacggtaacgaagcacaccctctcttattggataagcgagatggtcatcttgtatagtaaatcgctgttaaaaacgacaagcttaacaagtaaagaaattgcggctgaattaaactttgcagaacctactttatttagtcgtttttttaagaagaatacaggaatgacacctaatgagtatcgaaaggagtagggtaagg

SEQ ID NO: 1194 - DNA, 24398 bp, synthetic construct
  misc_feature 1..24398: note = Synthetic
  source 1..24398: mol_type = other DNA
tcgaagtaacgttcgaggttttttgttactgtgcagcatttcttattgaaatataattagaaaacttttacttttttagtgtgcattaatttttattaacatatttcagattagaaagttccatttccatttttctatattttcttgattttgatgagataagaaacaagccaataatgaagagaattatacttataaataatacgataaaacctgctgattttaaatcatttctctgaagaattctcattttatcaaattcagatgctgccaataatacaactccatatgaattcattataaaactaattattgtgattacaattccaattactttttttatgtttttatttttatgattaattattcaaaattttaatggcattctattgtataaactttatatggaatattaacaattccacaaacacctctatgatgagaacatgcgccacgaccacttgcagaacttgtagtgccgtcacagcattttgttcgttgataatagtgtgtctttgccgataattctctgtattctcggcaggcatcactattccctaattccgcagctttttttaaatacggtttagctcttcgcttacttccaatatttagataactaatacctaagttgtataaaaactgatcgttattaggttctatttcaacagcttttttaaattcagccaaagcatttttgtttttctgcatctgtgaatataaaattccaagcttgttgctgaatttaccgctatgtttatattcttcattaagttgtttgtagaggtttatagtttcgagtgtatctccaatttctaaatattttctagctgcatactcaacaacttcaatatgttgtaatgaatctgtcttatataattgaatttctttttgaagtaattccttggcttcttcttcctttccatgttgtatatcccatgcaattagttctttgattctactatcttttatagagtcggttgtagcaaaaaaaagagtctttttaaaatcttctttactatgaatagtatcttgtaatttataaagtatttttccacgaagttcataatattcagaatttgtactatctctaataatagcttcattaattaaagttaacgcttcggtatattcactatatgtatatttcgatttcgcttcagcatagatatcgccttctgcttttggtagtaagcttccaataaatcctatcataaaaaagatgccaattacaattaaacacccttttccgcttttcttttttgtcattttgtaatgttttataattatttattttgggcagttaatgagtctttagaacagatatactttttcactatgagcttcgtaataggtctaagtgtctttcctgtctcaggatgaatgccagtagctgtaaaatattcatgttctttattgtgatttttttgataccatatattagcacttccatcaggtttataaaattctgttgaatcacaaactgcaattatttttttaaaatctttgattttcttttcatcatatatttttaactgattgagatcatatttttccaaatcaaaatccacttctataaattcagtttcactccaaatcatccaacgttgttctgtaagttcaaaaattgtataggtagttattaaaataaatgcaacaataaaatagtatttgaattttaatagaatactaatagttgatgactctttacttataccaatagagagatcagacggtttatgtatttcattcttttttacaaaatcttcataacagtcataacctatgtattctgaaattttattcaataaatctgtttttgggtttgtttcacttccttctttattttccacaaactgctcaaagtagcgagagaacgtaatcttattcactctaaaatccagactttcgtcaaacacctgttctaaatgtgttgctagtccatttttagtagtgctaccactttgtcgttctgcttttttaaaggcttcttgaaatagtatttctttcataaagttgatgttagtctttctcataaatgcaacatgaattgcacatactttctacatgtatgtatatacatgtttgttaaggttttgagcaatttgtgttgatagtattccttcattttgtttgttcatttgcttcagaattcaatgatgccttactcgcaataaggtttacgacattacattttaaatgaagctttaggctagagtcgtatgacacacgggaagtgattttacttctttagtcttaacgcttccacttcccaaaatcggagagacgtctcccaattttttagtgtgcggctcgtctgcaaaaacatctgaatttcaacctcggacagccacactagtatcaattttttaaacaaaacaaaatgaagaaaatatatttagttatgctcgtggttttccacattattgggtttcaatcgtgtactccagaagcattaaatgaaacaaatgtcaatactattcaagcatgttgtggtgatgaaggcgaattaccgccaccgccaccaccgccaccaccagaagatggaattggaggttaatatcttacaataaatttagtactttagaggaatgaaaagtaatagaacttcattcctcttttttgttggctttattttctgcttgttctttgctacgactagcgtgtatggacaagttgaaatggatagtgttacatattatcaagaattagttaaaaattcaaatacagttgatgacctaagaaaagcgaatacgttttttaggaagaaaatagatggaatagaaaaggataacccttttgttctatatcataagtatgatgtggctagtatagaaaaaaagattggaaactatatagaaagcgaaaatcttttagtttacatacttgacaacattgaacagtttgaatcttctgaacttagagattactaccagaaatctagttttattttattggggaatatttatagagacctaaaaaataaagagaaatcaatagagttgtatgatagagctttacaaaaagcaaaaatagctaaggatagtgtagttattttaaataataaatctaacatttataaagattttgaagaatatgaaaattccgaaaaagacttattaacagcatataatttacttccaaaactgacagattctattgaaatagctagagtatttgataatttgggttttgcatattctaaattaagaaaattaaaaggattagaatttttaaaaaagggtttagaactgcgtgagaaattaaatgacaagaagggtttatactcaagctacaagcaattggcaatacattataaagattatcaaaataattcgttagctgaattatatgctatgaaagcttttaacatgagtaaagaagtcaatacaccttcctttagagaagacgctctaggactacttgtggaattttctaattattcttacgcaaaagagtataaacgattaaatgatagtatttcagatattaaaacattagaagaaaataaatttgctatttacagatatgataagtctgaatctgaaaaaagaaccttagaaagtgaacttaataatgtgattgaaaagcgcagaactttaatatataagtttttaggaggtatcattttagtaattgccatcttttttatcattatacaacgaaacagaaataaacgccacacaatccaacaagttcacaaaaccgaaaaagaactatcaaaaaaagtacatgatgagttggggaatgatattttttacttaatgaatcagatacaatataatccagcttttttattggaaaaagaaggattaaaggtattaaacgacctaaatgatatctatataaaagcaagagatatttcaaaaaagtataccaacattgatacaggaataggttataaagacgaattactcaatttgttaaattctttcggaaatgcgactactaaaattgttaccaatgaaatcacagtcgctttttgggaatctgttacgcccataagcaaagaacaactttacagaatacttcaagaattattcactaacatgaaaaagcatagtgaagcatctttggtggcagttacttttactaaatacaaacgctatattgttgtaaaatatgttgacaacggaaaaggagcagtagcaacgcacatatctaaaaatggtcttcgtaatgtggaaaaccgcatagatgagatgaagggaactattacatttgataccaatccaaacgaaggatttaaagtagaaatacgatttgtcgcataaaacttataacatggtatttaaaaagattttagtagttgaagatacagatagtattaacttaggtttaatgtccaagttaaatgatttaggatttaaaacggttatatcttcacaatcttgcgatggcgcactaataaaaataaaaagagccattcaagatgaagaaccttttgaccttcttattagtgatttatcatttatagcagcgactacaaatcccaaaattaatacaggagaagaacttattgcagaagtaaaacggatacagtcgactataaaaatcattgccttttctgttaaaaatcaacaaagtgttattaaacaattgttagaagaaatcaaagtagatgggtatgtctgtaaaggacttcatggcttaaaagaacttcataacgctatactcgcaatcaataaaggacaaatatatgtatgtcctattgctaaagcttcattagaacaaaaacatgtctttcaactggacgattttgaaaaacaattacttcaattagtggcaaacggttataagcaggatgatattgctgagtattttaaatctaaaaatatttcgccaaatagtagacgctccatagaagatcgactgagtagacttcgagataattttaatgctacgacaacttcacaactcatttatcttgcccaaagtttagatcttatctaattactttcccttttatttttccctatcgtggttttccacaagtgattgattcataatcagattaagtttgaataattaaacttaaaaagataataaaatgaaagattattacgtaaacaaaaacgcacaatccaatggcgatcatgaagttcatgaatctggatgttattggctgcctatggagaaaaatagaattcctttaggcaaattctatacttgcggtggagctgtaagtacggctaaaaatcattacgatcaagttaatggttgcaaacattgttcagaaccttgtcacacttcttaaaactaaaaaattgaaaaaattgaaaaatctaaaaatagtaatcttactaattactgtattgacaagtacattagtattaagtcaaacccaagaatctaaggaatctaaaatgctggatttcgtttctaaaaaaggtattattatcaagtttgaagactttaatttaccaagtgtaaaatctacttatagtaattgtgagtcaaaaatcagaaaaataatatcaggaagtgaaatcaaatactttcttcaaatttcaaataaaggcaaatacaattcagtgacatcttcaattgcatatgaagacatcgttgaaattcaaaaagccttagttgctttacaaacacaagccgctcaagatattttaacaaaggctgactacttggaaaataaattcataagtgatgacagattacaaatcggctactatgtgaataaaaacaaaattgtgtggtatatgaaattagattcaggaagtgatagcacaatattttttaaaacttatgaacctttagtaaatgcatttaaactaggtaaagagaaaattatcttcttgaaacaacaataaatcatcgattcacatattttttttacttcgaaatagtcatgaaacaactttgttatatagtttttacgttatttcttttgacaacttcaaatgcagtatcgcaaacagtttacactactaaaacaggtgaaaagtatcataagtcttattgtaaatacttaaagtattcaaaaaaagaaataaagattgacaaagctatttctcttggttacaaagcttgtaaagtatgtaaaccgacatctaagaatacgaaagttaatgactctatctctcaaacaatttccagtaaaccaaaacatgaaaaaacaacttcaactaaaagaagttcttctgtgcaatgttctggacagacaaaatctggaagaagatgcaaacgaaaaacaaaaaatataagtggtaagtgctatcaacattaattaaaaatctaaaaaaattaaaaatttaaaaaaataatagtagttgcattatgttttgcatgcttttcatcttgcacaagttcagatgatacggcagaaacagtaaatcgaactgttgcagatataaaatgtgggtttcataatggtaatcaactttggaaaggtccagaaggcggttgttattattataacagtaatgacaataaaacctatgtagatagagacgaatgtaattgttaatcttataaaatttattctaaatgataacaaacgaattaaaaagccatttcttacgactctatcaaatagcttttgtagatgacgattttgatattcttgaattacaaatgttgtatcgatttgcagaagaaagaggaatttcaaaagaacaattagatcatatcttattgaatccttctcatgatgcttccatccctgaatctttagaagaaagaatctcatatttatatgatttagcacttatggtttgggctgataaaaaagtcaccgaagacgaatacattaccttaaaaaagtattgtagaaagtttgagttcttagaggaaaatattaccgaaatagttgattatctgttagactgcgccaaaaagaatgtgaaaaaagaggtaattattaatgcaattaattcctaagctatgaattccataaaaaacttattcaaattaaagaataaaacggcttctaaattagatgaagaaaacacagaagaagctagagaacaaataagaatcacttactatcagagtggttatggttcatctataaaagcttcgggaggtgctataacattcggcgtaggcttaaaaaatttatacaacagttttgaaaacctttgtcgcaagcaattaaatgaacaaaaaatattaaaacaaccttacattgaagcacaagaaaagcaacagactgaactcaaaaaacgggaaactgctatttctatttatgaagatcaaaaacaaaaaaacatccaaaatattgatgaacataagtatgaaatggtcaatgtaaagcaaagtccagaaaagtatggaattgatacggataagcgtcccaaagctcagttttatattggattgtcattgcttttaccaattacagtatacttgtttgtgttttacatatctgcttcctattcggcatttttcaaaaactttgaaagtgatagtctgactgccgctatatttgatgggaatgcgttaggcaaggcagtttcagacggatggcttgaagcgttatttgtcggaacaattccttttgtattcatgggattaggatatcttattcacatgtttcaaaaaaataaaaaagcaatgtcttttgtgaagcttggtgcgttatttatacttacttttttgtttgacatcattttagcttattcgatagaaaagaaaatgttcaattttgaaagagtgcttggagaaactttttcgctttccatagctttagaaagtgtaaatttttggggaatcatttttgcaggttttgtggtctacattatttggggtttagtcttcgattttgtgatgaaagaacatgaaaacgtcgataaaataagagcctttatcagaaacaaaaaagaagaaataaagaacgaggtagagaagaaaaatgagttggtcaaaaaaattgataccataaaacatgaaatcacagcgatcaatggaagtatctctgaacttcaatccaaaatcaacggattcatctttcctgtaaaagaatatctgcattatcattatcagtacaaagaaggatggtatcaggcaataaatgcagaaatagcacttccttcaaaagaaaaaaatgaattaaaacaacgttgtgaagatgtgtctaatacacatttacaagaattacagctaaaggaaaatatggagtatcaacatctagtatttaccaaaaattaataggatgaaaaaaatagtactaagactcgcagctattgtaattttgtgtttggtatcatgcaaagaagaatcaaaagaagataaaaaagaggtaaaaaccaatactactaaaatagtttcagcagaaaataaaaatctcaatattagccttcttttggacttatcggatagaattaatcctgagaaatatccaaattctacaatggatttttacaaaagagatgttgcgtatattaagtcagtttctgaagcttttattacacatctacaaaacaagaaagtacgcagtataaatgataaaatacaattgtattttgatccagagccaggaaaccaaaatataaacgcactttctcaatcattacggtatgaaattaaccgaagtaatgtttctttggatttattagaagaaatgaaacaagcctatgcaacaaagcctgcaaaaatttatgaattagccattaaagacaatgcctatgtaggatcggatacgtggcgatttttcaaaaataaaataaacgatttttgcatacttgaagatcatagaaatatactaatcatactcactgatggttatatttatcataagaatacacaattaaaagaagatcatctaacttcctatttaacgccacagttaattaggcaaaataaattaaatgacaaaaactggaaagaaaagttgactgctcaaaactttggttttatagcagcgaatgaaaatttagcacaacttgaaattcttgttttaggaattaatcctgataaaaaaaatccatacgaagaagatgttattcataaatattggaacgattggtttcgccaaatgaaagtaggtcaatctgaaattaaaacagcaatattaccttctaatatggataaaattataaaagattttattcttcaataacgagaaagttaagtcataaacgttgtgtttttccacgaggttttaattgctaatggaggtaagtttgtagtgtataacattaaaaaaataaaatcatggcagtaaagcatactccaacgggagtagtacacagcggaagtaaaggaggaacgacaggatgtggcgttgacacaactaaacattcagatcactgggtaagtagtagtagcagaattacgtgtgataaaaatggttgtaaaaattaaaaatacaccatgttaaaagcacatacattttatgggttagtgtaagttttaaagctttatttttttaagactttgattttgaaaacctatttttttatcattatctgttgaataaaaatttagatttactattatagaatccaaataaaaaaacgttatgatgattccgtcataactcaattgagcatataaagtgtccttaaacaaattagtcaatttaatttcggggaggactatattataagcagttttcgcattggtaaaacaataagtcattttttagagcgatataaaataatgttgcattccatttccctaaaactcccttataggttgtaattttttgcttcttgataagtttgaaatcactctttcaagttttttttatactactttttgcatattgaatttagttagttttctgaactaatataataaggaatcaacaaatgtcacttcatttcgttatgttgcttatggttgatatattctctaaaactttaataaaaagaaaaagcgacatcgtagatgccgctttgaatgttttcacaacggaataatccttattgtgaattgctttcaatttgtatacttcaaatgtacggaaaaaatttacaacttgaaatgtggttttccgtaaggaatattgttatttttaattcatttttatcgaaaatcattatacatgaaaaaaattctaggattggacttaggtacaaactcaattggttgggcattaacagcacaaaattttgaacagaaacaagggcaaataataggcgttggaagcagaattattcccatgagtcaagatattttaggaaattttgatgcaggacaatcacattcacaaactgccgaacgaactggttacagaagcactcgaaaactttttcaacgcaatgttttacgtagagaacgcttgcatagagtattaaatattttgaattttttacccgaacattacgttagtgcaatcgattttgaaaagcattttggtcaatttaaaaaccatacggaggtgaaattgaattatcgtaaaaacgagcatggtacgcatgaatttgtttttatggatagctttcatgaaatgattgctgattttgaatctcacaataaaatcactaaaattccattagattggactatttactatctacgtaagaaagcattaacacaaaaaataaccaaagaagaactttcgtggattcttttaaacttcaatcaaaaacgtgggtattaccaattaagaggagaagaagatactgaagatgataaaacaaaagaatttgtttcactcaaagtgaaaaccgttattgattctggagaagaagtgaaaggaaataaactgtatgatgttatttttgaaaatgattgggcgtatgatcgtcaaaccacaaaaccatctgattgggaaaacaaaatcaaagaatttatcgttacaacaactatccttaaaaacggagaaataaaaagaacctttaaagctgttgattctgaaaaagattggattgcaattaaaacaaaaacacaacaagacattgacgcttcaaacaaaacgattggtacttatatttatgatactttacgtgacaaccctattcaaaaaatacgtggaaaacttattaaaaccatcgaacgtaagtattataaaaaagaacttcttaccatattacaagagcaagtaaaacatcatccagaactaaatgacaaaaaacgatatacggcttgtgtagaagaattgtacccaagaaatgaagcacatcaacaaaatataaaaggtaaagattttagctatttatttttagatgacatcatcttttaccaacgacccttaaaaagtaaaaaatcgacgatttccaactgcgcttatgaagttaggaaatacaagaaaaaagtgacgctcaatggaattgaaaaagaaatcgtagttcatgaacctttaaaaagcatttcaaaatcgaaccctttatttgaagaatttcgattatggcaatttttacgaaacttaaaaatttataaaaaagaaaacgttgatatagatgttactttacaattttttgcttcagaagatgattggattgagttgtataactttttatcacaaaaaaaagaagtagaacaaaaacatatcattcaatttttagtttctaaaaaattaattgataaaaaggaaaaagatgtatttcgttggaattatgttgaggataaaaaatatcctgcaatgcctacaaaggcacaatttatatcacgtttaaaaaaagttgtcaactcaaaagatgtttctacttttttaagttacgaaacgcaataccatttatggcatattatttattctgtaaaagataaaaacgaatatgagcaagcgttgaaaaagtttgcaaatacatataatcttgatgaagcttcttttgtagaaaattttgcaaaattccctccatttaaaaatgaatatggagcatattctgaaaaggcaattaagaagctattgccgctgatgcaaattggtaagtattggaatgaaataaagatttctaacgacacaaaaaaacgtattgcttcaatcatagaacgacttgaaacgattgattttgataaagagaaaattgaaaatatcaaagatgatgacattccaaaacaagtacttaaaagttttttaaacttcaaaaatcaaaacccgttaaaaggactcaacacttatcaagcgtgttatgccgtatataatagacattcagaagcgagcattattacgcaatggaaaacgccaaatgcgattgacaaatttttaaatgatttcaaacaacacagtttacgtaacccaattgtagagcaagtagttacggaaacattacgagtggtaaaagatatttggaactattacggaagtggaaacgaatcattttttgatgaaattcatgtagaattagggcgtgaaatgaaaaatgataaaaagaaacgagaacgtatctcaaaacaaaatatcgagaatgaaaataccaaccaacggatacgaaacttacttcaagaactaaaaaataatggtattaatgatattaaaccctattcgcctagtcaacaagaaatattgaaaatttatgaagaaggtgtagcacaaaatccgaatgtattatataccaaattaagtgagcaagatgtgctaaaaattcgcagaaactcatcgccaactaaaaatgaaattagcaaatataaactttggttagaacaaggttatatttctccatatacgggaaaaatgattcctttaagtaaattattcacaacggattatcaaatagaacatatcattccgcaatcacgttattttgataattcaatgagtaataaagtcatttgtgaaagcgaagtcaatcaactcaaagacaatcaaacagcatttgaattcattaaaaaacacggaactgaaaaagttgatataggacaaggaaaacacgtttctattttatcaaaggagaattttgaaacacattgtgaaaaatactttaaaagcaatagaacgaagcttaaaaatttattaagtgaagaaattccagaaggttttataaacagacaacttaatgacagtaggtatatcagtaaactcattaagggtttgttaagtaatgttgtgagagaagatgatgaaaaagaagcgacttctaaacatttacttcctgttacgggagcaattacttcaaaattaaaacacgattggggattatacgataagtggaatgaaatcattgcgccacgttttcagcgcatgaatgatttaacaaattctcaagattatggtttttgggacgatactattaatgcgtatagaatacaagttcccgaagaaattataaaaggattcaataaaaaacgaatcgatcacagacatcacgctttagatgctttggtagtggcttgtacacatcgtaaacatattcaatatttgaattcattagctaatgagaataagaaacacgaattgcgtaaaggtttactcataaaaaatgaacaaggtaattatacaaaacattttataagtccctggactactttcaccattgatacaaaaaacaccttagaacaaaccattgtgagttttaaacaaaacgtacgagttattaataaaacaaacaataaaacttggcaatgggttttaaaagaaggaaactacaaaaaagaattggttaagcaaactaaaggtagtaattgggcaattcgcaaacctatgcacaaggaatctgtgtatggagaagtgaaacatattgaagttccgaaaaataaaatagcaacggctattcgaacgccactttctgctattaccaaaagaaaacacatcgaagctattaccgatgaaagtattcaaaaaatactggaaaatcatcttaaaaattacacggaagaaaacgggaaagaacgttttgatctagcttttgatgcaaatggtattgaggaacttaataaaaatattatagtattaaataatggtaaaaaccatcatccgatatacaaagtacgtttgtatgaaataggaagtcgttttcaaatttcagaagatgcaaaatcgccaaaatcaaaaaagtttgtagaagctgcaaaaggaacgaatttattttttgcaatgtattggaataaagacaagcaaaaacgagtatatgaaacagttcctttaaatgaagttattgagcatcaaaaacaagtcgctaacttaccaaaagagcaacgaacacttgttcctgtaaatactaaaaaaggagcgtttttattttcactttcgccaaatgatttggtatatgtgcccacagatgaagaattagaaaattctagtatgataaatttttcattgctatccaaagcgcaagtaaacagaatttataaaatggtaagtagcacaggctctgaatgtcactttattaaaaatcaaatatcatcattaataaaaaaatatgatgctaaatctaagataggagaatttggaagtacaaataagtcagaaaaagatattgaaggtcaaatgattaaagaacgctgctggaaattacaagttgatcgtcttggaaatgtcacacatatattaaaaaacaacccgtaaaataaaaagtcatgataaagcgtacaatttatattggttcccccgcttatttaagactcaaacaaaaacaattagtagtagaaaatcctgaagataaaagtattaaaggcacagttcccattgaggatatggcacttttaatgttagatcattatcaaattactttgagcaatcaattactattgaaacttcaagggaataatgtagctgtcgtaagttgtgatgcgcatcatttaccttttgccatgatgttaccgctgtatgggcatactgaacattcagatcgtataaagcatcaattggaagcttccgaacctttaaaaaaacaattatggaagcaaaccatagagcaaaaaatcaaaaatcaacaggcactattaaaaatgaatgataagccatatgaacaaatggatttatattggcaacatgtaaaaagtggtgacactactaattgtgaagcaaaagcagcgcaacaccattggaaatatttatttgaaaattttaccagagaacgctttggaaattcccctaataatttattaaactttggatatgcagtacttcgaagtattgttgcaagagcgttagtatcgagtggattactacccgttttgggtatttttcatcgcaacaagtacaatccgtattgcctagcagatgatattatggagccgtaccgaccttttgtagataaaatggtgtacaattatatttctcaatatggagttcccgaaaaactgactaaagaatgcaaagcatatatgttaaatattgcaacgcaagatgtttggattgatggagtagaacgcccattaatggttgcagtaacaactacaacagctagtttatacaaatgttatgagggcgaactacgacaaataaaatacccaacacttgattaatactactatgatatgttatcagatacaaatcgttttaatgcatatagaattatgtgggtattagtattctttgatttaccgacggaaaccaaaaaagaacgaagagcagcatcgcaatttcggaaaaaacttattgatgatggatttacgatgtttcaattttccatatatctacgtcattgtccaagtagagaaaatgccaaggttcacacaaaacgagtcaagagtatattacccaaatatggaaaagtgtgtattttagaaatcacggataaacaatttggcaatatggaactctttcatggtgtaaaacctatcgaagttccacaacctgttcagcaattagaactgttttaggattcaaaaaatacatcatgattcaaaaaagcagttcaaagaaagtgtatttttcaattcctaaaaagtaatcccgaagtattgattttactcaacatttcgggattgaccttgtgattcctcacgtaaaaatacaatttgaaagcaattcacaacgctaacatgtccaatgcgtgacgacattatcttgtgattcctcacgtaaaaatacaatttgaaagcaattcacaaccccagatacgagttgattcctaagtgcaaccttgtgattcctcacgtaaaaatacaatttgaaagcaattcacaactaatatcttttgacaggaatttattaatttcttgtgattcctcacgtaaaaatacaatttgaaagcaattcacaacatccaaaagagactctatttttaatatttacttgtgattcctcacgtaaaaatacaatttgaaagcaattcacaactccttatcaatcaaagctttacatgcctgtcttgtgattcctcacgtaaaaatacaatttgaaagcaattcacaactaggttggttaaatgcagaacttaaaacttcttgtgattcctcacgtaaaaatacaatttgaaagcaattcacaacagatattatcaatggatattgaaaacgactcttgtgattcctcacgtaaaaatacaatttgaaagcaattcacaacccgttgttggacaaatgaacgttattttttcttgtgattcctcacgtaaaaatacaatttgaaagcaattcacaacctctactaataaaagcaattataccaccgtcttgtgattcctcacgtaaaaatacaatttgaaagcaattcacaaccgcaaaacacacttggcaaccttatacagacttgtgattcctcacgtaaaaatacaatttgaaagcaattcacaacgccctcctacttgcacaaattcacactcatcttgtgattcctcacgtaaaaatacaatttgaaagcaattcacaacgttatgaagctggcgcaaacctaagctacgcttgtgattcctcacgtaaaaatacaatttgaaagcaattcacaaccaaatcggcgagttaagttttggcttgaatcttgtgattcctcacgtaaaaatacaatttgaaagcaattcacaacatctggaaacaccgtcagatttatatgattcttgtgattcctcacgtaaaaatacaatttgaaagcaattcacaacaccttctgcatcagttcctctatcatgtatcttgtgattcctcacgtaaaaatacaatttgaaagcaattcacaactgtttagtattcgattaagcggtacttttacttgtgattcctcacgtaaaaatacaatttgaaagcaattcacaacacgggtaaccctgttggtaattggcatgtacttgtgattcctcacgtaaaaatacaatttgaaagcaattcacaacaaggtaatgagaacaacgacacaaatattgcttgtgattcctcacgtaaaaatacaatttgaaagcaattcacaacgcggagttaataacattatatccaccaaaccttgtgattcctcacgtaaaaatacaatttgaaagcaattcacaacgttctacttctaatacttcacacaatttaacttgtgattcctcacgtaaaaatacaatttgaaagcaattcacaacccgtagcggtttacataattcgcaatgaaacttgtgattcctcacgtaaaaatacaatttgaaagcaattcacaactactttcaaaagataaagcaccaataaaaacttgtgattcctcacgtaaaaatacaatttgaaagcaattcacaacaatatcatcaagttccttttgctcatctttcttgtgattcctcacgtaaaaatacaatttgaaagcaattcacaactgggaacgtccacttttgaagtgtctttctcttgtgattcctcacgtaaaaatacaatttgaaagcaattcacaacgcctgctcgtcagtcatagaagaaccaaatcttgtgattcctcacgtaaaaatacaatttgaaagcaattcacaactaagtcttaacagccaacccctccatattacttgtgattcctcacgtaaaaatacaatttgaaagcaattcacaactaatccctgtctgcacaccattatcataatcttgtgattcctcacgtaaaaatacaatttgaaagcaattcacaactatcgctaccttattattcttcatcatctccttgtgattcctcacgtaaaaatacaatttgaaagcaattcacaactattcctcaaacagtttatcctgtgcttctcttgtgattcctcacgtaaaaatacaatttgaaagcaattcacaactaaaacgtgtgctttttgttctttgtatagcttgtgattcctcacgtaaaaatacaatttgaaagcaattcacaacctgttctcgattgtccatctatatccatctcttgtgattcctcacgtaaaaatacaatttgaaagcaattcacaacgatacattgagatattgagacttgtgattcctcacgtaaaaatacaatttgaaagcaattcacaactatctacttcggcagcctctaaagcttttccttgtgattcctcacgtaaaaatacaatttgaaagcaattcacaacataatatcgctcattattttagtgatttttcttgtgattcctcacgtaaaaatacaatttgaaagcaattcacaacgggcgtactcattatccattattttaagtgcttgtgattcctcacgtaaaaatacaatttgaaagcaattcacaactatcgactgacataagatcaagtgattgatcttgtgattcctcacgtaaaaatacaatttgaaagcaattcacaacgtctcacgtaatgctccagcactttttgtgcttgtgattcctcacgtaaaaatacaatttgagagtactctgaatcgaattaaatatacaaaaaactgatttgattgaaatagtaagtttttgataaatatgattacatatcttttgcatttaaaagattataataaaatttaacatgcttcaagtaattcagaattgttttctaagtattccccaaaagatataatatctttgatggaaaacttagatttcggaatgttttaggatgggtctacagcttatcactaagtgatgagaatattttcaatgggagattcacaaactttttactaagagatcaatccgtttttttcatttttttcagcttatcgttaagcgatgagttgaatttttgagtaatcactaagtgatgagaatattttcaacgggaggtctgcaaactttttataaagaggtcaatcaatttttttctttttcattttcagcttatcgctaagtaatgagttggattttttagcaaattactaagtgataagaatattttcaacgggaggtctgcaaactttttataaagaggtcaatcaatttttttctttttcattttcagcttatcgctaagtaatgagttggatttttcagcaaatcactaagtgataaatacactttcaatagaatattttcaaacttttataaagagatcaattttttatttgttttctttttagcttaccactaagcgatgaacagattttaaaaaaaaagcaaatcagaaaatatttgttaaaatgcagataattttcaaaatatttatcttttatgtctatcaaaacctaaatttcacttgtatttaatcaaaataacacctgtttttcaaatctcctacaatttcttcttacaatccacgtacactgcacaaaattttacaaatgatagtccggattttattcaaatctttacacctatgatactttagagagtatctcgatttagtgaatagtagtgcaatcccaaatgaaaaaaatctatttaaaaagaaaatcaatttataactcagcttggattggtacactttgtaaaaattaaacgtctgatttttagatttataacacatttcatttgtacaagcaccaaaagttaacaaatgatatttggctactatttcaaatctttgtttatgagatgctttagagagtatcgcatagtagtgattagcatagtaatatcataaaaacattatatgaattacttcctatcccaatcagattcaataacgcaattaaaattaaaaaaggagaaaactttatggcaaaacgaaaacacatgcctaacaacaaacacaaaggactctttatttactgtcatgtatgtaaaaagcatttttcatggacacgaaaaacaactttacgaaacagtaaaacagtaaaagaagaacctacgtgtggcgaaacaggtaaaaattattctatctgcaaaaactttgaaaagcatcggtacaaatcacgcttgcacgttcctggaagtgatggacgaaaagcgagcagaacccatgatgctacaaattatgcagatgcggtaattcaagcgattgattttgaaaaagaattcaaatcggaattacaaggtttaggacaaccgattgaaataagaaatcgacactacttatttgatgtacaactacggtatattgattttttagacaatatagatgttcccgaacatcaaaaaaacacattatcggacgggcgaaaaaatgaaattgtaaactgtttaaaaatattcaatgaagcacttgcaaagcataatatcaataagaagttatttattgttaatcgtatcaatgacatgcatgtcggtttattccatgattatctattagtagataagaattacaaaggcaacacctacaatggaaaaatgagcgctttaaaagcgttcctaagctgggcgattgacagatttaatattgacatgaagaacccctttgaaaaggtgcgaatgattccagtcattgtaaaacgtgacaccatcacgaaagaagaatttaaaaatctattaaaaatcataaaacccgaaaacggaattgaaattcaaggaaaatataaacgaaataggtataagttatatttaaaagatgctttagaactaggattgcatacaggtggtagacgagaagaagttgtcggactcaaatggaatatgattcgcgaaaaagatggcgaacctgtttatattgaagttcccaatttaaaagtaaagagaaagaaaggagaacgattcaatacagatgtgccaccgaagattatccctgtaacgaaaagtctaaaaaatatactatatcgtctgcgttatgatatcaacaaaggaaaagatagatatattctaaatcccgataaaagaacggattcatccatcaaatcaatgaatgatgctttatcattaggattctcacatttttacaagcaattaagcacaggtagagaattacagtttaaatgcctaagaaaaacatacctaacatatctatcatcaactttgaaaggagatgcaaaacgtctatcttcgcatgcgacagatacagtattaaaaaagcactatattgacgagcgaatcgtagacaaagcaattaaagaattagatatatttgaagattaaaaaaatagtaaaacggtactctttggcggtactcccatgaaaatcaagaaagtataattttaagaaaataagtgtaagtccttgtaaataaggagtctgaaaataattttatcaaaaaccaataaaagaactagcaaccagcaaccagcaaccagcaaccagcaaccaaaaaaccactcaccacattcaattttccgttcgtcatattttacgatgtagacatataaaaatggaatacatttacatcgtaatcaaaaaacaacagacatgcaattaacaacaatattcagactcgtattcaaattagcattctttttagcaaccgtaatcgcgtcagcacaagaaatctcaggaacttggaaaggcgagttaaaaatacaaggaatggaacttcctttggcgtttaacatttcagaaactgatggaacttacacaaccacaatggacagtccgatgcaaaatgcttttggaattccaacaaacggaactacatttaaagataacgaattaatcattcttcaaactcaatcaggaattgaatacacggcaacgtttacggacgaaactttcaaaggaatctttaagcaaggtggacaagaatatccgctagacttaataaaaggagaaaaaaacgtcaaaaaagacaaaccacaagaacctaaaaaaccatatccgtacgtttcagaagaagtaacttttaaaaatgcaaccgcaggaaacatcaaatttgcaggaacattaacgttacctaaagacgtgaaaaatccgccagtagtcattctcattacaggttctggagcacaaaatagagatcaagaattacttggacacaaaacattcttagtattatcagatcatttaacacgacaaggaattgcagtattacgttacgatgacagaggaacagcaaaatctgaaggtgacttttcagtagcaacttcttttgactttgcgtcagatgtagaagcggcaatgacatatttgcaaacacgaaacgacgtagttgacgtaaacaagattggattggttggacacagtgaaggcggactcatcgcgccaattgtagcggcaagaaacaaaaatgtagcattctgtgtattgttggctggaccaggagtttctggaaaagaaatcctattaacgcaaggaaaaaaagcagcagaattagaagattatccagcaagtgacattgcaatctctcaagaaatctctgcaaaaatatatgacatctgcgcagactataaaggagaagcatcaaaagaaaaaatcgcagcattatttcaggaattaaaaggaaaaatgacatctgaaaaagcgcaacgagagctaaccgatactgcattaaaaggacaattaaaaatgattacttctccgtggatgcgcgcatttttaggatacaatccgcaaacgtcattgaaaaaagtaacgtgtcctatattagccgtaaatggtgaaaaagattttcaggtattgccagcattaaacctgaatgcaattgaaaaaggattaaaaaataacagcgatgtaaccatcaaacaatttaaagacttaaatcatttatttcaaacttcagaaactggtgctttaagcgaatacgctaaaatagaagaaacctttgctccagtagcattgaactatgtttctgaatggattaatgctcgattttaatcatcaatcaataaaaaatgcgctttttcatagttgagaaagcgcattttaatattttagacattagttaaaaaaacacatggcaacttcaaccaaaataaatacatacactttctggattttacagtttctaggttggggatttttgactactgccaatgtttggtcaaaaatccttatcgtaccagaagaaaaaagtaaagccatttattttttctttgaaggattgatctttatgttcttagcaattacgctgacaacattatttagaaattatctaaaacgaattgacttcattgcaaatcaaaattctaaaaactacggaaaagcctttgtagcatatgcactcatagtattaacctttatagtgatattgatagttagcgcgcattacatgttcatatatatcaatgaaaagtcagccgaaatttctacattggaaatctttttaacagggttaaatgtgtctgtttttatattcttatggacaattttttatgtaggagttaaatctttggcgcgtttacgaaaaaataaaattgatcgattaaaactagaaacagccttaaaagattcgcaattaaataccttaaaaggacaactgaatccgcattttatgttcaatagtttaaacaacattcgcggtttaatgttggaagatgtagaaaaatcaagagaaatgctcacacgactttcggatatgttgcgctattcgctaaatatggacaaagttgatgctattcaaatagaacaggaattggaaattgtagataattatgttgcgttgtccaaaatacaattagaagatcggttgcagtattcaaaacaagtagatgcaaacttattacaaataaaaattccgccgatggtattgcaaatgttggtagaaaatgcaataaaacacggcatttctaaccagaaaaatggtggaaaaattacgttgattgttacagataataacgaaaaaataatcttgcaagtcaacaatacaggaacgttgcaaacggacacagattctacccgaataggattaaacaacataaaaaaacggttggaattactctatggaaatgaagcaagctttacgctaaaagaagtagaaaatgaagtacacgccatcattcaaataccagtaaattaaaatgatatatctatggaaaatatcacagcaattattgtagaagattctcgcttagcgcggaatgaactcaaagaacttctaaaaaaacatccgcaaattgcattagttggcgaagctgaaaatgtagacaaagcgtacgaactcatcaacgaaacgcaaccaaaagtattatttttggacattaatatgcctgaaaaaaatgggtttgaattactggaaatgttagacaatgttccgctcactattttcacaacggcgtatgacgaatatgctataaaatcgtttgaatacaatgcgtttgattacttgctaaaacccatcaatcaagatcgattttctaaaacaatagaaaaagtcatctcaaccatagaaaaagaaacaaccgacgaaaaaccatt

SEQ ID NO: 1195 - DNA, 24398 bp, synthetic construct
  source 1..24398: mol_type = other DNA
  misc_feature 1..24398: note = Synthetic
atctggattgactttcaggatgcaaatttctacaatcctgtctttgccgatattggttcctgtggtctctaaatcaaagatacacagtggtttatgtaattttaaattcacaatatttaaggtttgaaaattaaatttatttcagctgattttggaaaacaatggaaaccagcatgtaatagatgatggatagcggaatgcctgtccatccgaaaaatattaaaataggaataatgccgatgattagggctaatttagggtaattgtcttcaagttttttggacttgaatttcatggcaatcattttaatcggacttaccaaaagccaagaactcagagcggtaagcaccaaaagaagtccctcgttttccattaaaaatgaaaaactttgattttctttaaaagcaaaataaagcccaaaaatcaggaaagtgttactcggtgtattcagtcctttgaaatagtaggtctgctcatcatcaatgttaaaaattgccagtctcatacaagacaaaagcgtgatggaaatccctaaatactgcactttgaaaggtaaatcaatcccgaaaagctgattcccaaaaggctccagcatgacaaacatcgtaagccccggcagcacaccaaaagtcaccatatccgcaagggagtcaagttgtacgccgagttcagaatttgattttaaggcacgagccacgaacccatcaaaaaaatctaaaacggctgatattaggatacatatcgcagtggtctggtagtcaccatttaataaatgaactgctcccacacatccagaaaataagtttccgagagtgaagaaattcgctaaattgtttcttaaaaaattcatagagcaaatataaaattttattggataaaagccgaatttttggatttcattttcattatcctcagctaaaaaacttacctttgtgctattaagttagaaaaagtatgaaagaactccgtttgcaggaagtaaaagtcttgatatatcgtatattccttgtttttgttttttatcaggcagcgaggtttttattttggttttttaatcgggatttgctggaaatagacagtgtttttcagtattttaagctggcttactacggcactgcatttgatactacggcgatactttatgtcaatattgttttcattttttttagtcttattcctttgactatcaatactaaaggaggatatcaaaagtttttgttttggctttattttattctgaatggaatcgcgtatgcgatgaatttcggagatattgtttattatagatttagccagtcgaggctgacttctgcggtgataaatgtcgttgaaaatgagcagaatataggcaaggttttttgggcttctttgggacagaatttttgggtttttctttgtttcgttgtgttgatgggtctttgggttttcctttataaaagaatgaaaatcaaagaaataaagattgaaaagaaaatttggtattttggaggttctgtggtaagtctttgtctggcagcggtgcttatagttggtggaattcgtggagattttaaacacagcacccgccctatcaatttggtggatgctaaccgccatacagacaagcctgcgcacgcaaacatcgttctaaacagtactttttcgttttttagaaccatcaatacgaatggctttaaggaagtgcattttgtggatgaaaaatacatcgcagagaatgtaaaaccttataaaacctaccaaagggaagttccacagccaagacctaacatcgtgattctcatagtggaaagcctcggaagggaatacataggagcgtttaacgaggagaaaaatataaaagattatgtttcttacacgccgtttttggacagtttgtcaaaggagagtctgatttttcctaatacttttgctaatggaaggcagtctatccatgggatgagcagtgttttggcgggaattccgagcttaaaggatgcttttacgagttcgccttattctaatcaaaagatacaatccatcgtttctgtggcgaatgaattgggctacgaaacttctttttatcacggtgcgccgaatggttctatgggctttcagggatttgcgaatatcctcggttttaaggattattttggaaaaactgagtataataatgataaggattttgatgggatttgggcgatttgggatgagccttttctgcaatattttgctaaaaatgtaggaaagtctaataaaccatttatggcaacggtttttacggcgtcttcgcatcatccatttaaaattcctgcacagtacgaagggaaatttaaaaaaggttttgtcgaaatgcatgaaccgatacaatatgcagactacgccttgaaaaagtattttgaaacggcacaaaaacagccttggtatgagaatactatttttgttatcacgggagatcacacgaacaaaatctactatcctgagtatgctaaagcgatgaacggatatgcagttcctattattttctattctccaaatccgaagtataatttgaaaggaaaaaatatgacctacgcccagcagatagatatttatcctacacttgcagatatcattggctataataagcctttgcgaagctggggaagaagccttgtttcggataaaaacgaggaatacattgttgtcaattctgatgcgatacaggaacagttcatgataggaaattatatctatcgttttgatggtaaggatattacggggatttatgaaatcactgaccttgaactaaaaaacaatcttcttggtaaaataaataacgctgaaattgagcatggaaaactcctcagtaaggcttggtatcaggattatatgcacagagttattagaaaaaaactgaattaaatataaaagtttttaaacagttgtttaaattttgaatttcttgttaaatattattagtaaaaggctaaaatgaaatttgtttttgctgtttaatttttatttctatatttgcgctgtaaatattttatagatttaatcatgaaaaattcaattttagcctttgcattattgtgcagttccatggcttttgcccagatagagggaaaatggagaacgatagatgacgaaaccaaaaaaccaaaatccatcgtagaaatttttaaaaaatctgatggtaaatactacgcgaaagtagtagaactactgataaaaccagctgatcctaactgttcctcttgtaaagatgacagaaaagggaaacctattttaggaatggaggttgtccgcggattgtctaaagatggcgatgaatacagcggaggaacgataacagaccctaaaaacggaaaatcatacaaatgcacgatcaaaaaagaaggaaataaccttatggttcgtgcttatataggattttccgcatttggtagaagccagacatggcaaaaagtaaactaaatatgaattaatgaaaaatcctttctaaattttggaaaggatttttttatgcagaattattttgattaaaaatcagaaaaaaatgacaaaaaattttgcagattaaaaaagtttttatactttcgcaaaatattcgaacaaaaaggagagaataatgtttatccaatacaatcatacaagaacatctaaacataccattaccatgtgtatgactatgatgatgtgggtttttgagaagccgcagtttttgtgattgtaaaatacgaatagaaaaattttatataaattatacaaaattatcacaagggcttcggacaaaaaccgaagctctttttttatgtttaaactaaatctaaattaaaaattaaaatgttaataaatctaaatcataaaaacgaaaatctagtttcccaaatgatgggaatgatgatgatgtgtggctttgtgaaagaccgcagtttttgtgatggatggagttttaagttttcttcataattatcccagagcttcggtaaatacgccgaggctctttttttatgtttaaaccaaattttaattaaaaaattaacaatactatatataatgaaaagaaaagtagtcagattaagcactttgtttgcgttgttctctttcgtggggacattcagtgctcaggaaaagaagaaggattctatcaaggaaaattccatcggtgaagtcgtgatagtagcctttgggaaacagaaaaaagaagaaatcacaggttctatccaagaactaaaacccaaggatatctctgcattacagaacggaaatgtcttgcagggacttgcagggcgtgtagcgggggttcagattgtgggaaatggacagccagggagcagcccgagcatacgaatgagagggataggctctatcaacgcttctagtgagccgctgattgtcttggatgggatcccttacccagggtcgctcaattccattccgtcttcggatatagagagtttgtccttcttggaagatgcttcatcaaatgctttgtatggctcacgaggggcaaacggagtaatcatcatcactactaaaaaaggaacgagaaaggggattcatgtagattttgatattaaaacagggattaacttccgtgcgactccagaatatgacatcatcagcagtcctgccgagtattatttggcatatttcaacagagttcgcgtaggtgagaaggcaagaggaaaaactgatgcccaagcttatacagaggcgataaacaaaatgaacgccacgctgggatataatgcttataatcttccttttaaccagcttatcaatcaggatggaagttttaaccaaaatgctaaactgctttatcaggacaattggcaaaaactattattccgaccaaatctccgccaagaagcaaacctcagcttcactgcaaataccgataaattaaaggcttacacttcacttggctaccttaatgaccacagttacctcatcggttctggatttaaaagattgagtttaaggtctaatttggaatatgctcttaatgaaaaattgaaattcggagctaatctaaattacagcaacagcgaacagaatctgggcgatggaggaagttttgctaactcgttccagttttctaggaatatcgcgcctttttacccagtgtatttgagggataatgactataacagagtttatgatatcaaaggaagggcggtctatgactacggagatggaaaagggccaaatggggcgagaaggtcttacgccgtttttgaaaaccctgtgggaaaccgtcagtatgatttgaacaaagtgaccaataacacggtgaataccaatcttttcgtgcagtataaattcttgaaagattttgattttacttataattttggtggtgtgattatcaattcccaagagcttgtttatggaaatcctttgggagggactacggctactgtgggcgggcgacttgcaaaatccaatactctgaaatacgcctttaaccaccagcagttattatcttataataaacaactcggcgcgcataatatcagtgttcttctggggcatgagctgaaccaagagaagagcgattatttcggggcgagaaaagaaaaattgttcttggaagggcttgctgtttttgataatgttttgaaaatgaacgaaatcccaggaaaccaatacgactacgctgtggaagggtttttctcccgagttttgtataattataaaaacaaatatttcttcaatgccagccttagaagagatggttcatcagtattttccaaagaaaacagatgggggactttctatggactgggggcagcatgggacatttcgaaagaggatttcttaaaggattcggagactgttaatgccctgaaagtgaaggcttcctatggacagcaggggaacgatattttctacttcccaggcactacggacagaatctattatgcttacaaaaatttatataaagtaagtaacttcggggatgatacgcctgtggttactacggaatatcttggaaataataagctgagatgggaaaactcccaaaacctaaatgctggttttgaaacggctttgttcaatagaagattgtctatcaatgctgaatatttcgagagaaaagtttctgatatgatctatcgtgcggcgcttcctttctctaatgtggggtattatcctaggttagaaaacatcggaaacatgagaaacagaggagttcaggtgagcatcaatggagatgtaattaaaacagagaatttcacttggaatctatacgccaaccttactcattacaaaaataaaatcaccaaactccctgatgcacagagagaaaatgggataacggacgggctgttcctcctgaaagaaggcagcgaccgctatgcttactatctgaaagagttcgcaggggtggatcctctgaatggagatgcgctttggtataaagatggcgtggatgcgagtggaaatccagttaaacaagttacaaacagctacgctgaagcaacgctttaccaaacaggaaaatctgctataccaaaggtttatggtggttttggaactcagataagatttaaaaatatcactctatcggctaattttgcgtatcagctgggtggctggggctatgaccaaaactacagatcgctcctgcattcggacaactatgcgtctaactaccatagagatgttcataacacatggacgccagaaaatcctacggcatctctgccaagaatagatatttctaattctaaccaaaatgctagctctacactgttcttaacgaaatcagactatttaagtcttcaagatttgacgctgagtgtgggcataccgcagaatttccttgaaaactacggaatccgagatgccaatatttatgtgacaggaaacaatcttttcttactttcaaagagaagaggctacgacccaaggctgtctatttctggagtttcggagacatacggatacaatctgttgtcaagtgtttcattaggtcttaatcttaaattttaatccttaaaaaaagttatgaaaataaataaaatattagcaggagcattcgttgccctatcacttttaagctgtaatagagaattagaaacagaatccgcgaaactgatttcagaggagcagattcctgatgatgcagcatctttggacaagtatctcaatgggatttatcttggatttagaaatcatggttcgggtggaactaccactcacacagattttgggataatgtccataaaagcaggggttgatttgctttccaatgaccttattcaggcgaaacagcagcaccttgggagatattacaactatgaagcgagacaaagcgacaactttaccaacgaaatcgtttggaatacattttattctaaaatctttgatatcaatcgtctgatagagaagatagaaggcataggcgtaaataatgaaaaccgacacatctacggtcagcttttggcacttcgtgcgtatagttattttaatttggtgagattctatgcgcttacctatgttggtcatcagaatgaactgggagttcctttggtaactactgcatccagcccagaaacaccgagagcaagagccactgtgcgcgaagtttataatcaaataaccagcgatatagaaaacgccatcacttcgctgaatggtttcactcagcgaaacattgcacagatagaccaaagagcagccaaagccatcgcggcggatatttaccttgaaataggagattataccaaagcggcagcctatgctaatgatgcccgaacaggcaaaacgctgatgtctcaggcggactacacaggtgcaggattttctctaaaaaccaatccagagattatctggggatttgataattctttacagaccaaaaacatcggtaaccactacgcttcgttcttctccatgtatgatagcatgaatgaaggctatgcaggagcggcagggatttataaaatcattgataaaagattatacgaccaaatcccaagcactgattatagaaaacaagtgttcaatggggctgcggcatctgcctataccttcaacggaaaaaccaaaactcatcctgcgtatgtgagcagaaagttcaaggatttgactttctttgaaggggattatatctacatcagagcatcttcgctttactatatagaagcggaagctttggcgagactagggcagacagctcaggcgagacaggtgctctatgatattacttctgtgagagatacaggatacacgctttccacgaactctgggcagagcctcatagatgaaatcatcctgcaaaagagaatagaactctggggcgaaggctacgcttggtttgatatgaaacgccttggggtggatttggtaagggattatccaggttctaaccatacctttgggaagtttaatcgtagttattctacggactataaccaataccgtttccagattccacagagtgaggtgagtaacaatcctaatattgttcaaaacccagtgaaataagccatgaaaaccacagcccgctgaaagtggaaattcctttcggcgggtttgttttttttttttaattaaaaaaataaagtattcattgtcaaggttttgtaactttgacaatgattttttgtaacgaaaaaaatatttcctgcactaatgtgggtataaaatacattttataaaagttagagtttaaataattaaaatcaagacaaatgaaaacaaatcaaaataaagaagatttagtggagatgatgaccaagagaaaggatttattttgggctggtttttctttgataaacttttaaaaagcattttatgaaagccgaacagcagcaggagtttatcaagcaactgaatgaaaaccagagggtaatccataagatttgtaaaatctacatggacaatcccagcgaccacgaagacctttttcaggagattgtaattcagctttggaaagcctatcctaatttccgtggagaagccaaattttccacttgggcttaccgcattgggctgaataccgcactagcactattccgaaagcggaaaagagatgtccctgcggactctatggagattcttcccgagataaaaatagcagaagaaaacgatgaccagaccgcacagatacaggcgatgtatgatgctatacaccagctgtccgatgtggaaaaagccctcatcatgatgtatctggatgacaagccctatcgagaaatttccgagatactgggcataacggaaggaaacgcccgtgtgaaaatgaaccgtgcaaaagaaaaactaaaaaccctcatcaaaaaataaggctatggacgaattagaattgttaaaaaaagactggaaagaaaataaatctgatgattttaaaaattatacagaaaaagaacttttcgcaatgaccaaaaaaaggtctgtttccatcgcaaaatgggtgtttatcattgctttgctagagctgggattttggtttttaattggatatttaatgccttcttcttcatccgaagataaataccaagacattccttttgttaatgggattttgagtgttatggatataatttctattcttttaccatatgtttttataggtttacttttatatttaaattttaaaataaaaagagaagaaaaccctaaaaaactgatggaaaaaatcctgctgatgaaaaaatgtatccaatggtatattagaatatttttaggagaaattgtggtgtttttcatcatcagtatgatattgtcattttatatagaaagtaattctttggagggagctgaattagaagaattgtacctttttgcatttgtaatgtttattcctcttttaatgattattttcatttttgctttattcctaagatttatttatcatctcgtttatggaaacctgctacataaactgaaacaaaactacgaagaactcagccgaatggaagagtaaagtaaaaatcccttaatttaagggattttttttatgaaataaaaaagccccgaagatagtcgaggcgctagatgttttcacaacggaatcatccttattgtgagttgctttcaaatatgtagcaaagatatatcaaatctttcgtatttccaaacatctttttcacctctttttaagaaaattttaactaaatttggtatcgattgtaaagatataccaatgaaacatattttaggcttagatttaggctcaaactctattgggtgggcgcttattgaacaagattttgataataaacaagggaaaattcttggactgggaagtagaattattcctatggaacagaaaattttaagtaagtttgaggaaggaacaacagtttcccaaacggcagaaaggacaaaatttcgcggtatacgccgactaagagagcggcatctgctccgtagggaaaggctgcatagggttctccatttgttaggatttttgccgcctcactatgatgcacaaatagacttcacaaagcgttttggtaaatttataggagatactgagcctaaactggcttataataatgaaggttttatctttttagaaagtttcaatgaaatggttgaggattttaaaaaacaccagcctcagctattttacataaaatctaacggtgaagagagtaaaattccttatgactggacaatttattatttaaggaaaaaggctttgtatgagaagatcagcaaggaagaattggcttggataattctgaattttaatcagaaaagaggatactaccagctaagagaagaggaagaagaaaaagaaaatgattttgaaattatttcttcaaaagttttatctgttgttaaaaaagaaaaagataaaaaatataataaatattggtatgatataattttagaaaatggtttagtatatacagcagctttttataatgatttcgtatatagttgggttgatcaagaaagagaatttgtagcaaagcgaacactcctaaaaaatggaagtgaaaaagtagaactttcatatttacctacttttgatgaaattgctaaaatgaataaacagcagcaagataaattttatcaaaaaataaagattaagacagaaaatagtattggaaataaaccagtaggtgcctatatctacgatcacttgttacaaaatcctaatcagaaaataaaaggaaaattagtccgaaccattgaacgaaagttctataaagaggaattaaaggctattttagaaaaacaggtagctcttcagccagagctttttacggaagagctttttgtggattgcgtgagagaattgtataaaaataatgaaatacaccaaaacagcctttcttcaaaagattttgagcatttgtttctgaatgatattattttctatcaaagacctctgcgcagccaaaaatcaaatatatcaagctgttctctggaatatcgtttctgtattgacaaagaaacaaaacagagaagaaaaacttatctaaaagttatttctaaatcaaatccttactatcaggaatttagagtactgcaatggctttctaatcttaaaatttatagaaaagaagatgataaagatgtgacttctgaatttatttcttccatagaggacaaagaaactctgtatgaatttttgatgtctgaaaaggaagtaagtaataaatctatacttgaatttcttttaatgaaatcattgagagagatatatccttttgctaaagaaacggagctaaaaaaagaactgaaaaaagaaattacaaaataccgctggaactatgtatatgaggaggaaaatgacaacaaaaaatatccaatgaatgaaacaggatatgagattaaaaaaagactgaaagaagtaaaaaacataccagataatttcttaaccaaagatatagaatatcagctttggcatataatatattctgtaacagataaatacgaatacgaaaaggctctgatgaagtttgctcaaaaacataatttggatacagagtctttcgtagaaaattttaagaaaataaaaccttacccaagtgattacggagcattttctgagaaagcaatcaagaaactgcttcctctgatgcgttttggtaaatactggaattacagcgacatttctgagccagtacaagcgcgaatatcagacattatcaatggtgttgataatgagagtattaaaaccattgtaagggaaaaggctgataaataccagcttggtcaagaggttgattttcaagagctaccactttggctggctcagtatgtggtgtatggaattcattcagaggctgctgatatacagcactggacttcgccttctgatttggaagaatatctgaaaggcttcaaacagcattctttgaggaatcctattgtagaacaggtggttacagagactctgcgagtggtaaaggacatttgggaatattatggaaaagtagagcaaaatttcttcaaagagatacatatagagcttggcagggaacttaagaaaacagccgaggaaagaaatagagtgactagggaaataaatgaaaatgaagaaacaaacctgaaggtaaaaaagaaattacaagaattatttgaagataaaagcgtagagaatgttcgtccatattctcctattcagcaagaaaaatatagactttggcaggaacaaaaagaaaggtctccttacacagggcagccaattccgctgagtaaattgtttacagatgaatatcagatagagcatgtcattcctcaaagtagattttttgatgacagcctttctaataaagtgatatgcgaggctgctgttaatgcccaaaaaggagcacagctaggtttagaatttataaaaaaacatggtggagaaataatagaaattggcttaaataaaaaagttataatccttaatgaaaaagagtataaagagctggtcaataaacactttgccaataaccgagcaaagaaagccaaaatgctgatggaagaaattccagagaaaatggtagaaagacagctcaatgacacaaggtatatcagtaaatttatttcacaaattctctctaatatagttcgctctcctcaggaggataatggtgtgaattctaaaaatattataccatgtacaggaaaaattacagccgcgctaaaacaagactgggggctgaatgatgtatggaatgaccttatcctgcctcgttttgagagaatgaataaactgacacagacagaattatttacaacatatagtgaaaaatatcagaagaagattcctactgttccacttgaatacgctaaaggtttccaaaagaaacgaatagatcaccgtcaccatgctttggatgccttggttgtagcttgtgctactcgcagtcatatcaattatatgaataaccagaatgctttggataaacataaaactaaagaagaaaaacagaatgctcgagtagatttaagaactgtcttatgtgagaaaaagtataatgataatgctgaagataattacaattggatatttaaaaagccatggaatacctttacccaagatgtgcgaagcgcccttgaaatggtagttgtgagtttcaaacaaaacctaagagtaatcaataaagctaccaattattatgaaaaatgggtagaggaaaaaggtaaaatggtgaagaaaaaagtgaaacaagaaggtatcaactgggctatcagaaaacctttgcataaagagactatttctggaaaaatcactttagaaagggtgaaagtaggtaaggggaaaattctcacagctactcgtaaaagtatagattcatcttttacagagaagacaatagcatctatcacagatacaggaatacaaaaaatattgctcaattaccttgctcataaaggaagtcctgaattagctttttctccagaaggccttgaagagatgaataaaaatattgccaaatataatgatggaaaagatcaccagcctatttataaagtgcgtatttttgaagaaggaagtaagtttcctcttggtgaaataggaactaaatcccaaaaatatgtagaaacagccaaaggaactaatcttttctttggaatatatcaaggtaaggaaaaacgctcctatgccactattccattagatgaggtgattgagcgacaaaaacaagggcttacttctgtttcagaacataatgaaaaaggagaaaaattattatttagtctctctcctaatgatttggtgtatgtgcctatggaaggtgaagatgccgaaagtattgattacgctaatttatccaaagaacaaagggaaaggatttataaaatagtaaatttttctaaaaaaagattatacggggtacctaatattgttgctattcctattatagataagatggaatatacccaatataacaaaatagagtttttaaaagaaaaagaatcttgtatcaaactaaaaatagaccgtttaggaaatatttctaaggcttaatgttataaatatttttttagtcatgctgtatcgttctatttatattggcaatcctgcttatctaaagctcaaggataaacagttaaagattactgaccctgaaaccaaaatagaaaagggaagtatttctatagaggatttaggattgttgatgcttgatcattatcagattaccatatctcatcagctgatgcaggaaatgatgaagaataatgtcgtaatgattagttgtgattccaggcatatgccaaaaggtgtgatgctacctatttatggacattcggagcattcggaacggatgaaatatcaattggaggcaagcgaacctttgaaaaaacagctctggaaacaaacgatagagtgtaaaatagaaaatcaggctaaagtattggaaaaattaggtagattctctgagccgatgtatgattatttgaaaaatgtaaaatcaggagattctactaatatggaaggtattgccgcccagcattattggaaatatcttatcagtccggattttctcagaggcaggtttggtgattatcctaaccagtttttcaattttgggtatggagttcttttgagtatcgtttctagagcaatagtagagactggcttgcttcctgtattgggaatttttcataagaataaatacaatccctattgcttggcaagtgatatgatggagccttatcgcccatttgtagatatgctcgtcatccaatggatagagaataatcctgatatagaagagcttagcaaagaagcaaaagcacattttctaaatattgcttcaaaagatgtacagatagatggccttgtaagaccactgatggttggtataaaaacaacgatttcttcgctttataaatgctacacaggagagaaaagattgatttcttatcccaatttattatgaatagtgaacgactaaatgcatatcgaattatgtgggttatggtgctatatgatttacctactgatacaaaagaaaatataaaggcatctaatttatttagaaaacgcctgatagatgatggcttttctctgtttcagttttctatgtatattcgccattgtccaagccgagagaatgcagaagttcatatcaaaagagtaaaaaatatattaccaaaacaaggaaaagtggcgataatgtgtattacagacaagcaatttggagcgatagaaattttttatgctaggaatgaagaaaaaccgcctccaatgtggcagcagttagaattattttaattttttgaatcgtataaaacaaaaaaatccgctgattatcagtggattttactttgaggctgtgatgtatccacaaagttaaagaatttgaaagcaactcacaacattattggcgaatttaccttctatcaaaccgctgtgatgtatccacaaagttaaagaatttgaaagcaactcacaacaaaaatatataaagaagatgagaggtcgttgctgtgatgtatccacaaagttaaagaatttgaaagcaactcacaacggcgaaacaggaaagtcagatcctttctctgctgtgatgtatccacaaagttaaagaatttgaaagcaactcacaacaatgtagtacacatagctttataaatttaagctgtgatgtatccacaaagttaaagaatttgaaagcaactcacaacgaaggaatgggagatgaggcagtatataatgctgtgatgtatccacaaagttaaagaatttgaaagcaactcacaactgtccctgtggcttttataaaaaccatgacgctgtgatgtatccacaaagttaaagaatttgaaagcaactcacaaccactgacctggtgcgtggtgttccgttacagctgtgatgtatccacaaagttaaagaatttgaaagcaactcacaactaataatgttatattattgtcaatattgttgctgtgatgtatccacaaagttaaagaatttgaaagcaactcacaacatattcaaggagatggttttccttatcatagctgtgatgtatccacaaagttaaagaatttgaaagtaactcaaaaagttgtttctacatctgcaaaagttttttattataaatagaaaaagactacttttaaaagcagtctttttttaatccctctatttcaagggcggcacaatgggcggttctttaaaacctaccctttgtattgcaaaagtaatacattttttaataaaagataaaatatatagaacaaaaaacgccctgatgaaaattctcatcagggcgtttccattaaaattaaatataattatgaaaagatttatttctctttatttttaatcgcttcagttattttttggctaagttcttcggtaagctctggattgtctttcagaagttctttcacagcatctctaccttgtcctagtttagtgtctccatagctgaaccatgagccgcttttcttaattacatcataatctacaccaaggtctaagatttctccaatcttggaaactccctcgccgtacataatgtcaaattctgcttgtctgaaaggtggcgccactttatttttcaccacttttacttttactcggcttcctacggcttcatcgcctacctttatcggtgtgctggcttttctgatgtctattctcacagaagcgtagaatttaagtgcgtttccaccagtagtcgtttctgggttaccaaacatcacacctattttttctctcaactggttgatgaaaatcacggtacatttggttttattgatagttcctgtgagttttctcaatgcctgagacatcagcctagcgtgtagtcccattttggaatctcccatgtcgccgtctatttcggcctttggagtaagagccgccacagagtctattactacgatgtctatcgcaccagaacggatgaggttgtccgcgatttcaagggcttgctctccattgtctggctgggaaataataaggttttctaaatcaattcctaattttgcagcataacttctgtcaaaggcatgctctgcatctatgaaagccgctattcctcctgctttttgggcttcggcaatggcgtgtagtgtaagggtagttttccctgatgattcaggcccgaaaatctctattactcttcctcgtggatatccgcctacaccgagggctatatccagtcccaaagaaccagacggaatcacttctattgtatcatctactgcgctgtctcccagcttcattacagtaccttttccataggtcttgtccattttttctaggactagactcagtgcttttttcttatcttctaaattactcatcttcgatcaaatattgcctcaaagttacaaatattttagtagatattatcaattttgtttttaaaatatttccatcaaaataaaatcccagaaatcataatggaataaagaaaaaaataaaaatccttatctttggcaaaattcttttaaatacaaaaaagtaatgttaaaagcaggtttagtaggtgctgggcatcttgggaaaatacatttgaaattgctcaaccaatcagaaaaatacgatttggtgggcttccatgataaagatatagaaaattccaaaaagctggaagcagaatttggatacaaattttatgaaaacttggacgaactcttggataaaatagaggttctggacatcgtgacgcctacattttatcatcatgactatgctaaaatagccatagaaagaggcttggattttttcatagaaaagcctgtaactcagaccttggagcaggcagaagagattattcagctttgtaacgaaaagggaatcagggcgcaggtagggcatgtagagcgctacaatcctgcgtttatcgctacgaagccgtttatcagcgaaccaaaattcattgaaatccaccgtttggctgagtttaatccgagaggaacggatgtttctgtggttttggatttgatgatacatgatttggatattttgctttctttggtgaaatctcctgtgaaaaacatccacgcaagcggcgtctgtgtagtcagtaaatcgcctgatatcgctaatgccagaatagaatttgagaatgggtgtgtggcgaatcttaccacgagccgaatctcaatgaaatccatgcgaaagagccgatttttccaaagagatgcctatatttcggtggatttcttagagaaaaaagcggaggttatccgtatgaaactagctcctgaaaatccatcagattttgatatgattatccaaaatgcagagggcgaaagaaaccaaattatattcgaatatcctaatattcagccgaataatgcgattttggatgaattggaaagtttcgcaaactccatcaccgagaataagcccgtggaggtaagtctggaagatggaacagaagcgctgaaagtggctttggaaattatgaaactaattgataaaaaataatttacatgaaagtttttaaacttgtattgttgttatttattacttctgcatcgcttgtttttgggcaggagaaaagatatttctttaaacatgaatttcagccaaattcaaagtatttggtagatttaaaaacatcgacagaagtagaagtatatacaaaaaataaagatgcttccaaagatttaaaatctggaagaggaaaaataggtgttgatgtaagaggtcatatttttacagataaaaagcgagaagaagatgttccagctgtaatagaatattctaatttatttctggaagaagaatataatgaggaaaagagtggtaaaagaaaaatatcattaaaagaagctaaaataaaaggcgagtttttaaaaggcaatgaactgatagttaataatatattggttgaatccactgcacctattagaatgttattgcttgaaattacaagtaaaaactatcagtcagtagattttccaaaagaaggaataaaaataggagacagctttgatttagttcatatttataaaactcatattcctgaatatggatttcaaaaagcatatacagaattagaaaaaactatgaaatataagctgacaaaaattgatagtggaaaagcatattttgatatattgattagtttttcgaagaaaggaaaagagtttgaaaaaaaggatttgttagttttaggaggcggaacgggaaaagcgatatttgatatgaaaaataatcagtttatttattttgatacagatattttgataaattataaaattaaaataaaaaaagaagagttagaaagaattcataaagaaaaatccgtcattattcaacaaaaaataaaataaaaatattttttagagaaactacatttatatttattaactttgcaaaaccttataaggtatatatttttagtcaaacaatttaaatttagaaagttatgaaattaccaaagtttttgatggcagataattcagaatttccagaggatttgttcgttgtgcatacagaatatccaagatttatcctaaatgtagaggaagaagaagtagaatggctggatgaaccagaaggagatgatgaggaaactatcgcgaatgaatttacaaaagtagtagaggaggcgttcgtatggtgtgatgaagaattggcgaaatatgacgatttggaagattaattatctttaaaacaaaataaaaacccactttttaggtgggttttttattttatagaccgaaagcctttttgatttcttctactttatccagtttctcccaagtgaaaaactctaaacctttgatagtaagctcgtttttagcgcctttgttaaaggttttatccgctacataataatttcttcccatgtgtccataggctgctgtttcgcggtagataggatttctcagttttaggttttgctctatcgcataaggtctcaggtcaaataattgctgcactttttctgcgatttcgccatcagtcagatttactttggaagttccataagtgttgatatacaaaccacaaggtttagcaactccgatggcgtaagaaatctgaaccaaaatttcatctgcaactcccgctgctacaaggtttttggcgatgtgtctcatggcataggcagcacttctatccactttagaagggtcttttccagagaatgctcctcctccgtgagcgccttttcctccgtaagtatctatgatgatttttcttcctgtaagtccagtatctccgtgtgggccaccgattacgaatttcccagtaggattgatatggaatgtaatatcatcattgaaaagcgcctgaatttcaggtttttgtttcgctttaacttttggaattaaaatctcgatgatgtcttttctgatttttgccagcatgttttcttctgtgtcaaattcatcatgctgagtagaaaccacgatgctgtctattctcacaggcttgtgattatcagaatattctatcgtaacttgtgattttgcatcagggcgaaggtaggtaatttccttattttctctcctcaatgcagaaagctctctcaaaatagaatgagccaagtctaatgccagcggcatatagttttcggtttcgtttgtcgcatatccgaacataattccttggtcaccagcaccttgtgcatttgctttggtctcaaaatcagaactttgggtaattctgtccacgccttggttgatgtctggcgactgctcatggatggcagaaatcacaccacaagaatcaccattgaacatatattcgccttttgtgtagccgatatcattgataacctccctagcgatggtctgcacatcaaggtaagcctcagatttcacctctccagctaggacaacctgcccagtggttacgagcgtttcacaagctacttttgagttcttatcataggccaaaaaatggtctattaaagcgtcagatatttggtctgcaattttatctggatgtccttcagaaacggactctgatgtaaataagtaagacataaaatttctttatttttttagttaataattgaaatttataaaaaccacaaagcctaaataaagaaactaaaaagagaatttctgttttagcatttttttattgaggttgcaatcagtacaaatttttcctctaaattttcgaaggcaaatttacataaaaaatttaaacttcaaaattaaactttactgaggagcgataatagagaagtcctttggatttttattataattaagatgttttgccaaagcatcttttataaaagagccaaattcattgagcattttttgtttgtaagtaggtttatagtagatgaggctgatttctctggaagggaaaggctttttaaaatggaaaacttttttcttttgttcttctgagagttgctgcatggcaagttctgggagtacagtgatgcctcctgttttgtccaccatttttataagagtgctgatgctggatgcagagaactccaagtttttgggtttcagtgagttttctcttagatgacagatggtttccatttgttttcttaagcagtttccctcttctaaaagccaaaatttatctgaattaaaatcctcagaacctataaaatattcatctttattttcataagaggaataaatcagtagttcttcattaaaaagaaaatcactgaaaaattcttctgtttcatgatatggagtggaaatgatgcctgcatctatttcgccagattttagggattttatgatgtttccggtattcatttcgtagatgttcatttctatttttgggttttgatttagaaaatcaaaaatttcattcgggatgagaaatccagaaaccgtaggaataatgccgaggttgattttcccagccaatacatcattgagcgaatgagctttgtttttcagttctgtgatgctttccagcactgcttttgcgtaggaaataatctcatctcctgcatctgtggtgcggatagggtgggaggttctgtcaaagattttcagacttagttcttcctctaatttttgaatcattgcactgagcgtaggctgtgtaacatgacaagtttgggctgctttcccgaaatgcttgtatttatcaacggcaatgaggtattctaactgctggatgttcatgattttcaaaaatattttatataaaactcattttcaataaagcaaagttacaaaattactgtaaccaatcctgattgtacgaaaacagaattggttacagtgaatttacagacttatgtatagaactattttacagtctctttgtaagaatccgtaaaactctgtctctgtcctgtgtaagaagtgaagctcgtactccagttctgaactctagctcctgtgtatgttttagttactgtccattttacaaatagattaccataaatgtcagtagcttttacttctataaaagatttgaatcctttatttacttcaaaagaaatattttctgatattccacttctcagatatatttttctcttgtttccattggcatctctataggttacagagccgttaatagaattattaccttgatattgaacctgcagtttagccgtatatatggcatcatcatctttatccctagaacaggaagaaacaataaaacccaaaactaatgcaagcgcacccactaaaatacttctttttgataaaaactttttcattttaaaaattaaatttttttgtttttaataattctcaaaaattataccaatagaggacaataatgtcattaacagcttttttctatgcataagactcagtaggagcgcaggtacagattagatttctgtctccataggcatcatctacacgagaaacagaagcaaagaacttattttctcttatccattccagaggatatgctgctttttctcggctgtatggtttgtcccatgcatcagagattactagttgttctgtatgcggtgcatttttcaagacattgttttccttgtcagctttgccattcattatttcatcaatttcatatttgatgtttatcaaagcttcagcaaatctatcaagttcctctttattttcggattcagtaggctctatcataagggttcctgccacagggaaagacaccgtaggcgcgtggaatccgtagtccatcagtcgtttcgcaatatcacccacttctattccataggttttgaatggtcggaaatccacgatacattcgtgtgcaactctttcattttcattgttatacaggatagaataatgctcttttaacacatcttttaggtaatttgcgtttagaatagcgtattctgtggctttttttagtccttgagttcccagcattttgatgtaggcgtaggaaatatttaccacaagggcagaaccatacggagcagaagaaatagcatcgatagagtgttctgaacctattttcacatttggatttgagggtaagaacggaaccaaatgtttcgctacacagataggccctacaccaggtccgccgccgccatgagggatagcgaaggttttatgtaagtttaggtggcatacatctgcaccgatatgccctgggctggtaaagccaacctgagcgttcatattagcaccatccatgtacacctgtccgccgttggcatggattagattgataatatctgtaacattattgtcaaagaaaccataagtggacggatatgtaatcatgaatgccgccagattttctttgtgctgttctacttttgcttttaaatcatcgaaatcaatctgtccgttttctagattttttaccacaactacttttagccctgctacgatagccgaagcgggattcgtaccgtgtgcagactgcggaataagcacgatatctctatgaccttcgcctttgtgctttaggtattcacggattaccatcagtcctgcgtactcgccttgtgcaccagagttaggctgtagggaagttcctgcaaaacctgtgatttcggctaaatctttttctaattctttgattagtttttggtagccttttgcctgttccatcggcacgaaagggtggatatttccccattcaggcc

SEQ ID NO: 1196 - DNA, 24395 bp, synthetic construct
  misc_feature 1..24395: note = Synthetic
  source 1..24395: mol_type = other DNA
ttctcttagcccaatagctggatcagccaagtaatagatttgcttttttactttatacagaatgacaaagtgactctgtcgccaatgcagaatacagggtaatgttatctcttctaattgagtaacactaagacggactccttgtgtcctaaatcccaatttttcagcagcttcacttattcctaacaggtttacgccagctccatgagtttgtgatagtttccttattgtatcaatattaatattttttccatagtatttgcaaatcatacgtaagcatgttgcaccacagtccatgacatcaaattggcggtagtgaggaaatttaggcatctatagaaatattaatgttttatgcgaatgaatcagtttgatataccttttgtaatgcatcaatcatgctttgacagtgatatttttcgttgaatgttaaaaaagcattgctccccagacggagcgctaagcctttatttttaataagagttactatttttttgtacagatcttcctcatctacatttagatctccatttttatttatatttatttttgaatgaagacaattaaaacgatcagttaagagttcatttaatccgatggtatcagttgcgactattggtaagctataagacatagcttccaacacactatatggacagccttcaaatagagaggggatgacgtacaaatcagcaattgaataaaatctcctaattatatctttatcaatgtgccctgtgaatataaccttggattcaatgtctttagctgataaaacaaatgttttatcctgtaaatcccctattataaaaagataggtattaggatggacatgtagaatctttctgaatgctgatattagtttatcaactcctttttggtaactaagacgacccgtgaaaattatgacagtgtcttctttggtgatattataatgctgcctgagcatcgtattattttcatgaatattgtcctctaatttaaggccattctcaatgacagaaattttagttttgggtacattatagtacttaaccaacgaattgaacaaatactgatttacaacaacgatatggttagaattaaaatatagatcttcttccatattaaaaatcgctattaagttttcgtaattattggatgaataaattttcttttttctgtctttccatattttatcaagagtggttaaattgccatttaaatagaggtccctactcgagaaatgtataacacttatcaatcgaaatgttaatttttgcctcaaaactttaatatattcataggctgccagataattaatatgaaaaaccaagttttctagtctagtaagtctatttaataaaaagtgcgaaataaattgtattgatttttgtttatttgcattggtattcccatccgttaggagatttataggcaaatagtaatgaaatgaaccgaattttgttagggacatttcgaattcctcaaaacttggtttaatataaattaagtgcagattaaactgattatggggggcatttttttcgatactatctatataacttccgattccataattgagtgcttcagtttcaggtagaatcattacgacattgggacggttagaaccaattttattgtcggtctcttttgtttgaattagacattttgacgaaagcaaataatgaccgagccctatcaatatttcaatatttttatttttaattgcttggtttgcctgatattcgattgtatttggatctattatgacattatcagttgttgatggaaattttccgtcaaacaaaatactatgggagtaaagattagcaaggacgtttaatttagtccccgggctgcaattgttaaacgcattttttaaagcagtacatatgaaactgagtttttctttagatatttgtagaatatctcgttgatacatcttctccaattgattgagtaagataagtgagtatgagagatattcgtgacaatgaagattcctttcgataatgtgtaaactatttatagcattggtaaggatgtcctcatatttgatattcaggcgatgaatatttaaaagacattcgttgattttaactagtattttcgcactttgatagcattctcccgaaattgagaataaatcgattttgccattaattttttctttaataagttcacacgtgtcgtcctgttgaacagatgttttagctttaaataagagatataaaagattatccacgagaaacgagttcgattgggagggatgatcgaatatcatctcgtcaatttcttcaaaagattcgtctatatcgtcaaattctatatttcctctctcatttaacgacagcaatcccactccgatgcccgtaattccagattcaaaatcatatagattgtttgtgcctaaagaagaataagtttcctcgactaatagatccgatagatcattcaggtattgatattctttcatttttcccgcttcatacaaaaagattgcaatccctagctttccattaagaccatctacattctcaaatgccccacatagggttagatagttgatgattctgtccaggggcgagtattcgaaatttatttctcccataatctaagtatcgtatctatatcgttgatcttgtataagattttgatctactcctgtccatttttaagtgattctcttaaaattgttgttgagataccttttgtatatgggattaataggaatttattgagagatttagctgtgccataataaaaatgtatcagctccggaggccagtttaatacatcatcaccatggataagataatcaaaaggagatataaaattgttgtcaaagatatctggcgcagtgataacatggtctacatagcggcatgataagagcacttccttccgacattcaaaatccataataggatatctctttttgtatgaaaaaatttgttcatcagtatgcaatgctattgttaaatgcacgtcatctggtttaaaatagttttttacattatgtaaaaaatttacatgacctctgtgaaataaatctgcagtcatgtcggctactactttgtaagtattcatgattattttttttaactaaaattagtagaatagagtcgttaataaatgaattgatttttatcattttgacctattgtgctttgcttgcgtccaataagtcttttttgtaccgcttaatactccagattatattaaatttttttaggtattcgcttattggaatgagtctggcttgtgcccttcgttcatccacatttattgggtcaatcataggtagcacgtaaaatttgccgttccccaattgtgcgatttgacttccataaatttgttcctttccttgttgaagggccaccctgtcctcgaaaattgcaaagcttgcagatgacatttttccttctttcatcgcatttctcattattggcaggtactcaatttgagtggccagatcgctatgctgtatgaccaaaaacaaggtttgattaccctgttgtcctacttcgttttttcctaaccaaccaaattcgctgataattttttttactttttctctatttattgaatctttttgatgcatgtagagattaatcgactgtatttgaggatcagattctcctttttgagcaataatcttctgcaataaatttctgggattttggtcatcatgataaattgtatccaagatcgccattaccggtttattaagttttttaaattgccatctgacatctttatcctgatttatgaaatttgatttaatgctgtcaacaatttttggccatctaacatctttattaaaaaggttaaatgcggtgtcctgaataatttcgtcaaattcggtaaacccagcttgagaaattttggtcaggtatagaaaggccgaatcaggtattccggctagcgaccaacagcgcgctgcttcataacgatcacgaactgtaccacgatttccattcgcggtaaatgccgtggaataaagattggcggcacttctatattctttttctaaataaaatttttcagctaatcttatattcttattataatccgctatattctgggccaaactgattgagtaaaagagagacatcagaatgaccaaaatggatgacaaaatcaaatttattttcatatattttattttcattaatcccaggtttctgtgtaaggattatagccacatttggcgggttttgagtagaggttattattagatgtataggccctgcaatctgtacatatatacctaaattcgcaatctttacaaatttcaatttggtctttattaattttccaataggaggtaaattgtgctgagtctatcacacttgacagggagtcattttctgtgtgtccatacgtgatattcaaggaaggacaattctttatgtaaccatattggtcgatcgatatttttctatttaaacagctgttataattcaatgattcagtaaatgattctatgtttatcgtgaagtattcttttgagatgactccacaatgggattcatcatttattttctgacttgttacaattacttttgcattgaattcttcttttacatcaaaataattttccctgggagccgaatggaaaacgagcatattaattcgaagattggaaaggactagctggtataactcggtattatttaagttgaatataaaaggtaggaacagttcaattgaaataattgatgttttttccaataattttaaaatatcagcaacctcagtcaattcagttggtcggaaaaatcgtatttggatagctttacaacccaaagcttcaatctctttaaataatttgacgaaattgtgttgaaaatttataccgacatcgataattgcgttagtcaaaagcgagggactgtgccaactgagatccaaatctggaaataaatcaagttcatgaggatcacaaaaaaatatatattccctactatgcaaaaaatcaaaatattccagcaggacctcttcattttcatcaccatagaatgataaaatatctttaataggagcatttgattgatctaataatatatcatataaatcatttgtaataaaatcataacttcccctttgaacgtcacaaattaatgatcttgatgcgccttttacggggatgcaattggcgtaggttttgaaatacttatcttttatagattcgtcaaacatttagagattggtttaaaatgggaaatgacattatattgcttagttttatatcgggcaacacaaacgaccttaattgagtgcataccattgttttctctatattccaaattcctaaaacctactggtaaagcgtttataagctcggaatcaacataatttttaagtttttcaagcttgctcatctgtcttatttttattcaatagaaattctgctataactttatctaagtggtaattacatgggtaagaagtcatgccaaattgaccgataggattaacttcaaaaaatacatattcctgatttggagtaacagccatgtcaatggatccagtatttaaatccaattttttcattaactttattagttttttctcaatatgctttggaagtttgaaaggaactgttctattaggttttataaaattatactttctaaaatctacacttgtctttttgtcattttgagaaaaaattgccattgtataaaaacggttttcaataaaaaagatccgcaattcatattttttttcgatcttttcttgaaagagcgtcagaggaaatgatgcatctaattgatccatattttcatctgttattatagatgtgtataaactaagtattccgatatctattttgtgtgctgtaaaagcctcagagattgatttacatattacctgtccgaattttaatctgaaagcttgtaattctcgcttttgatttgtgatcaaagtcttaggtattataatattaagattttgagcttcttctagtacaatcaatttattcaggctcgatttaaatatattgcctagatgacgctttgattttaactgatatgctatgaactcttttaattttcgctcctctaatgaaagatgttgagtaagttctgcgaagaatggaaaatcattcgaaaaaacctgattataagattgaattgaaaaattccctcttctatgccaaaaagattctattttatctagattaatctgttcatttccatatgcaaaagacattttattgcctttggatacttctattttattgagacagattttctccgtattggtcagcaagagggcttctcctttgtaaaaatgaatccaatctattacgttgaaagtagattggtcaccgtcagtggatacaattgcaattgacatttttcttcttatatttaaagattgtgtagcgcctttgctggcgctacactacaccgaaatttaagcgtaatccatctgataatcgttagttgtttcatcatcagtataatgatcttgcttattctctttaccatcgacaaacgtgatacctacgatcgtggttgaggaggttgttgaataaggacgaggatccgtaaatccaccagttacctgtttcatctcggattttgttagttcggtgaaactaagttttcttaattttttcatataaagactatttttagtttcgctaaaaatagtttacatatattaaatagttgtattggtaatgttatgtttctgttaagtcaaaatatttttatgatttgaaatatttttttagataattttataaatactgatattgagtatgcgcttttagattgttttattaaagcaggtaatattattaatagcaatattacgtcgaataatgtcgatcatgcacaacggtattcagataccggaaccaatccgccttataattccgggtcgcagttgatgaatatatagattttgatttagaacagcataaattcgagctaattgaaatccgaatcattacagctaaggtctcctatggtctttttgatggaataaatgagatccaatatgaaccatccttatcataacactttccaatttattctagcagcttctccgaaaagcgatggaattcctgacaactccaccgttggttaatgagctgaaaacccagtttaatttaaaactggcatctgatcgggttagtgggcgatcggcctattttcgttgttttacacatgagtgctttcatgatgaccgacttttcggtatctcgccactaccgcttagataccccttcttttcctcaaatagcggtaccagcccgcctacttttgctatacactttaaaagaaaagaaaatatggcaaatcaatttttaattaagaacatcatgcaagagatgaaagatctctctgcaaatgaggttgcatggttgcaaggaacatatccagtctattcgggagttaagctactgggctattacaaagaaggagataccccagagccgattatgtattacctctcttcaactgatcctggaccagaggatggcggcagcgtaattgcaactggaggaattaaattgatccataatttcgtcggtaacgtgaatgtgctatattttggcgctaaaggtgtcgaaacaggcggacagccaccacatcccgatgattatccttatttacaaaatgcgttaaactattgtgcaggcaaggggaaatgcatcagtcttccggggcggaaattctatacttcaaaaatactcagtgtaccctataatagcctaggaggggacattgttagcgaacaagggaataattcctctgttaaatcctgtatcgaattgatggcaagctctacggacctatataccataagaaactactcacagggaacgacatttaaagatgtggccattagggggcgatcggttaacatcgcaagttctgtggccgtactgttcaaaagagtcgatgagtacccaaactctggcgatccatggaaagatgatctggaaaataacattgatgcggtgatcgaaggctgtgactttggtaatgccgagacccatctggaattttggggacgtcaggtcaccgttaagcacaatacttttagcggtggtcataatggtgtggtatttaaacagttcaatacgttggggaaatatggtggcagcgccagagggtatcggatatggaacaatttcttccattcatttgatagtggcaatgccaatcgggaaaattttgcattgatcaataataagacgacagatggctatggatttgatatcgttggtaactttagcgacagttttaacacattctttatgggtaatctcgtcaatagtcttgtgaccggtaatcttgactatacacttttaggttattttattaaagcaggtaatattattaatagcaatattacgtcgattaatgtcgatcatgcacaacgttattcagataccggaaccaatccgccttacaattccaaaggtgctgttcatgccgacaggatagataaaacaatcattagtaacaacaatttcacgaccagttcaggggcttccatcttgtcagagggagtaacaaattccaagatccagggcaataactttaatcggtggggagtagcgactgtggcaccagttgcctgtattgtattagactcaagtgcgaataccggatctaaaagttatggcaatgaaatcgatgtaaatacgttttataactcactgaaagttggcgggtatttattggaatcagggaccttcgataccaataatttctgggggaatggcaatcgtatccgattggaatcacaggcgacgttgacagctttgttcaatacccctaattttaagttgtcccaatctgtaagttttaggcgcaatttaatcgctggggaaaatattggcgatgcaaatcaagatactttcagcattcctggtttatataatattacaaatgataccatagccgcaagtattaatggtcttccaattggtgcagcagttgccggtacattgaaagttgaggttgctaatctttatgcgacacgttattatatgccgtttaggtcatcaggtaacgagaatatttatattcagaaaatctccaataatattgcgggtgaatggttaacggtcataacatcaaaaaatgaagcgcaggtcgatgctgttggtgtagtgaaacagtctggagctatagccgatgttacttcgccgaatgcgacggacttacccacggctttgactttggccaatgaattaaaaaaacagtttaatttaaaactggcatctgatcggagtagtgggcaacaggcttagaataaaagaaatagaggccgcccctaagtcagttatgaagtggcctctattgctcttacttcgaatcctcaggtttgtgcttgcgtggttttctgatcaaatcgatattcccattttcctgttgtatgctttattgtctttgtgatattggacttatcggtgtaggtgatttcacaactggtacattccacttcgtagccgaattcatcgataggttcttctgctactggttcttgctttttgctgcaactattgagtgataagagtgcgacaaataataatagatactttgttaaacgttgcgttttaaatgaacgactaaacataacgaattagatttttaataatattggggcaaatctaatcgcaaattatcagcttattttacggattcccttaccttaatttcaataaatcatgataggactctcccgatattaatggtcccgttgaataaaaagaagaatcttttaaggataaaaatctggctaaaattattattttagtctatgcagccataaaaataatcagagaaggaaacagtagtgctgatggaaaataaaaatgccccgtagatagacgaggcgctaaatgttttcacaacggaataatccttattgtgaattgctttcaaatcaaagataaaaaataaaatgatttttataattacgggataccgtaaaaaacaaaaaatataagttttaatttcaactgataaaacaaaaaattatgagtaagactattctcgggcttgatctaggtaccaactcaataggctgggctttaataaaactagattttgaaaagaaagtaggtgagatacttggtatggggactcgtataattccaatgtcgcaagacatcctaggggaatttggaaaagggaattcaatatctcagacagcagaacgtacaggatatcgtggtgttaggcggctccgtgaacgttttctattacgaagagaaagattgcatcgtgtgttaaacttgttaggattcttacctccacattatgcctctcagatagactttacaacaaagctggggcaatttatcaatcattccgaaccccagatcagctacaacagtggttttgtttttgcagaatcctatgatgaaatgcttaacgatttcagggatagttttccagaatttttaaaagataaaaatggtcaagaacgctcgttacctcatgcttggacattatattatctacgaaagaaagcaattcgctataaaatttcaaaagaagaactagcatggatcttactgaattttaatcaaaaaagaggttattaccaattacgtggcgaagaggaggaagataacccaaataagttggtcgaatttcattcgctgcgagttgttgatgtcatagccgatcttcaaaaaaataataaaggcgaagtttggtattctctcgttcttgaaaatggctgggtatacagaagatcgagcaaaagcccattagacgaatggaaagataaagtcaaagactttattgtcactagggatattaacgatgatgggtcagagaaattggatcgcgatggggaagttaaaagaagttttagagcgcccggacctgatgactggaccttacttaagaaaaaaacggaatcagagatagataaatcgcaatgtactgtaggtgaatttatttatgataatctattgcgtgatccgaaacaaaagataaaggggaaattggtacgtactatagaacgtaaattttataagaccgaactaatacaaatattaaacaaacaggccgaatttcattctgaatttaatgatcaagatatattggtggactgtgttagggaattgtataaacataatgaacaacatcggaaagaattaagtagtaaagatttagcaaacctattggtaaatgatattatcttttatcaaaggccactccgtagtcaaaagtcgggtatcggaagatgtagtttagagtataaagtatataaagcaaaggataagtatggtgaattgctgaaagatgcagacgataatttcattgaaaagagagcctatattcaagttatagcaaaatccaatccttattatcaggaatttaggttactgcaatggatcggtaatctcgaattttacctgaaagacaatgacgagcaggttacagctcttttaattccagatatagaaacccgtcagcaactgtttgattacttggttgaaagaaaggatattaaacaggaaatactaattaaatttctattaggcaagaagggcttgaagggaagagagttgactaatgaaagtgctaagttccggtggaattatgtagaagataaaacatatccatgttacgaaaccagagcacttgttaatagtcgtttggataaagtgacgaatgtgcctatcgattttctaaccgctgaaaaagagtacgctctatggcatatcttatattctgtaaatgataagatcgaatttgagaaagctttaacttcatttgctgaaaagaaccaattaaatagacaagaattcgttgaagcattcaagaaatttccacctataaaaagtgattatgggagtttttcagagcgcgcaataaaaaaaatattgcctttaatgcgatttggttcgtattggaattgggatacgattgatcatgatacaaaaattagaatagccaaagtaataactggagaatatgatgatacgataaaagagcgtgtcagagaaaaggctcaacatctggttgttgaaaaggattttcagatgttaccattgtggctggctcaatatatagtatatgaccgtcatgctgaagtaaaggacttgactaaatggacttcagttgatgatcttgcacaatttctaaatgattttaaacaacattcacttcgtaatccaatagtcgaacaaattgtcacagagactcttcgtgtcgtaaaagacatttggaataaatatggtacagggcgtcaggactatttttccgaaattcatatcgagttaggacgcgagatgaaaaatcctgcggatgagaggaagcggatgaccaatattgttacagaaaatgaaaatacaaattcacgcatcaaatcgctattagcggaactggcatcagaccatggagtggagaatgtgcgcccatattctcctatgcaacaggaaatcttgaaaatttatgaggaaggagcgctaaattcaggggtagacgttgatgacgatatcttaaagataagtaaaactgcgcaaccgtccaactcagatctcaagcgctataagttgtggttagagcaaaaatattgctccccgtatacaggtcagccgattccgcttaataaactgttcactcccgattatgaaattgaacacattataccacagagtttatatttcgatgatagtatgagcaataaagtaatatgtgaagcagctgtcaataaattaaaggacaataggataggcctttcatttatcaaaacacatcatggtcaggtagttgattgcggatttggacggcgcgttaaaatctttgaagttgaagactacgaaaagtttatccagacttgttactcaaaaaatagggggaaaagaaacaagcttttgttagaagacatccccgaaaaaatgattgagcgtcaattgaatgatacacgttatatcagcaagtatgtcacaggccttttatctaatatcgttcgtgataatagtattacggggaatgatgatggtatcaattctaaaaatgtattgccagggaatggtaaggtgacttcaatacttaaacaggactggggcttgaatgacgtttggaatgatctgattttacctcgatttgagcgaatgaacgctataacaaattctacttcatttactacatggaatgacaatcatcaaaaatttctgcctacagttcctatcgagctttccaaaggattttcaaaaaagcgtatcgaccaccgacaccacgcaatggacgcgcttgtaatagcctgtgctactagagatcatattaatttactgaataacgaatcagcgagaagtaccacaaagcgccatgatctgagccgaaaattacgtcactatgagaaagttgtctatactgatcctaagactgggcaacggatatcacgagaagtgccaaaagattttattaagccttgggataagtttaccgtagaagcgcatgtaaggttgctaagtattattataagttttaaacaaaataatcgggttattaataaggcaacaaattactatgaaagttattatgatgaggatggcaacttacgtttggataaaaatggaaagccagttaaaggcataaatgctcaaaaaggtattaattgggctattcggaaatcgctgcataaagaaacggtgtccggaaaagtcaatctgccgagagtaaaattggcgaagggaaagattctgacagcgacaaggaagactttggatccttctttcgatgcgaagtctattttattaataacggatacaggaattcagaagattcttattaattatttaaatgctaaaaataataagcctgaaattgctttttcgcctgagggaattgaagagatgaaccaaaatatttctctttacaatgacggaaagaatcatcaaccgattaagaaagtaagagtttttgagcaaggtagtaagtttgctcttggagagattggagttaaatccaccaaatatgtggaagcagccaagggcacaaacctattttttggtatatatgtggatgacaatggtaagcgtagttatgatactattcctttaaatattgtaattgagcggcagaaacaaggtttgacctccgtacccgaaactaatgaaaaagggcataggcttttattttctttgtctcctaatgattcggtcactatttatactagtgaaaatgtacgtagtgaaaatatctgttcagctgaacagatttataaattagtgagttttagtggcgcccaagccttttttattaaacaaacggtttcagcttcgatcgtaaataaaggtgagttttcaactctaaataaaatggaacgttcaatagaaggattgatgatcaaagatgtatgtgaaaaagcctgtttagatcggttaggaaatattttgaaaatagaacgatgattaaacgtactttgatattttcaaatccagcttatatttcacataaggataggcagctgacaattacttttcccaatagagaaagggaaggagtgacgattccaattgaggacattggagtgatggttttagagaatcatcagattactatttctcatggatgcatagctgcgttattggagaataacgtagctatcatatcctgtgaccaatcacatatgccgacagggttaatcttaccattggatggtgggagtacacaaacggagcgttttcgttatcagattgaagcatcgatgcctttgaaaaaacaattgtggatgcaaaccattcaacaaaagatttataatcaggccagagtgttggaagaaataggtgtggacgttgataatatgaaaagatggtctagatctgtaagatcaggcgaccctgataattttgagggtagggcagcagtttattattgggcgaatattttttatggatttactgagtttaatcgtggtcggagcggtcagccacctaataatctattgaattatggttacgctattttaagggcaatagttgccagggcactggtttcttctggattattgcccacactcggtattttccatcgaaataaatataatgcatattgtttagcagatgacattatggagccctatagaccctatgttgatcaggttgtttataatatagtaatagatcgaggagttgaggaaattgaagaactaactacggatataaaaaaagaactattacagatacctgtattagatgtgaaatttgaagataataccagtcccttattggttggtgtttcgcgcacaaccgcttcattggcgcgttgttttgagggagtaagtcgaaagattgtataccctgaaatttaaaatatcgttggatcgtttaaatcaatatcgaattttgtggattcttgttttttttgatttacctacggagaccaaaaaagaccgtaaagaacatgctcgatttcgcaagcaaattatgcagaatggctttactatgtttcaattttcgatatacattcggcattgtaatagtcgagagaatgctgatgttcacttaaaacgggtaaggaagcttctccctgaaaaaggaaaaattggtattttgacaataactgataagcaatttggtgaaattgaacttttctctgggctggagattgcaatgcgacctgatacccctcaacagttggaattattttgaaaattagaaatatcaaaaatgatgaaataaaaaaatccagaagtacatttctggatttttttattttctaataattgatttaacgacttgattattagttttttgaatgatggtacgctgttgtaaatatcgttatatcaaagaatgaaagcaattcccaaccggtatggaaagagtatatacaaaagcaacgctgttgtaaatatcgttatatcaaagaatgaaagcaattcccaacgacagtgatagtactgttagaagaaaagtagctgttgtaaatatcgttatatcaaagaatgaaagcaattcccaacacataccagttctttatcttcggtcttgtgctgttgtaaatatcgttatatcaaagaatgaaagcaattcccaactcctgaatctgtttagataagtctatcgtcgctgttgtaaatatcgttatatcaaagaatgaaagcaattcccaacagtgatacagtcaacggtgatgacgctgttgctgttgtaaatatcgttatatcaaagaatgaaagcaattcccaacgttgtatggcaagaccaaagaagaagattggctgttgtaaatatcgttatatcaaagaatgaaagcaattcccaacgatgaagtaccatggcatgaactacgagaagctgttgtaaatatcgttatatcaaagaatgaaagcaattcccaacgggtaaacaagtaaggctaagtgtagatgggctgttgtaaatatcgttatatcaaagaatgaaagcaattcccaacggtatgaaaacagcacaaaaaacactaagagctgttgtaaatatcgttatatcaaagaatgaaagcaattcccaacactcccaatgaaagaggaatcaacaattgagctgttgtaaatatcgttatatcaaagaatgaaagcaattcccaacaacggaggtaagtcgttataatcggaagttgctgttgtaaatatcgttatatcaaagaatgaaagcaattcccaacaattacaaatatttttgaaaaataatttagctgttgtaaatatcgttatatcaaagaatgaaagcaattcccaacggactggattctctacagtcactaaaaaaagctgttgtaaatatcgttatatcaaagaatgaaagcaattcccaacgctatctcacaatagccgcctgtcttctcagctgttgtaaatatcgttatatcaaagaatgaaagcaattcccaacaagtgaaccccgaccgccccaattactgagctgttgtaaatatcgttatatcaaagaatgaaagcaattcccaacagttaagtatgatgatgtatttggatataagctgttgtaaatatcgttatatcaaagaatgaaagcaattcccaacacataacataaaacacttaaatatcaactagctgttgtaaatatcgttatatcaaagaatgaaagcaattcccaactggcgatccactttggcatcttattgaagtgctgttgtaaatatcgttatatcaaagaatgaaagcaattcccaacaattgacaccacaggaacatatttagcagggctgttgtaaatatcgttatatcaaagaatgaaagcaattcccaacataggttgttgtgttgtaaagcgtggtaaggctgttgtaaatatcgttatatcaaagaatgaaagcaattcccaactatatagtgtttccgttgaagccgaaaaagctgttgtaaatatcgttatatcaaagaatgaaagcaattcccaactctatcatcaaaatagccgatacgccattggctgttgtaaatatcgttatatcaaagaatgaaagcaattcccaaccagtcttggcttacagtgtacacggggtgtgctgttgtaaatatcgttatatcaaagaatgaaagcaattcccaacatttaatcccatggtaattttttcttttcggctgttgtaaatatcgttatatcaaagaatgaaagcaattcccaacgaaaatacgcgataagcgtgttgtaaattggctgttgtaaatatcgttatatcaaagaatgaaagcaattcccaacgatatgatgatgtggctgtttctggtagatgctgttgtaaatatcgttatatcaaagaatgaaagcaattcccaacatatgaagctactgctcaagataaaatagagctgttgtaaatatcgttatatcaaagaatgaaagcaattcccaacaaggacatgtttgcaatacatttttttgctgctgttgtaaatatcgttatatcaaagaatgaaagcaattcccaacaggcactttaaattaagtgcctttgttttagctgttgtaaatatcgttatatcaaagaatgaaagcaattcccaactacgcgcgttgctaagatggccgcgtctgggctgttgtaaatatcgttatatcaaagaatgaaagcaattcccaactaaaactgttaacggtttttcaaagatgtcgctgttgtaaatatcgttatatcaaagaatgaaagcaattcccaacattgctataagacgcttaaatcaagagaatgctgttgtaaatatcgttatatcaaagaatgaaagcaatttccaacctattcctctagtgtgatctctccccaaatttaagactattctgctttcgataaagatttgaggtgtcaaatatcctaaacagctgtagaggcgaaggtattgtattcctccctccgagagtttgtggtaagttttcgttaggactgtatgttatttaatatcagtaaatcggtatatcagtaacgtggcgtatgcatccataaagtgaataaactttccgtatatcttaattttctttcaacctcttcacctcttccgctaaatcagcaaccacttttgtcaaatccaaaatcgcctgagttttaacagagtcgtcttgaacgagtttttccaagagcgaagttaatttcgaagtttcattgaatattggttggtgattttgatgcgcgatggcatgatctttaaaatcatgattatgttggatgttatatattgcattatcatcattaaaatttttgatgaattcaacagtaacacctaaagctacagctaactcttcaagagtgggttcttcaataacgatttgactttcaatttctgatattttctgttgagaaaaattgcttggacacattttacccaatgcctcttgcttaattccttgcatcctacgaagctttgctatgacttcaccttgtttaatttttctttcatcttgaaatacaacactcataattaacttgattaaataagtccgtaacatacgggtaagttacccgtttgttaccaaaatctaatttggtacctttgacctaaaggtacgattatttgtcgataaaatcagtcttaagaacatttaaagccacttttaaagcaaataatttgtctttggtatattaaaacaatacatttgcaccatcttaataggtggtagcacttatgagtcttgtctacgaaacctgagaaatttcaaatggaacaaggcgataagtggatcaaaacgcccgtcggtaatggcgcggcgtccgcttactcgttccataggcttctcagggccgcgtagacagtaggttggatgccgcgccattgttggtttctacacttgccacaagactcgttgcaataaacaaacgagttatgaacaaaaaacaaattactaaaaacaaaatcaggccagcggagtagctctgcaagcaaagtcatatgatgacttcctctaatcttgaagagcgtagcgacccaattatttacctagaaaatctcaataaaacgctcttaggttgcaattatcaattattttttatttgtgacctaagctaggcttaggagcaaaagcgatgcgtttgtaagtatcaaagaggattctaatccaagcaggtcacagcccattaacacctttaaaaatgactcatttttacaagggtggaagtgaactgcctattggtacgcaatgctcctgcccacaactaactaaatcgaactgcttaaagttgacaatccttttctggggtattgtaatgtcttctatgtttagtttatcagctcaaacgccccgcaaggacagcggggccgatgggctaaataatcttatactacaaggtactgtggtttcagctacaaatggtaagtctttgcagggagtatctatacgtgtcgatgctcaaaaacagcgaacaacatccaaggaggatggtagttttacacttccggtcaaacatagaaacggattaataaaatttacttacataggctataggccctttgaggtcgaatactccacggaagtatcattaacaataaaaatgataccgctagagaatcaattggaagaggtggaggtcgtctccacaggctaccaaaagattcctaaagaaagggcaacaggcagctttgaattcgttgacaataaacttctcaatcgtaaagtatccaccgattttgtgagcaggctggaggatgtggtgcccgggctttccagtgcaaagatgtcacctgacctgagagggaattatttgaatatcaatgtcaggggcgagagtaccttgtcgccagataagttccccttgttggtcatcgatggtatcccctatgaaagtaagttcgccgcctatggcttagcaaattttaataatatcaatcccaatgatatcgaaaatgtcacggttttaaaggatgccgccgctgcatccatctggggtgcccgtgctggaaatggtgttattgtaattactactaaaaaaggcaagttcaatgaaaagaccaatattgattttaatatgaacgtcagcataaaagacaagcctgatctctattattacccccagataggaacttccgactatattgatctgatcggcgacctgtttaaccggggccggtacaatgctacgcttggatactggggtaataatgtggagcctatcgtacagcgtatgaaagaccacaaagacggcgaaatctccgaagaacagctaaaggctgaactggatcaattaaggggctacgatatgagggacgattttcgcaaatatatctatcggaaggcagtcaaccagcaatatagtgtacggattaatgcaggtggtgacaaagtcaatgcctcaataggggtaggatacgataagaatctgaatgagctggtgacctcaagctataatcggatgaatctgcagggcaacatgcagtttagacctattcaaaatctgttgatcaatctcgggcttacctattctgaatcaaagaagaatgatagcttttatggggtcgggtacaatgcattgggcaatggtatagccaatgctccctatatgcggcttgcggacgataatggaaatcctttggaagtatacattccggcattcaatcctacctttcaggacaccgtcgccgggggcaggttacttgactggagctataaacccctgaaagaactgtatgattctagatcagaacagatcaacagagaaataatgtccaatctttccgtgcaatatgcatttccatttggactcagtattcaggggttatatgccttacagcgaaatataaatcccattgtcgagtggaagggaataaatacgtttcagcagcgtttcgaaatcaacaatttcgttacctgggatgataagcaggtgtattggaatatgcctgtcggagattaccgctatgaactgaatgcgtcaagtttttcccatcagggaaggttgactgccgactttaacaggtcttggggcaaagggcatcaagtatctctgttggcaggttttgatatccgtgaggtggggcaggatatgcgtgcctcccaatattttggctttgatcctgaggacgggacatttcagcctatgcagttgggacgtgaaatacagatgatgaacgggctgctcggtgtgaacaacctgcccgaccggaatgtctttgatcagcttcgaaatcgctttgtctcctattacggaaacggttcgtatagctacctgaaaagatatattctgagcggcagtttccgcaaggatgcatccaatctgtttggggtgaaaagcaataataaggggcagccattctggtcgctgggtctagcttgggtggttacggaagaggaatttttgaaagatagtccattctcactgctaaaactgcgctccacatttgggtacaacggcaatgtgaataacaccatttcggcctatccggtcatgaaggtggagaccattccgaatggggccaccggacaaaattatgcacagatcaatgtaccaccaaatcccaaattgcgatgggaacgtgtaggtattctcaatctgggaatggactttggcttaaagggcaacaggttgaacggaagtgtacagtattatcataaaacaccaaaagatctgatcgcagacggtcaggtagatccgaccgttgggtttgcatcactcatgatgaatgtagcaaatctagatacaaaaggctgggatatctcgcttaatggaaagccttttgtaactgggaactgggaatggaacagcaatttggtatttgcctataaccgtacaaaggttgtcaaagcatttctgtcaaatgacaatgcgcaatacaatgtgagcaaggcgctttcttttcaaaagacagctattgaaggaatggacctctatagtctcttaacgtatagatgggcagggctggatcctgaagatggtgctgtcagggcttacttaaatggagaagtgtcgaaagattacatcgctatattaaatgccaaggtgtctagtttacaaaatcatggctcacagatgccgttatattttgggtcgttcagaaatagcatccgctttaaaaatgtggagctttcgtggaatatttcgtatcagctgggacacaaatttattcgtactacttttaataattattcctttttaaatgttggtgccggccatactgactatgcccatcgttggcaaaatccgggcgatgaacagcatacggatgtccctgcttttatctatccaagtaattctgcggcaagcaatatttatgtgagctcctctgcattggtggagaatgccggacagattaaactgcgtgatatccagtgtagcctgcagctgccccaattggccagatatggttttaaaaatatgagaatttatagctacatacagcatgtggcgacgctatggcggggtaacaaaaaagggatagatcctgaatatggtaagtggatccctgatccgatgatgatctcctttggtcttaattttaatctttaaaccgttatgatgatgaatagaatttttattttgatcctagcagtactggctatcacagttctttcctgcaataaatacctggatttaaaacctgatattaaaatggccatacccaatacactggaggacgccaatctattactgaatgattataccaatctgaatggtggctatcccatatggggcgaaattggaactgacgactattacctcactaaagagcgctgggaatcagcttccaatgtcgaacagcgaaatgcctatctgtgggctgatgagccttatctggatatcgtgcaatggcaacgcccttacaagacggtgtatattgccaatcaggtgttggatgttctttctaaactcaatcccgcagaaaataccaaagaatataagcgcctgacaggtggtgcttttttctatcgggcattcgccatacagcaactggcggcggttcattgtcctacttatgttcagtcgcgagcagcaaatgagcaggggcttcccctgcgatctagcccaaatctggatgaggtgtcccaaaggtcatccctacaggagacttatgcccagattatcgctgatttcacgagggctgctgccaaccttcctgaagttgaagcagtaaaggggcgcccctcgaaagcagccgcctatgctgcgcttgcaagagtgaatcttgatatgggagatttcgccggagcttatctatttgcagattcctgtcttaggttgagtccggacctattggattacaactccctcaaaatcacagatgcattgccgattccgcgatttaatatagaagtgctgttccccgctttaagtgtaaacctagggatcctcggtgcgacaaatgcattgatcgatacgtcattgtatcagtcgtatgatgcgaatgatttgcgaaaatcaatatttttcagaagcaatgccaacccatcaggatccttttattttaagggaagctacgataagaatgctgctacaatgtttgtggggattacgacaagtgagatttacctggttaaagcggaggcggcatgtcggatagggaaggtaagtgaggcgttgtctgcattaaatacattattgaagatgcgatggaataaaaatgtgcccgtcgaaatcaaagaatcggatccagataagttgctgaaaataattttggaggagcgaaggcgtgaactggttttccggggacggagatgggcggatctgaaaagattgaatctggatccccgatttcaaaagacactggaacggagaattggaaatgaggtatacaaacttaatccaaatagcacacagtatgcttttagactagcggagccggtgatcatcatcggtggattagatcaaaataaacgataattaacatgaaaacaacgaacaaaaatattttagtatttatactgttattatgctgtgtttccctcggcgcacagccaaacttcaaaccagatttggcgaaaagtttaa

SEQ ID NO: 1197 - DNA, 24395 bp, synthetic construct
  source 1..24395: mol_type = other DNA
  misc_feature 1..24395: note = Synthetic
actttatggaaagaaatatcccgaatcgggaaggtcctgttcatgaaattaattctaagaagcagaacatttattttgtaaaatcaggagaaacactggaaagtatttcagagagtttaaaccttgaaaacccaacatatcttcgggactatcataacgaaagatgccagccttttgatatcattcctgaagaagggacattaaggctccttcagaaaatctatattcctgattcggaagagattatacagatcaatgcattgataaaacaacggggagaaagcctttatcacaagttttccgaaggtaaaatccctttcgatatagagaaacttcaaggcaattatcaggtaaagcagtccgaaagtgatgatgaagctaaaaaaagcgagtatgcctataccctgaactttagctttatcaaagaaaaagaagagaggtattatatcgatttttcaatgagtgattttaaaaaagatggtcaggagccggaagaaaaaattaatacgctggcttctgcttttgtgagagttatttatccgattacattcgtggtggatcatgcaggaaaccttaccgatgttcaaactcataaagatattggtcaaatcattgatgaaattgaagaattaaagaaatatcactccggttcctatgctgcttcacatattgatcaaatgaagcataagatagctgatccacaggtgatgtttgaaagcctgaagaatatattggctatacagtttctcttagggcagttttatcaggctgtttatatgagaaatatttcggttccttacaacagtgaattttcatggctggctccggcttctcctatcagaatggaaatggttaatcaggtcttatcacagtatgaatctggatttttagagatattacaggtcggtaagtcaagagattatcgtactgttcaggagctgtattatactgatcaggaatatgatccgcttgcaaaactttattccaaatcattaacagcagagcattttgccatctatagtttgaattccgaggatttttcgatccggaaaataaaagctgattttaaaatccagattgcagattatgagaagaccatcacctttgagctggagaaaataacagaataatgaatcattgaatcaccaaaaacacaaatagatgtcagaaaacttatcagaacatgacgggaaacattttgtcattcagaagggcaaagctcaatgtaatcagggcgatcagtttccgcaatttaaagtaaactcccatcagaaacattactggaatagcaggaaaacaccagaagatcatcttgccgtaacagaagatgatatacagttcaatcctgcaggaccaagctttgggaaatgtaaattaaagcccacttcaaacggttatttgccttgtgcatttgctcctgccggaaaatggcagaaaacatatcctaatgtaaaagtaatggatagaagctgtctttcggagatctctgaactgatgtgtagtacaggaaggaaaattacagtaaaagaacatgggcagacttctacaatcaacagacagagcattaccatggctgatacccaaagctatcatatgattaatccgttccttgatctgaaagaatcgcaggaagagttggaagaaccggatccgatttatgaataatgagtttaaaaactgatacaaatggcaaaattgataattacagggaatataaaacctattgttggaaatacagaaatgtattcactttctgcatttgataatctgatgacttccaatgctttgttatctctttctcctaaaatccaatggaatcttcacgtacaggataaaaaaggctggcggatagctactggaaatacaaaggaaggcgaacatatcacgtataaatttacccataaaagtcttcagtataagtctttaaaaattgtggtaaccagagggaaagacaaaggagagttttatataaagccacaggaagcagaagagtccaaaataacccgtgtggatatactggatattaatggacaacgattaccgaagggaaagcggctgcattatactgaaactttaattgtaaaggcgcattgtgtaggaatgttcgggcagaaagtttcttttactctttgggaagatgatgcgataggaaagggacacgatccggtgatcaatatgatgaatagaattaatcctatgcctttgatcggagaagtggatcatcaaggtattgctcgggttgttttcaggcttccaagttatacaatggcagttcagattgccaatgccgggctggcaaaaggtgaccggagcgaagacaatactcatgaatattatgtgactgcagaattggtttccaaacatattctggtagcaagccctaatgtaaacgtcgtgaatcctacccatcttcctgatcccgtcaaaaaaccgaaatcagatgaggttaaatctacctctgcaaaacctccggttaattcgccccataaagaaaagataaataagcccaaacctaaagaagaaaccgcaaagtttccccaaagtccggctgctaagaaacaggcagatcctgaagggaaaatcttaagtgctgagtttacggacggaactggaaagactttgaaaaatgctaaaacaggtgatgttgtatcaattaaaatggtcactcagaatatgaaagagaagaatgtaatagtgagaatctgggaagaagatttttcccgatatagtaatgatcttctctacgaaaaaacagtgactttacgatatcatacctgcaatgtgatcaataatgtaaagctgacccgtcaaatgtatacgaaaagcaacgaatggggcgaaggcagcgaacgagagtattttatagaagttgaacaccttaatacctccgtaacctctcaggtgattccggtaagtgtagatggtgaaaaggcggaagtggatgagaatgattctgttgcggtgattaaggaaataaaggaagagaaaaaagaaagtaaggtctgtgaatgtgaggctagggtgagggcttatatgagaatgcttagagtaggagaagcaacaggagaattaattaagtcctcaaaatataataaagagacaaggaaaagcgaaattatatatatatcgcatgattttcaaaaaggctatataactgcatttggagggaataaaataacagacctaagtacacatccacaaaaaaaatatggaggttcgtcagctgcaggagcttatcaaataatgagatatagctggtggtggttaaatggagaaaaactaaataaaaacaaatcaaaagcgggcatttatgaaagccatcatgattatataaaaaaatataaaatttctgattatttccctgaatctcaagataaagtttgtgttataataatgaagcataagcaaaaaggattattagaattaatcattagtaataatatagaaaaagcaattagaaatcaagggagtgcggaatgggctagtttaccttatgatggtgatacaagcaggtatgaatatgaaggaaaacagcaacctgcaacaccttttaaaacctgtatggaacattatgagaaatttttaaaagatgaattaaaaggtataagtcctttgcatttaaaaaaaggatttttaaaagagtttggttatgagtgttgtgctgagtctttaaaaaaagaatcaacttcggaaggcaatgggaaatggagaaatcctattgataatcctatgctttgcctttactcgcaaggtggagggtttaagccttggcatggctcctttggagaaaaaattagagataatactactaaacataccggaaatgacttgctagctattccgggtactaaagtatatgcttgtttaaaaagtgttgtacataaaatatatacctctggatccatggcaggaaacgttgttgttttaaaagtactggatacggaaacatttaaaagcataaaacggaaagattatgttcctaagtataaatcgaaaagtgaaatattagaaaaaggatttaatgaaaacggtacaatatatcttacattctggcatttaagtaagaatgatttttttaaagaaggagatgaggtcgaatataatgatgttattggtttaacaggaatatcaggttggaaaggaaaaaactttaccaccagaaaccctcatctgcattttgaaatatctaatattggttcagcaaaaggtctggatgggaaatgtaatccatctgtttatttcaaattcaaaactgaagatgagctatctcagtctgaaataaattttcaaaacaaattaaaagacaaagaatggaaataaagagaattaataaaattattctactactggtagtactattcttttatggttgtaaagagcaaaatgaaaatcaaaatccggctcctgtaatacaagacactcaaacaaaaaaatcacattttgagctgcaaaaaaaagtgtctaataatggcaatgtttttcaatatgcggacatgatatttgagataaaatcaaaagaagaattatatgatatattaataaataatgatgaattttttacggagataattttagatagtccggatttaaatatctggtattataaatacaatgaagataggattattttattggaaggtaatgattattatggctcttctttttatgcatatcatctgatcaataataaccttttttatcttggtgattttacaatacagcaacttaacattgagaatgaaaaaccgtataaaaaggagtttgaaataaatattgaaaaagataaagtaattatacaggcattattaaatggcaaaccatcaataaaaaatgcgtataaggatcacgtaaaccaaataagaaaaaaagacctttcaataaatccacaaatagtgggaaacttggctgttaaatggctaggaaaatatcatacaaccctgactaatgataagaaaagtacagatagtagagatacagatactgtggagttaattattaaaaaagattctgtagtttttcatgttgacagatattggggagaatataattatctacttcgggcgtcagaagtagaaaacggcattaaactgacttttgataaagtactggatggggatgtaactgatgtattacaaaagactaacgattttggaagattgttctttgatgggaagaattactattggcaatgtccttaccttgatatgtattacaataataataacaaaaaatatgtacttaataaaatgaagtaattgttaaaaattaggaactatacgaatcgggaaatgaaaaagacctaatttcaacactcatcatcctttgttatcaccaatctttatactgaacaattaaaatgaaaaataaagtaaagagactatcatatattatcttcttgatgtacatggtaagttcctgtcagtcaaaagaacagaaaccattaaataaaagtaatatatcatatgaatccaataatcatgagcctaatctatttattagtgaaaaaagattagaagttattgaaaaaagatctgataaacccaaaccaaagtcatgcacattagataatctttctgctcaatatagttttatatggaaagcaacagcatattccaatgaaaacgatcaggaataccctacatcagcattgatcattataaaaaataagcaaaatggtaaagagcaggagatttattttgaacctaattcatggacatcttataaagatttgacttgtaatgaattggttgtgaaagattttaattttgatggacttgaagatattgcaatagtatgggaagggcggaaatgcaggaaaaatatatgagtattattttcaggataaaaatggtgctttttcaccagtggagtcttttcctttacaacatgggatgcttgctgaagaatttgatgcagcccataaaacgattacaactcgaagtattgtaggatgttgccatgcaaatatcaatacctataagcttaaccctaatggaagctgggaatctctttcagaacaaaaagaaataaaacagaataaatgataaaatatctatggatactggtcactttgggaatgttttcttgtataaaagatagaacagtaaaaaataagagttcaaaggattctgtaccattaatgggtagaaatattagtaatgttgagatcgaaaataatgattcattgagtgaaaatgaattggaaggagaagaagaatttatatcagaaaaattgtttcaaaaatggaaaggagagtatcgttactttttccaatatatagatcataatgggatatcatcagatttgaaagctaatattaatttaataaaatcagatagctgtgtttttgaaagttggtttgaagatccaaatgatgaacagcataataaaaatgggtacttaaaaatgcttggacatatatatgtttcagatgataaaaatcttaagattatttttttagaaaataccatattaaacggtggatctcctaatttggatccggtttttacattgataaataaaaagaaccagttttatattgaaagttttttgacctctcctcctcacaacggaatcatcgaaatgccaatacagaaaacaaaataggataattctaaaactttaatctgttcaaaatacaaaagagctgtcacaatgacagctctttatttatgggttaaacataaagcttcaaatcagggaactttatgattgacgggtcgtattctgaggtgagttctccaaagccatatttacaaaaaataaaaggcagcccgttggaggtggcagaatcataatcggtttgtgtatcaccgatgtagacggagttttctatagataaatgatttctatccatgagaagctttatattctctgctttaggcttttgcgttcgtccgtgagattcaaaatccgtaaagagcctattgaactggtaatattctaaaaacgattcaatatatccatcctggcaattgctgacaataaagaggttgtgtgtattacttaaactttttaaagtatcttcaacaccatcgtacaaaataccgccctgcacacgcagtactttattctcctgagaaacaatctctgaaagaatatcctgaacctcgctgtctgaagttcccgggataatgtcctttacaatatcttttgctagcagacccatatattgatccatatcctcaggttttaattccctgttgatcagttggcgtcgggttaaaacttcattccatattccgataatcgttgctctggggtcccataaagtaccatccagatcgaatattaaatttttatatttcaaagtgtattttttttaacgtgttaatttttataagtaagttggttttcagcgaagctcatctcactattcttaaaatcttaaaactccttaatgttttaaattaaggtgggtacatacaataattttacatcattgtcattgactacatcgaatcttcgatttctgacgaaggaagaatctaagccagattatgagattcttccttcgtcagaatgacaggttcataataataaaataactgcattagtgcagaattgtatgtaattacctaaattaaaaatgtttatatctacaaaatcatactcagctgcactctttttctagcctcatccacttccgttaccttcactcttacatgttgatgaagtttcaccacctcatttacatccgatacaaaaccatccttcagctgcgaaatatgaactaaaccactttctttgattccgaggtctacaaagcatccgaaagccgttatattattaacaattcctggtaagatcatacctgcttttaaatccttaatgctttttacattaggatcaaactcaaatactttagctgcttttcttggatctaagcccggtttttcaagctcttttaaaatatctttgattcctaaaattcctatttcttctgtaatatagctttcaggttgtaccaaagcaattttatccttattggcaatcagttcattggttttaatgcctaaatctttagccattttctctacaattccatatgcctcagggtgaacggcagaattatccaacggattttttgaattggcaattttcacaaatgccgctgcctgctgaaatgctttttcgccaagccttggtacctttttaagctgttttctgtcttcaaaagctccgttttcagcgcggtaattcacaatattttcagccattttctcaccgattccggaaacatagctaagcagagatttacttgccgtattaagattgattcctacagagtttacacatttcattaccgtagaatccagttcatttttcaattgagtctgatccacatcatgctggtattgtcccacaccaatagatttagggtcaatttttaccagttcagccaacggatcagaaagtcttcttccgatagaaaccgcaccacgtaccgttacatcataggttggaaattcatcccttgcaattttactggctgaataaacagatgcgcccgcttcagaaaccacaaacacctgtaaaggtttatcaaaagctattttcttgatgaaaaattccgtttcacggcttgctgttccgtttccgatagagatcgcttcaatattataagcatttaccatggaacggatttttttcattgccattccgctttcattctggggagcgtgagggtagagggtctcattatgaaggagatcacctttttcatccaggcagactaccttgcagccacttctgtaaccgggatcaattgccagaatccttttttcacctaaaggaggagccaaaagtagttgactcagattctcagagaagatctcaatcgcttttttatcagccttttcttttgcctcctgtaaagcctcattggaaatggcaggttctaaaagtcttttataactgtcctttatcgctaaagcgatctgatcagaactttcattatcagatttaataatcgctttttcaataaaatcaatagcctcttctttatcaattcccacatttacttttacaaagccttccgcctctgctcttaacatggcaagaagcctgtgagaaggagttctgctgaggttttcttcccattcaaagtactgggagaacttctgtgcatcttcctcatcttttttagctttaacaacctttgaagtgatccctgctttacgttggtacagtcttcgtagatttttacggacatacatattctcattgatccattccgccatgatatcccttgctccctgaagtgcttcctcttccgatggaacgtcattgttcaggtattttgaagcaagaaaatgaacctcattgtttttctggctcatgatgatcttagcgagaggttccagtcctttttccttagccgtatcagccttggtttttctgcgctttttgaagggtaaatataaatcttccagctcctgaatatcaaagctttcttcaattctttgctggagttccggtgttaaagcattttgctcttctatagattttaaaatagattcttttcgctttacaatctcttcaaactgtttactgatctttgagatttgctcgatctgcgtttcatcaagatttcctgttttatcttttcggtaacgggaaataaaaggaatagtacagtcttcggctaataattgtaacgtattgttgatgctcttctcagaaatattgagctgcttctgtataaattctacggtcgtcattgttctgtttttcggatagctaaaatagggttttgaagtgagaaaaggtagaatagttctcctgaaatttacgaattgaaaaagtaggataataaaaatcccccgtattggaagacgagggggcttaaatgttttcacaacggaataatccttattgtgaattgctttcaaaattattagtacaaatatagaagaaaaaatcttttaggtgattacgggaatcctcattttaaatattttttttatttctatttttataaggtatctaaaattaataatgatgattaaaaatatacttggattagatttgggaaccaactccattggctgggcattgatcagacaagattttgaaaataagtatggagaaattcttggaatgggaagtaggattattccgatggatcaaaaagttcttggagaatttggttctggaaattcggtttcgcaaactgctgacagaacaaaatacagaggagtgagaagactacgtgaaagattccttttgcgaagagaaagacttcatagagttttaaatgttctgaattttttacctatacattatgcttctcagatagattttgaaaagaggtttggaaagtttagggaagaaacagaacctaaactggtatataataacgatggatttatttttaaaaattcgtttggagaaatgcttgttgattttaaaaagcatcaaccacagcatttagaaaatgataaaaaaattccttatgactggacgatctattatttacgtaacaaagccctaactcaaaaaatagagaaagaggaattagcctggattcttttgaattttaatcaaaaacgtggttattatcagttgcgtggtgaggaagaagaagagaatccgaataaactggttgagttttattctttgaaaattgtagatgttttagcggatgaacctcaaaaagggaaatcagatatttggtattctttagttttggaaaatggctggatttatagacgctcaagcaaaacaccattgttcgactggaaagataaaacgagagattttattgttacgactgatttgcatgaggatggtagtattaaaacagataaagacgggaatgaaaaaagaagtttccgtgcgccgagtgaaaacgactggacacttgtaaagaaaaagaccgaacaggaaatagaaaaatctcataaaactgttgggacatacatttatgaaacgcttcttcataatccaaaacaaaaaattaaaggaaaactggttcgcaccattgagagaaaattctataaagatgagctgaaacagattttggaaaaacaaaaagaatttcatactgaattacaaaatgatgatttgtatagcgattgtgtgcgtgaattatatcgaaataatgaagcccatcaattgactttaagtaaaaaagattttgttcatctttttatcgaggacattattttttatcaaagacctttaagaagtcagaaatcatccatttcaaattgtacattggagtatagaagatataaagataaacatggggtggaacatacacaatatctcaaagcaattccgaagtctaatccatattatcaggaatttcgtatctggcaatggatgtacaatctgaatatttataaaagagatgatgataccaacgttacaaaagagtttttaaattcgacagaagattttgaaaatctatttgactttctaaataacagaaaagaagttgagcaaaaagcgttactgaaacattttaaattaaatgaaaaaacacatcgttggaattttgtagaagataaaaaatacccttgcaacgaaagcaaaacaatgatttcatcacggttggataaagttgaaaatatttctgaaaactttctaacgagcgaaattgaacataagatttggcatatcatctattctgtcaacgataaaattgagtatgaaaaggcattaaaatcttttgctaataaaaataatctggatgaagtttctttctttgaagcttttaaaaaattcccaccttttaaaaacgaatatggttctttctctgagaaagccattaaaaaattattgcctttgatgcgagttggtaaatattgggatgaggatgaaattgtaaaaaacagcgacacgtattttaaaaatattggagatttattaggaaatattgcacggaaagaagaaaatatttccgatgaagatagaaagaaatataacaagacagtcaatctaaaacttcgtgaagaattggagatttttcaggatgcagaaatagcttcttttcaaaagttaagattgcacatagcacaatatctggtttatgggagacattcggaagcatctataataggcaagtggaattctgctgatgatctggaagagttcttaaaagagtttaaacaacactcacttcgtaacccgattgttgagcagatcattaccgaaactttacgtgtggtaaaagatatttggatgaaatacggaaatggagcaaaagacttctttaacgaaattcatatcgagttagggcgtgagatgaagcttcctgctgaagatagaaagaaattaacgagccaaatttctgaaaatgaaaatacaaatcttcgtatcaaagctttattggctgaaatgatgaatgatagttcggtagaaaatgttcgcccattttcaccgatgcaacaagagattttaaaaatatatgaagatggagtcttgaactcaggtattgaaattgaagatgaatatctgaaaatcagtaaaactgctcaaccttcatcttctgatttaaaaagatataaactttggctggaacaaaaatacaaatcgccttatacaggacaaattattccgttaaataaactgttcacaccagaatatgaaattgaacatattattcctaaaagccgatattttgatgacagtttcagtaataaaattatttgtgaggctgcagttaataaattgaaagataattatatagggcttgggtttattaagcaatttgcagggactattgttgaacttggtttcgggaaaaatgtaaaagtttttgaaatagaagaatatgaagatttcattaaaaaacattatgctaataatcgaggtaagagaaataagcttttattagaagagattcctgaaaaaatgattgaacgccagctgaatgatacccgtcatatcagtaagtatgtatcaggtgtgctttctaatattgtgagagtggaagatggaacagatgaaggtgtgaattccaaaaatatagttccaggaaacggaaaaattacaacacagctaaaacaggattggggattgaatgatgtttggaacgatttgattctgccacgatttgaaagaatgaatcaattaaccaattcaacggatttcacggcttggaatgaaaatcatcagaaatatttgccaaccgttccgattgaattttcaaaaggattttcaaagaaaagaattgaccatcgtcatcatgctttggatgctttggtaatagcttgtgccacgaaagatcatgtaaatttgctcaacaatcaatcggcgaaatcagatactaaacgttatgatttgaagaagaaactgatgaagtttgagaaggtagtttacaatcatacacaaacaggagagaaaatcgaaagagatattccgaaacaatttctgaaaccttgggaaacctttacgattgatgccaaaaatagattggaaacaataatcgtgagcattaagcaaaaccttcgtgttatcaataaagctactaatcattatgaaaaatatgtggataaagatggcgtgaaaacaaaagaaaaggtggagcaaaccggtacaaattgggcgataagaaagtcgttgcatgaagaaacagtatcggggaaaataaccttatcatgggtagaaacgagtaagggagaatttataactgcgacaagaaaacctttagactcaagttttacttttgagaaaatcaataaaattacagatacaggaattcagaaaatacttaaaaattatcttgaagcaaaagaaaataatccagaattagctttctcagcagaaggaattgaagacttgaataaaaatattgagaagtataatgatgggaaatcacatcaaccaattataaaaattcgtctatatgaaaaaggaaaggggcgatttgttttaggacaaacgggaaataaaataaataaatatgttcaaggttctccaaatttattttttgcaatatataaagatgagaatgggaaaaaggtttttgaaagtattcgtttagatatagttattgaaagattaaagcaaggtttacaagccattccggaaacaaatcaaaatggagtttctttgtatcaaagtttgtcacctttagatttagtttatattccaacagaatatgagctggaatcacctcatattcttgatttcagtaaattaaataaaactcaaattacaagattatataatacaaatgatttttcaggtgtaacagcttattttagtcagaattcttttgccaaacacatttatccaaaggaaatggatttaagctggaatgaaaaaaaacaaaagctttccggatcatttgattctaaaacagcttcttacaataatacatctataaaagatatttttattaaagtgaaagttgatcgtttaggaaatatttcaaaagcataattatgataacccgttctatctacattggcaatcctgcttatcttaagctcaaagacgagcaaatgtatattttagaaccttccactaaagaaatgaaaggtaaggttcctgtggaagatttgggtttattgatgttggatcattttcagattaccatctcacatcaattgattcagaaaatgatggggaacaatgttgtagtggtgagttgtgatggtcatcatttaccacatggaattatgcttccgttatatggtcacactgaacattccgaccgtgtcaaagatcagttggaagctagtgaacctctcaaaaaacaactttggaaacaaacggttgaatgtaaaattgaaaaccaaaaagaagttttaaaacgtttaggaaattattatgaacctatgattgattatcagaataatgtgaaaagtggtgatattaccaatatggaaggtatcgcagctcagcattactggaaatatctcatcagtcttgattttctgagacaacgttttggggattcacccaatcaatttttcaatttcggctattcggttctcagaagtattgttgcaagagtaattgtagagaccggattacttcctgttcttggaattttccataaaaataaatataatccttactgcctggctgatgatttgatggagccttatcgtccttttatcgatttattagtaatgcaatggttggaaactaatcctgaaactgaagaattaactaaagaatttaaagctttcattttacagattgcgactaaagatgtgaaaataggggataaaacaagacctttattggttgcagtaaaaacaaccgccacgtcactgtataaatgttatacgggagaaaaacgaatgatctcttatcctgaattgatatgaatgccgaaaggtttaatgcttaccgaattatgtgggttttagtattatatgatttaccaacagagactaaagccaatatgaaagatgcgaatcgctttcgtaaatctttgcttgatgatggttttacactatttcagttttcaatgtacgtaaggcattgtccaagtcgtgaaaatgctgaggttcatattaaaagagtaaaatttatgctcccaaaagcaggaaaagtggcaattatgtgcattactgataaacagtttggagatattgaaatattttttgccagaaataaagaagaaccacctccagccttccaacagcttgaattattttaaattttgaatcctaaaaacaaaaacaatctactgattatcagtaggttgttttttgaggctgtgactaatcacgaagataataatttttgaaagcaattcacaacttttcacgtaatctccaagagagaaataaggctgtgactaatcacgaagataataatttttgaaagcaattcacaacacctttccaggctttgaaattcttatttcggctgtgactaatcacgaagataataatttttgaaagcaattcacaacatctcagattctcaacacgcaaataaaattgctgtgactaatcacgaagataataatttttgaaagcaattcacaacaccccatccatataaccgagagacagacatgctgtgactaatcacgaagataataatttttgaaagcaattcacaacagcaggcggcagtttcttttatctgccagagctgtgactaatcacgaagataataatttttgaaagcaattcacaacgcttcaagaatttagctttcttgcaccacagctgtgactaatcacgaagataataatttttgaaagcaattcacaacaaccacaaactctgtataatcctgttattagctgtgactaatcacgaagataataatttttgaaagcaattcacaactttctttttcaaggtatttttcggtatctggctgtgactaatcacgaagataataatttttgaaagcaattcacaacgaaagcctgtccgctctccgggcagtctacgctgtgactaatcacgaagataataatttttgaaagcaattcacaacaagaaaatggagatataaaagaagtgaaaagctgtgactaatcacgaagataataatttttgaaagcaattcacaaccgctccttatgggtggagattaagacatcagctgtgactaatcacgaagataataatttttgaaagcaattcacaacggatcaaggaatctatttctgacaactccggctgtgactaatcacgaagataataatttttgaaagcaattcacaacgttaatgatgaagatattattgcttatgatgctgtgactaatcacgaagataataatttttgaaagcaattcacaactgtatgattatcttgattttgcagttttacgctgtgactaatcacgaagataataatttttgaaagcaattcacaactattaattcaatatgtttctatctaataatgctgtgactaatcacgaagataataatttttgaaagcaattcacaacagacttccataccatcagtttgctgcaggggctgtgactaatcacgaagataataatttttgaaagcaattcacaacagtaagtagcttattgtgctactcacaacagctgtgactaatcacgaagataataatttttgaaagcaattcacaacggaaacttcagcttgaatttatgacaaaatgctgtgactaatcacgaagataataatttttgaaagcaattcacaacttattccggttttaaaagttcgtttttcatgctgtgactaatcacgaagataataatttttgaaagcaattcacaacttaattcgttaattatcatcgcctgtaattgctgtgactaatcacgaagataataatttttgaaagcaattcacaaccgcgtttaaatcgttctatgaagttcatatgctgtgactaatcacgaagataataatttttgaaagcaattcacaacaagaaacaacaccagaagatgaacctgtcagctgtgactaatcacgaagataataatttttgaaagcaattcacaacagaagctggggcttattgagaggaatgaaggctgtgactaatcacgaagataataatttttgaaagcaattcacaacaggaaacaacaccagaagatgaacctgtcagctgtgactaatcacgaagataataatttttgaaagcaattcacaacagaagctggggcttattgagaggaatgaaggctgtgactaatcacgaagataataatttttgaaagcaattcacaactttccactcttatctgcaaaagctgctgcagctgtgactaatcacgaagataataatttttgaaagcaattcacaaccaaacaactgaaagaactcctgaagctccagctgtgactaatcacgaagataataatttttgaaagcaattcacaacagcttctttatcaggcattattttaccgttgctgtgactaatcacgaagataataatttttgaaagcaattcacaacatatttggaaacatcaaaaatatcattgaagctgtgactaatcacgaagataataatttttgaaagcaattcacaacgcaaatctcccctttgccttaattcttctagctgtgactaatcacgaagataataatttttgaaagcaattcacaactatttataagcatagctttaaacgcccagggctgtgactaatcacgaagataataatttttgaaagcaattcacaacagtttctcaattggttttaagacacaattcgctgtgactaatcacgaagataataatttttgaaagcaattcacaactaaatttactatagtaaataattaataatggctgtgactaatcacgaagataataatttttgaaagcaattcacaacacctgccatcttctgtaatttttaatgaatgctgtgactaatcacgaagataataatttttgaaagcaattcacaactcaaaatttggaagctcttcaaacccagaagctgtgactaatcacgaagataataatttttgaaagcaattcacaacggtaggctttggggtaatgtaataggaacggctgtgactaatcacgaagataataatttttgaaagcaattcacaactataaattgaggtgatcgtcttttctatgcgctgtgactaaccacgaagataacaaattttaaaagcggtttatgaacatttacaaaatagagaagtcaaataaaacagaacaaaatatattcaaatttattccagtcattccttgatttattttccaattttaaagatctaaccatcacacacatgatattatataggtttctgttcatagggctttttgttatatttgcccgaaacttctaatcatgtctaattcaaagattcaattaatatatttactcaaatcccatttaggttttcgtgaatattctgtttcgacaattcttccccctgtcaatttgaaatttaaaaataaccatgaaatcaattttaaaagtatttaagtttttaggcaagcttatcctgggaatcctaatcgtattattgttcttagggctttgttatcgattatttagcccaaaacctgttccgccgggtaaactcgttaacgttaacggaaccaacatccatgtaagagcagaaggagataagaaatctttctctacagtgattattgaagcaggagcacacagtaataccgatatgctgcattggattgcggaaggcttaaaagataaaacgagagtcatacgctatgatagagatggaaaatggtttagtgaagcaagtaatagtgataatagatcccctgagttttatgcacatcagcttcatgaattattaacgaaaacaggagaaaagccaccttatattttggtgggacactctatgggaggtccttataccagaatattcagggatctttatccaaatgaagtgaaaggaatggttttcatagattcaagtcatcctgaacaatggaaccgattagcacaaaaagagttggttcccgaagggcaggcaagaatattaaagataggatctattcttgcagatttaggtattctaggtctttataataagatatttagtaaagcaccctaccaaggtgatggcttacctaaagaagtatacagtagatcacaatcgctcaccaatacctccggagatgtttatactatgtttttaagagagaatgaccttaccaatgctgtgctgaagcgtgcaggtgaggcaaaaaagttagattcattaccggtgttggtgttcactgctacagagcagtataaagaatcccaaaaagaaaaatacagaaaatcaggaattgatcctgaaaaacaagttcaattatggtttgggatgcagaaagagctaaaagaactctcttctcaaggaaaacaaatcataatgaatgccagtcatggaagtatcattacgaaaaaagaaaatgcagaagtaataaacaaagagattcttttactatctgaaaatattgaaaaacaaaagtaatattaaacagcgaagccccttaattggggctttgttatttttttaaagttaactcttttcctttaagggcaaagtaaaggttttggaattcgtggacgtgtcttatttctaattcatcatcatttcccaacttgataatccagcctttggaaggtctgcagataaatttcatatgtgaaatgccacttcctaaactatattcgaattggtcagcagattcatcattaggattatacttttctccactattactttcaaatccaaaagtaagtaaccatttctctgttaatggaatcggtaggcaggcatccggatgtaaatcattaatatataccagatctcccagatcgtgaagatgatacacatattctatgttttcatcctttttatccattatataatttcctatgcgtaattcacttgtttccatactttgaatttaaattattttaatttgtttgaatagcttcgtttgtgaacccgataattattcttataaaaacagcctggtcatatcaataaccaagctgctgtattactctaatctcgtgctttatttatggcaatacttcattataataaagcggagtgtcattatttttatcgtaccccataataatgattctgtatttcttggcatcatcattattataaaactctacggttgtacgctcttgagattgctcttccaaataagggttccaatacagtacacttcttgtatcctgtggaatttttttgaaactgtcattatcgtaaatcgggctttcaaatggaacttccttatcatatccgcttaaagaaatttgtcttaattgtgaaggtaaagctctgtctatgacttttcctgaagagccaccccctctgcgggtgtagatagcgatggcaccgttaccggctccggaagctcctgcaaaaattccttttatgacttttaccatcgcaatttcggaggtagacatattggcaatttggctgggctgaattggcatttcatcaagataaacagttgtttcatctcctctcaggtatggaatgggaattccgtttcgagtctgaatggtaagccctgaaactcttccctgtagccattgaagaatacttgaagacgtaattgcttttggatcattcacaaaatcaaaaatctcttcattaggacttttaaacaaaagactgcttaattcattattcagttttttagttttagcttttacttctcctcttaattttatttcctcaatattggttactttttcattaataatcttttgagtatcaagagctgtataagatcttgtaatttcagcagaaggcttgtcatcatttgatctttgtactaatttataagggcttgaaggtaagcctttcttatacggaacgaaactgaaatcaggctggaaatatacagagtaattcttgttaggctctttggatgtggaattcaattggtaagaaaacttcattgtatcttcaaaaattaaattacttaaagaaaagaatccgttattatccgatttgatttgaaaaatctttgatccggattccgaatcaaaaattaaattcaggtccgtattgggagccggttgtccctgaacatttattttccctttataagaaagatagttccctgattgatatttaatagtaggatacactcctgaaataatcgttttccagtcaaaacgtttccatttctctgaaattaaaagtgcatcaagagcctctatatttcgatccttagtaaaatactgagcaggattcgttatcgttgaagtaagatctcctgttaaccataaggtacttaataagctttgatcttcttcagagctgttggtattggcatcaattactaaaaccgtataacctgaataatccgaactcttaggaatatcaaaagaattctttccacgaggtgaattttctaaagaaagagactgtaaagctggttttttaatttgtaattgctgtggctgtacaaacgaaagcctgttggctacgatattttccttatcatcaaacaccgtaagctgtaaaatcccattaacaagttgattattcggaatagaatactgagtgtcattagtaatcttattcacttgagccttgtacacaagctgattattgatggttcccagaatcttataataaggtgcttcttgcgaagaatttttagattttaaaacatattttacggcatccttatcactgtttacctcaagatgaattcctgaaggcaaaacttccggtaaaggaatgctttgcttttgtccatttttattctgaacagtaagttgatatctttttccggtttttggggtaatgttgaatattccaatattttgatcaagccctttaaatgttgtgatttttgtatcagggctgtcaggatcagtcacatatccttcccaatcaacagaagtagagctgctggattgtaaacgtacagctactttggtatttattccatcaataaaacttccaccttccgggtataccgatgctaataaattagaatgggaatctggtgttaatttttcaggcgaagaaggattataaatgacaaccggtttcaacaattgaaaatcctcactgaaattagccatccaggtggtgtatgctctgatataataaacatcttcttttaaagatttgggtaaagcaatactaccgcttccttccccattcattaatggaaaaagctttttgctaatttggtttttattgctgtcatagagttccacaaatagagtagtggaaataccggaagctccataaccatcaaagacaaaagacttaaaccaaaggtcttcgccagcgatataattgcttttattgaaaagtaaatgtattttttcctgaggaaatttttgttcaaatgttttgagtgcctgttcggctttgttttgtgcactaagaatatcaattgtacctaatgcaaacaggaatattagtttttttgacatagtctcgttaaaattgtgtttttttacatggaggtgctaaaatacacaattattgcatttctgaatagagcattttttatttaaaatggagaaagtattatttattaagtatatttaatgcatcaattcataaaaatgaagcaaaaagagatttcttgatgtatgttaaggaaactgcattcaggtttttctatttttgtacccgaaaacaataaactttttaaacagttcaataatatgaaaaaaattagcgtaattgcattagtaggagtaggattgcttgtagcatcatgtaatagtaaagaaaaaacagatacatcagtagctactgagcaggctgttgcagaaagcaaaggagaagtattggcagtagatgctgcagcttctgtagtaaactggaaagcattccacaaaggaggatttgcacctcgttggggaactcttaacgtaaaatcaggtgacttaagcatcgaaggaggacaagtagtagcaggaaacttcaatattgacatgacttctattaaagtagatccggcttctgtaactgaaaaagataagaaaccggcagatcttgaagctcacttaaagaaccctgacttctttaatgtagagaaaaaccctacttcagactttaaaatcactagtgtagcagaccttaaagaagcacctgctgatgcagtagctggagctaataaaacagtaagcggaaaccttactttactaggaaaaacaatgaacgttactttccctgcgaaagtagacgtagtagacaatacagcagctatccaggctaaatttactgtaaacagaacagactggggaatcaaattcggtacttctgaagcagatcctgctgaatggatgatcagcaaagacatcgagatcgcaattgatgtaaaagctaaaaaataatttttagattaatcaataatctatgagctgctttctttgggaagcagcttttttattttgatataaagcagattgtcattagaaacagattacttttaaacgtaaagccagaagtttcagaagtttgatttcaggaagctaagaagcgccactttgccactaaagaagcttcatagatatgcattcgcttagagagaatcaataaaattgagtacaaattaaatattcgtgaattcgtggcaaaaaaataaacgccacgaattcacgaatacttctagataaaactcagaaatatatgtttctatgtagttaagtatttttaagccacatagatacataggttttaaaactattaaggagtgacagccaatgcaatcattttatttcaggacgctaagaagtgtgactttgtcactgaagaagctttatggatatgcattcgcttagaaagaatcaatgaaattgatttcccctttgctcacttaaaaatatgagagaagatgctaaaaactttgcgttaaataaaatattttaaacgcaaagacagacaatgtagtcatttgattttaggaagctaagaagagcgactttgtcgctgaagaagtttcatggatatgcatttgcttag

SEQ ID NO: 1198 - DNA, 24392 bp, synthetic construct
  source 1..24392: mol_type = other DNA
  misc_feature 1..24392: note = Synthetic
tactccaattaataaatcggtggcaagaataatgataatggtagcgataaaagggataaactgcttccagccaatcttgaaaagacttttataaattctaatttttgttaacccaaaacctgtcagaataagaattgcagaaagagaagcatacggaattaaattaattaaaaacggaactaaaagtaccgaaagtaataaaaaaacaccatgtacaaatgccgaaactttagtttttgcacctgcttgtatgttggcagaacctcttactaccacagctgtaataggaattgcaccgagtaatccgcagaagaaatttcctacgccttgtgctactaattctctgtttacgggagttattctgttgtgtttgtctagtttatccattgcttctacgcagagcaatgtttctaaagttgcaaggattcctatcaaaataccatctttccaaatttcataattactgaggattttagaaaaactagggaattttatttcagcaaaaatattatcaggaattttcaccaactgattcgttttcagagcataagaagaaccgaaatacgttaaagcataattaatggcaatccctacaattactaccaccaacgaagcaggtagaatgttgaactttttatttttaggttgtttcaaaaaaatgagaatcgctaaagaaataaaagaaataagaactgctcctcgggtaatgtgagagttaaattgaaccagattccccaaaaagttatcagaggtaaagatttgaacaaaaccactcgtccaaaaatcgggctggttgtatcctaaagccaaaggaatttgtttagaaattaaaataattccaatagcagccatcattcctttaattaccgaacttggaaaataactggcaaagacgccaagttttagaacacctaataaaacttgaaaaacaccagcaatcattaccgccagaagaaaagtttcaaaatttcctaaactgataattgctgccgaaaccaatgtggtgagtccggctgcaggaccagaaactgccaattgtgaaccgctaattacagaaactacaattccgccaataatgccagacaaaatcccagaatagagtggtgctccagaggctaatgcaacgcccaaacaaagtggaagtgctaccaaaaaaaccgtcagaccagctgctaaatcgtgtcttttgaacattatccaataatatttaaacgtacgatcaatatgcaactccatcttctaatttttttgcaaatttacttaatattaatgatttatatggatgataataatcaataaattttgtatcaatagatgggaaagatgtaacagatttccttgtcagaggctttaattttgtgttatcaaaagactaatacttaatttaaatcttaatgaaaatgaaatacggaagaaaattaatagaatacatgcttgggaattttaaaatttatacaggttttatcaatttctctcaggcagaagagtttgcaagagagcacaaaggcgaattaacagagattgtctatcacaacggcaaaggcgcaccagaactttctgataaagcaaaattggtagaaaataaaatgccttataatgtagaattgtccaaagattatactgttttttattctaatgacgagttttttatggagtataatcccgaaaaacatcaatatgaaaatgaaaatcaaaatacattgaaaaccgaaaacgtaattatctttaatggagattaccgccattctgaaagaataaaagaacgtctcaaaaagttaaataactcgcatttttacgagttggctgtaaaagtagctatctaaaaaaagttcaagttctgcttgaacttttttttgtatttctgtcaagttataaccatttaagttttgtagccaaagtgcaggcttcggtcatatttcctacacgcattttttcaagaatattttgtcggtgtctgtttacggtgttaatgctgataaacaaagaactggcaatttctttgcttctttttccagattgtatcatgctcaatatttctttttctcgggaagacaaaaaattagagttttctacggtagtttgttgaattatttttccgttggttgtaataataatcatacctctataatctgaactcagcataaaatcaaaatgataaagacaaagcgccaactccacatttttgtgaaaagggtctgaaaaataatacatcttatgaagcaaagaatgatgaaggtggagtaatcttaactgacttaccacgcagaaatcttttcttctttctgaaggtatagttttgataaactgaaagaattgaagttcaagaatatgcttttgtaaaacatcttcagcattgatgatttcaaacaattcatcttcccaaatgctttctatttctaacgtatttttgtgctgaaagatattcaattcatctgcaattttcccagcgtagatatagcttttgttatttttgaggtcgcttaaaatggcaattccgttttcgagttccacaaagtttttcgcaatgcttttgcattttgccaattgaattttctctgcttcgttctcagagataaaatcttgcgtcaacaattgttcattcaaattatactgaacgtctttcattctttaaaatggttatttatcactattgatttccgaaatttaagcacttaaatttgctctttcaaatacaaaagtacaatgaataatttgaacgaaaaacaaaaaatgcttcttggcgagtggtacaattctggagattctgttttaatggaagacaggaaaaaatgcaaagacctctgcttcgagtataatcaaattcttccctcaaaaatcaaacaaagaaaagctttaattagaaatttattcggaaaaacaggtaagatgtttcatatagaacagcccttttattgcgattatggttataatattgagattggagaaaacttttataccaatcacaatgtcgtgattttggattgtgcaaaagtaacctttggagataatgtttttgtagcgcctaattgcggattttataccgcaggacatcctttagatgtcgaaaccagaaataaaggtctggaaaatgcaaaaccaatcacaattggcaataatgtttggatgggtgcaggttgtagcgttttgcctggcgttaccattggcgataatacagtaataggagcgggaagtgtggttacaaaagacattccagctcatgttttggcttttgggaatccttgtaaagtagtaaaggaaatttagttttatagtctgtttaaatcaataataatgaaaaaaataatatttacatctcttgtttttttaactttttttgaaggttttaaagctcaatcattagagaaaatgacttggttcaacgagccttctcagtgggaaatcaaaggcaaaaaacttaccatgatggtaacgccacaaagcgattattggcgaatttcgcattatggttttacggtagatgatgcgccattttactattcaacgtatggcggagaattcgaaaccaaagttaaaataacaggcgattataaagccagattcgaccaaatgggattgatgttaagagttgatgctcaaaattatattaaagcaggagtagaatttgtagatggtaaattcaatctaagcaccgttgttactcataaaaccagtgattggagcgtaattactttagagaaagcacctccttttgtttggataaaagcggtgagaagattagatgccttagaagtgttttattcttttgacgacaaagaatatatcatgatgagaaatgcttatttgcaagataatacgccggttcaggttgggcttatggctgcttgtcctgatggaaacggatttaaagcaatattcgagaattttacagtaaaacatcttccagaccaacgaagattagaatggctgaagaaaaatcagtagttataaaccacaaaagtcacaaaagttatgtagctcttttgtgacttttgtagtttaataattttcaactttcaatcaaatccaaaaactgttgctcatctagaattgtaattgttcctaggtcttgtgccttttcacctataactaaaaaaataaagttttctaaattattttatcacaagaaacgtaagtttataagattcttttccaaatttttcttgttgatagttttctatattgataatttttaagatgcaatagatttttccttggttgaagatttttaataaatcttttttaattttatattcataattcttgtcaaatatagatatagcaggaggttcagaacacatattgtctcttccaattgtaagtttattatcactaataatgttgattttttttaaatcacaaaacggaagattagaagtggtgtaaaaagaaatgatttcatcttttttaaaagttttgaaatattctgaccataattcgtggtctttgatggatatatcattagaattttcagtttttatcctttcaataataatttttttgaattgttcattcaatgacttttgactataacaaaagttagaaattaaaatgattagtataaaaaatattctatttttcatttttcatttttttcaatcaaatccaaaaactgttgctcatctagaattgtaattgttcctaggtcttgtgcttttttcagtttgctgcctgctttctcgcctacaaccaaatagttgaggtttttagaaaccgccgaaatgttttttccgttgtgtttttctaccatttcttccgcttgttctcttgtgaaaagcgagagtttccctgtgaaaagaaaggttttgccttccaaagtattgcttaacacttcattggtgttttcgcctttttctagttgtacgccatagtttttcaggcgttctatcatcaatagattctcagggtttttgaagaattcagtaatggaaattgcaattttttcgccaatatcttctacctgacaaagctcttctaccgaagcatttttaagttcttcaatcgtattgaaattctttaccagtttcttcgcaacggtttcgccaacgtgttttatgcctattccgtacaatactttttcaaaaggtatttgtttagatttttcaacgccatcaataatattctgagcagatttttctgccattctttccaacggaagcaattgttctttggtgagtgtataaaaatctgcacagttttctatgagtttttctctatacaattgttctatggtttcacttcccagattttcaatgtttaaagcctttctagatacgtagtgaatcattcttcccacaacttgaggtggacaatgcgtttcgttcggacaaaaatggatggcttggtcttctacttttaccaattctgttccacattccgggcagtttttgatgtattcaatcggttgttgaagtagggttctcttctccaaatttacccctacaatcttcggaattatttctccacctttttctacatatacaaaatcgccatcgtgtaaatctagttttttaatgatgtcttcattgtgcaaactcgccctttttacggtagttcctgccaatagaacaggtttcagattggcaaccggagtaatggctcccgttcttcctacttggtaagaaacactcaatagttcggtttctactttttcggctttaaatttatatgccattgcccaacgtggcgattttgcggtataacccaattgtctctgttgttgcaaagaatttactttcagtacaatgccatcgatttcaaaaggtaaattgtggcgttctttgtcccaatagttgatgaaattttttacatcatccaatgttttacaaagtttcgcttggtcttccgagactttaaaaccccattttttcgcttgtgccaaaagttcccaatgcgttgttgcaggaaattcctccgcaatgtattgatacaaaactgcggaaagtccacgttttcttacttccgccgaatcttgcattttcaagcttccagaagcagtatttctgggattcataaaaaggtctaagccttcttcttctctggatttgtttattttttcaaaattcttcttggtcaaataaatttcacccctaataaaaaaacggttcgggaaatcgccttttagtttcaacggaacatccgaaatagttcgcacattattggtaatttcatcgccttgaaaaccatcgcctctagttacagcttgtttcagttcgccattttcatacaaaatagagatagaagcaccgtcgtattttagttcggctacaaattctacttcttcgttttcgacggtttttaagattctattttcccaatcttcaaggtcgtcaaaatcataagaattgtccaaagaatacattctaaattgatgttgtatggtagggaaattcttagttatgccaccaccaacacgcaaactaggcgaattggcatcgtaaaattctggatgcgctgtctctagctcttgcaattcttttagcttagcatcgaattcaaaatccgaaatactaggttcgtctaggatataataattgtaattatgctgatgaagttcttctcttagcgcttctattttttgttgaatattgtctggcatcttttccaaaatgatttaagcaaaaataattaaaatagttggaatttttatcttttgatgaaacggtgacttcggctccgctcagccaccgaaatgagaatattctcccaatacaaaaattaaaacggagactgagtgcagatgtggtgacttcgtgaacttcgttcgcagaccttttgtctgtgctcagtcaccgaagcagccgaattgaaatatttttttttggtcgtagtattaaaacggtggttgagcacagaaacggtgacttcatgaacttcgttcgcagaccttctgtctgtgctcagtcaccgaagtaaaagatttgtacagtcgtagtattaaaacggtggttgagcacagaaacggtggctgagcggagccgaagccacatttgaaatatttcattatttttaagaaaaaatattatgaaaggttggatgtatattttggaatgtaatgatggcagttattacactggaagtactaataatctggaacttcgtttgcaggaacacagtaatggtgaaggtgcgaatcatacaaagaaaagactgcctgtaaagttgatttattttgaggaatttgatagaattgatgaagctttttatagagaaaagcaagtgcaaggctggagtcgtaaaaagaaggaggctttaatgtataatttgcctgatgaactgaaaaggctcgcagaatgtatgaatgaaacacattgtaaaaataagacttagcatcgtgacttcggctccgctcagtcaccgaagccagctagaatctaatgtttcgtcgattttttttacgtgaacggtggctgagcacagaaacggtggttgagcggagtcgaaaccaccgaagtcacctcttttcctattttctatttaaaatcactgttttaatttaaaagctttaatttaaagataatacatggaaacaatgcttatgttgtgtttttggtgatttattattcatataaaaagagtaaaaagtatgatttttgcttgtttcatttctttataaaaccccattaatagggcttttttaattttctaaaggtcaaataaaagattatttgttttttcaaaattatttttgtataattgtaacaacaactaatgactaatgaagccaatgaactgattatcggatttttataactataaaccgtaaaaccaaattgaattattgataattaaaagtttctaaatatgtctcaatcacgaaaaccaaccaaaaagcaaactgaacctcttttttatgataatgcagatatgaaaagactttttcatattagtgataaaacattgcaacgtttgcgtctttcaggacaagttccttttgtaaaattcggaaataagtatctgtatcctattaagttttttcaaaatttagcagaccgtagtttcctttaccagtaataattagagtaaaagtctttataaatcccgatgttgcccatcggtaatctcactatgtttctaagcgtaccgcctagttaccaatatctccattcactactcacatttcaccattcacccattcactcattcactctttcacatttcacctattcaccactcaccatccactcatcctcccacttttcttttggtcttcttcggaaaagcacccttttatccgaagagcacccgaaggattatcgaacaacatccgaaggaaagtggaaacgaggtggtcaaatctggtcaaacgtggtcagaactggtcaaacatagacaaacatagacaaacgtggtcaaatctggtcagaactggtcaagtgtggataaaggtggtcaaacatggacaaacatggacagaactggacaaacatggacagaactggacaaacgtggtcaagtctggacaaacgtggacaaacatggacaaaggtagtcaaatctggtcagaactggtcaaataacgcagggtaagtgtttggtattcagttgtgttatatctttgggtaatcattctaaaaaaatatagtatggcagaaattaaaaaaggaatccttggtggattttcgggaaaagtaggccctgtagtaggtgccaattggcgtggtaaagacattatccgcagtacacccaaatcgtcttccagaccgaagaccgataaacaagtgctgcaacaattgaagtttaaaacagcaattgcttttttaactccgttgcgcaatattcaaagtcggttttttggagctgatgcaggagtgaagtctaaagtgaatttggctacttcttatttcatcaataatgctgtagaggtagaagatgaccttcctatggtggtgtataataaagtgctgattactaaaggcgacttgacgggttttcaggtgctggaagcagtagctgaggcaggtgctaagctgaaatttacatggcagaataacgccatacaaggcaatgctttggctaccgacaaggtgagtgtagtgtgctattttgaggaaacagggacttttgaaatgttcgaagaaatagctgcaagaagtgaagccactgtaagcgttaccttgcctagtgcttatgcagggatggagacgcaggtgtatgcttatctcaacaacgaattgcaaacccaagcctgtaacagtgtctatctgggggcaattgcacttctctaaaaagatccactcgaaagggtggattttttattttagaagtagcggtgactgagcacagacggaaggtctgcgaacgaagttcacgaagtcaccacgtttgctctcagttaccgaaaaaatgtttaggcgcaacatcataacggtggtttcggctccgctcaaccaccgtatctgttctcagttaccgaaaaaatgtttagatgcaatattataacggtgactgagcggagctgaagtcaccacgtttgctctcagttaccaaaaaaaatgtttaggcgcaatatcataacggtgacttcggctccgctcagtcaccgtatctgttctcaatcaccaaaaaaatgtttagacgcaaaaaatttgtatttaatggatattgtgaaatattagaacatgcaaatactcttaattatgtacaagagacaagtcaaactcttaaattcaagtggtttgtatttaatttttttaagagttgataaaatatattaaagagaacaaatgggcataaaaaatgccccacagataggcgaggctctaaatgttttagctcattatcttaatgatttttttgtacttgctgaaacatttggacataaaaaaagctccctgattatggacaaggagcaatccaaatgttttcacaacggaataatccttattgtgaattgctttcgatttcaaaggtagaaataaaaaaaataatacgtttacggttttccgtatttttcttaaaaatattctttttaaatttataaattatttaaaaactggtatttatgaaaacgattttaggactagatctcggaacaaattctattggctgggcgttgattaatcaagactttgcaagcaaacaaggaaagatactcggaatgggaagcaggattatcccgatgtctcaagatatattaggggaatttggaaaaggaaattccgtttcacaaactgcagaacgaactgggtatagaggagttcgtcgtcttcgagaaagatatttgctacgtcgtgagcgattgcatagagttttaaatataattaagtttttaccggaacactttgccaatgagattgattttgaaaaacgttttgggaaatttaaatctgataatgaacctaagatagcttataatactgatggttttgtctttaaaaactcttttgaagagatgctttctgatttcaaaatgcatcaacctcaaattttaaaaaatgaaaaagacgaagataaattagttccttatgattggacaatttattatctgcgtaagaaagctctatctcaaaaaatagaaaaagaggaattggcttggattcttttaaattttaatcagaagcgtggatattatcaactgcgtggggaagaggaggaagaaaatcctaataaattagttgaattctactctttgagaattatagaggttacagcagatgaaccacaaagaggaaaatcagatatttggtattcgctgatgttggaaaatggatgggtctatcgcagagcaagtaaaacgcctttgtttgattggaaaaataaaaccagagattttattgtaaccacagatttgaatgatgatggtagcatcaaaaaagacaaagacggaaatgaaaaaagaagtttccgtgcgcctgctgaaacagattggactcttgtaaaaaagaaaacagaacaagaaatcgataattctcataaaaccgtaggaacttacatttatgatactttgttacaaaatcctaaacagaaaatcaaaggtaaattagtaagaacgattgaaagaaaattctataaagcagagctgaaacagattttggagaagcaagcagcctttcatcctgagttgcagaatgtagatttgtataatgattgcgtacgtgaattgtataaaaataatgatgcacatcaattgacattaagcaaaaaagattttgtgcatttgtttttagaagatattatcttttaccaaagacctttgagaagtcaaaagtcgtctatttctaattgtacactagagtttaaaaaatatgtagataaagatggtgtagagcatacacaatatctgaaagcgattccgaaatcaaatccttattatcaagaatttcgtatctggcaatggatgtacaatctgaatatttacagaaaagatgatgacgaaaatgtgactaaagaatttcttaattcttatgaagatttagaaaatctatttaagtttttggatgagcgaaaagagattgaacaaaaagcattgctgaaattccttttagaacaaaaagactttaaaggaaaagtactgacagcagaaattgaaaagtatcgttggaattttgttgaaggaaaggcatatccttgtaacgaaaccaaaacaatgattgctacaagattgagcaaagttgagaatatttcggatactttcttcacaagagaaatagagcagcagatttggcacatcatctattcggtcaatgataaaattgaatatgaaaaggctttaaaatcctttgcgagaaaacataatttggatgaaatctctttctttgaagctttcaaaaaatttcctcctttcaagagtgaatatggttctttttctgagaaagcgattaagaaactgttgcctttgatacgagtcgggaaatattggagctatgacaatattgatgaacattcaaaagcaagaattgacaaaatcattaccggagaatatgatgaaaacatcaaagataaggtaagagaaaaagctattaatctgaagactgaaagttattttcaaggtttgcaattgtggttggctcaatatgttatctatggcagacattctgaagcttcaatgattggtaaatggaattctgcagatgacctcgaaatatttttgaaagagtttaaacaacattcgatacgcaacccgattgtagagcaggtcatcacagaaaccttgcgtgtggtaaaagatatttgggtgcaatatgggaaaggtgctaaagatttcttcaacgaaattcatattgaattaggacgagaaatgaaaaatactgccgaagaccgtaagaaaattaccaatcaagtcacggaaaatgaaaataccaatttacgcatcaaagcattattagccgaaatgatgaatgatgctaacgttgaaaatgtgcgtcccttctcaccaatgcaacaggagattctgaaaatctatgaagatggtgtacttaattctgatattccaattgatgatgatattttgaaaatcagtaaaaccgctcagccaagttcctctgatttgaaaagatataagttgtggttagaacaaggttacaaatcgccttatacaggacaaattattccgctaaataaactattcactccagaatatgaaattgagcatattataccgcaaagccgatattttgatgatagttttagtaataagattatttgtgaggctgctgttaattctataaagggaaataaactggcttatgagtttattaaagatcccgtacttcaaactgttgaagttggttttggaaagagtgttcctattttaaagccagatgaatacgaagagtttgtaaaaaaacattacgctaaaaacagaagtaaaaagacaaaacttttattagaagagatacctgagaaaatgattgagcgccagatgaataacactagatatatcagtaagtatatctctggagtgctttctaatattgtacgtgttgaagacggtacagatgaaggagtaaattctaaaaatattgttcctggaaatggaaaaatcacaactaccctaaaacaagattggggactgaatgatgtttggaatgatttaattctacctcgttttgagagaatgaatcaattaacaaactcaacagatttcaccgcatggaacgaaagtcatcagaagtttttaccaactgttccaatcgaattatctaaagggttttcaaagaaaagaatagaccatcgccatcacgctatggatgctttggtaattgcctgtgcaacaaaagagcatgttaatttacttaacaatcagtctgctaaatcagatacgagaagatatgatttgaagaaaaaactgatgaagtttgaaaaagcagtatataatgatgccaaaacaggtgaaagaatagaaagagatgttccaaagcagtttttaaaaccttgggatacctttactgttgatgctagaaatagtttagaaaacatagtagtgagttttaaacagaacttacgtgttattaataaggctactaattattatgagagttataaagatgaaaatggtaatcttagaataggaagtgatggaaaaccaaaaaaggattttatttctcaaaagggaactaactgggcaataagaaaaccaatgcatgccgaaactgtttcaggattagtgaagttaccttgggttaagttaggaaaaggagaaaaaaccacagcaacaagagagaggaatgacttagtttcaatttttaaagatgtaaaatcattcgatgttgcattaaataaaatagaaaaaataacagatacaggcattcaaaaaatattaaagaaatatttagaacacaatattgaaaaacttgacttcgccttgaccgctgaaggcttagaggagttgaataagaatatttcattatataataaaggaaaatcacaccaacctattctaaaggtacggagttatgaaaagagtaaggggaggttctcattaggtgaaataggaaacaaaactaaaaaatttgttgaagcagcaaaaggaactaatcttttttttggtctttatcttgataaagatggaaaacgtagttatgatactattcctctgaatttagtaattgaaagacaaaaacaaggactttctccagtgccagaaactaatgaaaaaggacatcagttattgttttatttatctcctaatgatttggtgtatgttcctgatgagttgaatgaagttagtgagaaaaatatttataaaatggtaagttcgacgggtaatgaatgtcattttgtaaaagctagtatttcatcattaataaagaattatgatgccaaaaccagaataggagagttaggtagtctaaataaattagaaattacactcgatgcttcatctagaataaaagaagtttgtataaaactaaaagtagatcgcttaggtaatatttcaaaagttaaaatatagctatgataacccgctctatctacatcggcaatcccgcttacctcaagctgaaagatgaacaaatgtacatcttggatgccttatccaacgaagtaaaagggaaagttcctgtagaagatttaggattgctgatgttggatcattttcagattaccctttctcatcaactcattcaaaagatgatgggaaacaatgtagtagtggtgagttgcgatgcgcatcatttgccacatgggattatgttgcctttgtatggtcatacagagcattcggatagggtaaaagaccaattggaagccagcgagcctctgaaaaaacaattatggaaacagactgtagaatgcaagattgaaaatcaaaaagaagtattgttgaggttaggcaattattacgagccgatgattgattatcaaaaaaatgtaaaaagtggtgatattaccaatatggaaggtattgcagcacagcattattggaaacacctcatcagtcttgattttctgagacaaaggtttggagattcgcccaatcaattttttaattttggttatgctgtcttaaggagcattgtagcaagagccattgtggaaacaggattgctgccagtgctaggtatttttcataaaaacaaatacaatccttactgtcttgctgatgatttgatggaaccttaccgcccatttgtagatcaattggtgatggattggttaattctgcatcctgattctgaagaactgactaaagaatttaaagctcatattttgcagattgcgaccaaagatgtaaggattgacgaaaaaacaagacctctaatggtggcgataaaaacaacagcctcttctttgtacaaatgttatacaggagaaaaaagactgatttcttatcctgaattaatataataatcgataaatgataattgatgaattatggggaaaagcaaagattattttttaatcgattatcgtttatcaacgatcaaatataaatatggatgccgaaaggtttaatgcctaccgaattatgtgggttttagtattgtacgaccttccaacggagaccaaaactaatatgcgggatgctaataaattccgtaaagggcttattgatgatgggtttacgctttttcagttctctatgtatgtacggcattgcccaagtagagagaacgcagaggtacacattagaagagtaaaaatgatgctgcccaaagcaggaaaagttgccattatgtgcataacagataaacaatttggtgatattgaaatctttttcgctcgaaataaagaagaaccaccaccaacctttcaacagctagaacttttttagcaacccgtcactgcgaggtatgaagcagtcttttcgatagaaaataaaaatctcattaaaagtaatatgcaagttaagaaatgaatagaaaagtaaattctaaaataacaataaaccctctgaaaaacagagggttaaattttgaggttgttgtgtatcccaaagatactaaaaaatgaaagcaattcacaaccttttacctctttttttgtaacatcagatagttgttgtgtatcccaaagatactaaaaaatgaaagcaattcacaaccaacagttgcaactgcatttccaaactgcagttgttgtgtatcccaaagatactaaaaaatgaaagcaattcacaacaaagatatgtaaacggaatatttgacgaaggttgttgtgtatcccaaagatactaaaaaatgaaagcaattcacaactaatacctctaatatacaaaaattatttatgttgttgtgtatcccaaagatactaaaaaatgaaagcaattcacaacaaaaaagcagccgatataagaaaagaaattgttgttgtgtatcccaaagatactaaaaaatgaaagcaattcacaacggattaataatgctataaaaccaattatgagttgttgtgtatcccaaagatactaaaaaatgaaagcaattcacaacaaaaggaagatatacgcttacaaattgtttgttgttgtgtatcccaaagatactaaaaaatgaaagcaattcacaactggttttagcaactccgtaaatccaaagctgttgttgtgtatcccaaagatactaaaaaatgaaagcaattcacaacacatcttggtagtatctttcagtattgatggttgttgtgtatcccaaagatactaaaaaatgaaagcaattcacaactgaagaaatagacactaacattgataaactgttgttgtgtatcccaaagatactaaaaaatgaaagcaattcacaactaatatcttcttctttgccaatcgtaataagttgttgtgtatcccaaagatactaaaaaatgaaagcaattcacaacttattaatatctctataaactataactttagttgttgtgtatcccaaagatactaaaaaatgaaagcaattcacaacttaatgctggaagcgatttaacttctgaaagttgttgtgtatcccaaagatactgaaaaatgaaagcaattcacaacgtacagcatatcttcctatcgcatgtgtaagttgttgtgtatcccaaagatactgaaaaatgaaagcaattcacaacataccttttgttatggaaaatgtagctagagttgttgtgtatcccaaagatactgaaaaatgaaagcaattcacaacaacgcgcaacttacagagattttagagagcgttgttgtgtatcccaaagatactgaaaaatgaaagcaattcacaactatgaggattgggtaagtgacagatggatggttgttgtgtatcccaaagatactgaaaaatgaaagcaattcacaacgaccatcagattggtagtagagtgtttccagttgttgtgtatcccaaagatactgaaaaatgaaagcaattcacaacttctgcattgtcttattttggatttttggcgttgttgtgtatcccaaagatactgaaaaatgaaagcaattcacaacacttttgctctaaacgtacatggttggactgttgttgtgtatcccaaagatactgaaaaatgaaagcaattcacaacatatggtctattgataaattatctaaactcgttgttgtgtatcccaaagatactgaaaaatgaaagcaattcacaaatgtttggaatgagcggagctgttggtggctgagcacggacagaaagtctgcgaacgaagttcacgaagctaccacataaaaaacacctgttcttttttatttatgataatcctaagctacaaaaatcactataaaataacggtaattattattctgagaaagttaaaacctgttaatatgcttaatgtgttgattaacttgtgggtagattaattgtttataatctattaacaaaaggttttcatttaattgaagaaatgttaaaagtttcttaaacgcctagcctcaattccagagatacatttgcacagctaatttgaaaatatgaaaaaagtaaaaattctattaggtgttttagcattgagtataggaactctggcgtatgcgcagactactcaggcttcaattaccgggaaagtgacaggtgccggaaagacggcgcaagaaaaggtgaaggttaccatcattaacgaatctacagggtttaggtctgaaacggaaaccaactctaaaggggagtatatctttaaagaaattcctttgggaggcccttatacggtaattgtaaatgaagacaaaaaacaaggctataatgtgaacttcggggatcaggttactgtaaatatgtctttggataaatctgaagaaaagaatattgaggaagtagtaattactggaaaccttaaaaataaaataggaaatctgggtgctgctactgctattactgcaaaaaatatcgggatattaccagtgaatggtagaaactttaccagccttacagaattgtctcctttgagtggtaaaaatggtaatttatctgggcaattgggctcttctaccaactttaccattgatgggatgacggcaaaaaaccctacttctgcgggttctactaccagccgaagcggtgcgcctttttctatttctatagaagcggtaagagaatttaaaattaccaccaatcaatacgatgtaacccttggaagaagtggtggaggtaccgtaagtgcggttaccaagtctggaaccaataccttctctggaagcgcttgggaatatttaagaaccaactggctttctagcccttatgatattagagggaataaaagaaccaacgatttctctacttcgcagtttgggttttcattaggcgggccaattattaagaataagttgcacttttttgctgcttgggaccatcagttagattctagaccattaattattgctgatgttaaaacgccagcagacgaattgagattaaatattaacaatgctactttaaataaattcttagatattgccagaactaaatacggtgttggtaatacgcctcagtttggtactttcgataaagtgagaaattcggatgctgcatttttgcgtttagactggcagattaatcctaaacacttgttgactttaagaaataactttacgtttgataataataaaaacggcttaggagataacacggcaattaatttctttgaatcttacggaaatgataagaatttagataacagtttgctattaacgttgaggtctaaccttaagcctaatgttaccaatgagttgaaagctcaatatctatacacttatcaagacagttaccaaaatgatgaattgggacatgctgtacctagagccattgtagaaaatatccttacgcctattgatggagtgaacaaagctaccaatattcagattggtggtcaccgttttgcacaagagagctttaagaataatgtttttcagattgtagataatttatattacaatacggataagattaaatatactttcggggcagatttaatgtacacgatggcaaaatcaatttatggaagtgaggtaaatggaagattccactttagagaagcttctactaatcctgataatttgtataatttcaacaatcttatcgcatacagattctatagagaagttcctttgatggaagacccttctgtgaaatctaacatctggaatgtaggtgtgtatggacaaatgcaaaccaaaattgcaaaaggtttagatttgatggcgggtattaggttagattacggcggttatccaaaagcggagtttaatcaaaaactatttgatgaaatgggcattagaacagataatcagattaaatcgtttatcattcagccgagattccaatttgactggaacatcaacgaagggaataaagatttcttaaaatttggagcaggtattttctcttcggatattaacaattatatggtgattaataatttggtttttgatgggaaacatttggcaacggtagatgttaacccttctcagattggtttaactccagattttaacagttatagaaacaattatagtacagttcctactttggctcagtatcagttgccaacgattaactatacaggtaaagacgcaaaaattccaatggtatataaagcaaatatctcttatacacacttctttaacgagaaatttagagctgggattgcaggttatatggctttaggaagaaacaattatttctattatgacagaaatatggtagcaaatccttatttcacattagataacgaaggtggaagaggagtgtacgttccggcttcttctattgctgctaatggtaccatgaactggaaaaacggtagaatcaatcagaattttggtagagtattagaattggtgagtgatggtaaagtgaatcagttttcgtttgtgttagacgcgagttaccgttattggaaagatggagaaattacggcaagttatacttggtctgatattaaagataatacttcttacaatggtaacgtagcgaattctgcaactttatctacattggtagaaagcgacccaagaaatctgaaaatgtcttattcggacaatcagtttagaaacaaagtggtattgtatggtaactctcctaccattgctggttttactattggggttagatattctgggcttggaggtactcgtttctctttaaccagtggaggaaacgtaaacggagattttgtagatactaatgatttggcttatgttttccctaatcttactcaaacgttaatagataatcctgcggtaggacaagcactaaaagattatataaacgattataacaataaaattgctgaaagaaatgccggtaaaaatggtttctatggagtttgggatgttcgtattgctaaaaaactgaaaatgcagaagataggagcttttgaactatcggtagatattttcaattttgccaatttgctgaacaaagaatggggtgttaataaatcttacagttctatggcattgtatagaattacaggttttgatgctgctaccaatcaattaaaatacagtttgaacaccagtggtttagcgccaatgaatggtaatccttatcaaattcagataggagcgaagtattctttctaaatagaaaatgtgaaagggtgagtggtgagtttgaaaaattcaaaattgaccattcaccattcactatttaccataaaataagtacctttatcacaaaagttgaaaaactttagtttaataacctgttgtgtgttcagaggaataaatgtaaggtattgataaccttagtgttaaaaaaaagaaatgcacaataagtttaaatattcaatttatattatgaaaaactttatcttagggttggcagttttaagctcagttgtaatgaatgcacaaacccaaattattgctcacagaggtttttggcaaacccaacctactactacagaaaactctttgaagtctttagaaaatgctcagaaactaaaattatatggttctgaatttgatgtaagaatgaccaaagacggcgttttggtaataaaccacgacgaacatcatggtaaaatggaaatctctgaaacagattttaaagaattagaaactttgaaattatcaaacggtgagaatttccctaccttgaaagaatatttaaaacaaggcaaaaaagacaaatctgtaaaattgattgttgaaataaaaccagataaaaccaaagaaaaagaagacgaactaacgactaaaaccattaaaatgattaaagaaatgaagttagaatctcaatgcgaattcatttcttttagtttgaatatttgtaaagaaattaaaaaattagcacccactttcaaagtgcagtatctaagaggagaattgtctccagagcaagtaaaagccgaaggtttggatggtttagattatcattacagtgtttttctaaaaaatcctacttggattgctgaagctaaaaatctaggtttggttaccaatgtttggacggtaaatgatgaggatgttttcaaacaactttcagaaatgggagtagattttgttactaccaatattccggatgttttatctaaaaagtaaaaggtaaaaaagcttttttttgaattgtaaaattcaaattgaagatatgaaatagaatgtatcaaattagacgaactaaagtctggtttggtacatttgttttttgtaaatattttattttagcatagaaggctttctgtttctaaatctcattctttatatttgctctacttaaattttataaaattgggacattttctaagaaaagcattgccttctgaagcagaaattatctggaatatccttcaacaagccatcgaaagacgccgaaaagatggcagcagacaatggcaagacggttatccaaatttggaagtggtgaaaatggatattagctcagggaaaggttatgtcttagaacgagaaggtaaaattgcagcttatgcggctttggtttttaatgatgaacctgcttatgatgaaattgaaggaaattggttaaccaacggtgattttatggtcattcatcgtgttgcagtttcagatgattttttaggaaaaggaattgcggtttcgcttttcaaagtgttagaagattttgctaaagaacatcaagttttcagtataaaagtagatactaattttgataatttggcaatgcttcatattctggaaaaattaaattatcagtattgtggcgaagtatatttccgtggtggtgccagaaaagctttcgaaaaagtgctttcataatctttttctcctttttgggtaaactattattgataaatcctatctattatggttcgtttagttccgaactaatttattaaatttgctgttcgaaacatagtattttgaaaagtaaacttaatttagacgccgaaatttatcaagaactaatagatttctatggtggtgtgttttctcttacgccactttctgcaaagatatatgcctatttggcttttgattttgaaaaaaacggacttgcatttgacgagttggtagagactttttgtgccagcaaaagttctatttcggcaagtattaaattcttattgaatgctaatttgataaaaactgtcaataaaattgatgaaagaaagagatattttgtctttaatgatgattttgtaaaatttagatttgaagaaattgtaaatagattgaaacgagagataaaaattttagaccaattaaataactatagagaatctcagttggaaagctctcaattatccgaaagatattctatttacagaagccttttagaaaaaaatatagagaatatagaaaatactttaaataaattataaatcagaaaaaattagatatgaaaaatagattattaatgattttgttttcatcgcttgcagttttgtcttgtaagaaaggagatgagaaaaaagatggtccaaaaccttatccagtagttgctgtagagaccaaaaatgtaacaggttatgacgagtatcctgctgcaattagaggtattgtaaacaatgatgtaagagcaaaaatacaagggtatattactcaggttttggtagatgaagggcaatatgtaaccgcaggacaacctctttttaggttagaaaccaatgctctaagcgaaactgcggatgcggctaagtctggtgtttctgctgctcaagctaatgtgcaagcttcaagagctgccgtttctgctgcacaagttgaggtaaataaattgaaacctttggtagaaaaaaatattattagcaatgtacagcttcagactgcggttgctaatttggcaaaagctcaggctcagctttctcaggcagtggcttctcaacaacaagcaagtgcaagttataaatctgcaaaagccagcgtagattattccattatcagagcgcctatttctggtgttgttggaaaattaccacttaaagtaggaagtttggtagggcctagtgatgctactgcgcttaccactatttcggatactcgttcggtatatgcttatttttctatgaatgaaaaagaatatttaaactttttagaaaaatctgttggcgctacggtaccagaaaaaattagaaatttacctttagttgaattaaaattagctaacggaagtctatatcccgaaaaaggaaaaattgaagtaaccactggtcagatagatgctgctacaggaacaattcagtttagagtaggtttttctaatcctacaaaattgttgagcaatggaaatagcggaaccattagatttcctaaattttataataatgctattgtagttccagaaactgcaacttacgaacagcaagggattgtttatttgtttaaagtagaaaaagatactgctaaaaattcggtaattgaagttcaagaccgtgtaaacaatatggtagtagtaaaatctggaattaacaaaggtgaaaaaattattgcagcaggaattggtggtttaaaaccaggaactgccgttatttcaaaacctgtgaaatttgacagtcttgtacaatctgtaaaaccgattttctaatgattaaacat

SEQ ID NO: 1199 - DNA, 24383 bp, synthetic construct
  source 1..24383: mol_type = other DNA
  misc_feature 1..24383: note = Synthetic
ggaaaagaaaccttgacttcagcacaaaatttacccaaagaagcttggcctacaccagtttcagctctagaatcatctgatattatattaacttttaaagaaggagaactaatagcagtaaatactattagttttgaacacccatcaattgctattgaatatttacaacaaattgcacaaccattcggaataggcagacatattcatgtaggcgatacaattataggaataaaaggaagagtcggatttgaagctgcagcacctgagctaattataaaagcacatcatttattagaaaaacatacattaactaaatggcaattattctggaaagaacaattagcaaattggtatggaaactggttgcatgaaggtcaaatattagatccaacaatgcgagatatagaagttttttttagaaatactcaaaagaatgttacaggagatgtatacataacattacatcattatcgctatgaacttaatggtattaatagtccatttgacttaatgtccgaaaaatttggttcatatggagaaattaacaatggatggagtggagaagatataaaaggatttacaaaaatatttggaaatcaaacctcaatataccatcaggtactgaaagacaatcagaaaggatagattatatatagaccagtcagtttttaaaaggataatgaaaattaaagttggaatcataggtggagcaggttatacagcgggggaattattaagactattaataaatcatccacatgtagaaattagatttatacatagtaaaagtaatgctgataaattcctttatcatgtacatgatgatctttttggtgaaacagacttaaagttttcaaatacttttaattcagatatagatcttgtctttttatgcgtttctcataatgaagcagaaaaattagtaagtcagttcccttcttctgttaaaattattgatttaagtcaagatcacagaattaatggaaaacattcattcgtatatggcttaccagaattaaataaagaacgtattaaaacagctaattatatagctaatccaggttgttttgctacggcaattcaattagctcttttaccattagcgaaatcagaattattacatggtgatttatatgcttcctgtacaacaggttcaacaggtgcaggacagtcattagtagaaacatcacattttagttggagacaaaataacttatctgtttataaagcttttacgcatcaacatttattagaaattaatcaaagtttattacaactctataaaaattatacaggaagactgcatattttaccgcaacgaggttcttttactagaggaattttggcttgtattaccttaaaatctgataaagctttatcagatttacaagcattatatgagagcacgtataaagatgaagcatttgtgtttttaacacctaatggctgtcatttaaaacaggttgtaaacacaaataaatgtttgttatatctagaaaaaaatgaggataacctattaatagttagtgttattgataatttattaaaaggagcttcaggtcaagcagtacaaaatatgaatttaatgtttggtttacctgaaacaataggtttaaaattaaaaccaagcgcattttaattgtgtaaataatgaaagaaaatttaatagaaatgaatatgtttgatgtatattccgtttcagatattgaaattgttaaagcattaggttctaatttatgggataaaaaaggaaatcaatatcttgatttgtatggaggtcatgctgtgatatcagtaggacatacacacccttattatgtttcatctttaacagctcaattacaaaaaataggtttttattctaattcaattattattaatcaacaaaaagaattagctaaaaaactaggtaagatatcaggttatacagattatcaattgtttttatgtaactcaggagcagaagcaaatgaaaatgcttttaaattagcttcattccataataaacgcaaaaagattattgcttttaaagaggcctttcatggtagaacttcacttgcagttgcctgtacagataacccagcaattgtagcacctgtaaatgaaaatgatcagattacttttttaccattaaatgatattatagcttttgaccatgctgtaaatgatcaagtttgttgtgttattatagaaggaattcaaggagtagctggaatacaaattccagaaaaatattttctaagtcatgtagcacaaaaatgtaaagaattagggatcatattaatattagatgaaatacagtcaggttatggtagaacaggaaagttttttgcacatcaatacactgatgttaaacctgatattattacagtagcaaagggaatgggaaacggatttccaatagcaggtcttttaattaacccagaaatcaaacctaaaaaagaaatgttaggaactacttttggaggaaattatttagcttgtgctgctggtttagctgttttagaaataattgaaaaagaaaaactattattaaatgcacaagaaatgggagcgtatttgaaagagcatttaaaaaaaatatctaaaataaaagaagtaagaggtataggattaatgatagctatagaactctatgaaccttccgcagcagtacgaaaaaaaatattagaagagtttaaaatttttataggaacagctagtaataaaaatgcattgcgaatactaccttcactagcaattacaaagaacgaattagacttatttattacggctttatcaattgttttaaattaaaattccttaccatttgtttcatatttaaaatagattagaaacaaatcaaattttaaaatataaaaaaatgaagcattttacatcaatacacgatataaaagatcctatttccttaataaatcaagcaattgaattaaaggataatacaaaacaattatcaataggtaagaataaaacaattggattattattttttaattcaagtttaagaactagaatgagcacacaaaaagcagctcaaaatttaggtatggaagtaatgctccttaatgttacaaatgatacttgggcattagaatacgaagaaggagcagttatgaacggtaatacaatagagcacataaaggatgcagcaacagtaatgggattatattgtgatattttagcgatccgttgttttccaaaccttcaaaataaagaagaagattatcaagataaaattattaatcaatttattcagtacgcaaaagttcctatagtcagtttagaatcagctacacgacatccattacaaagtctcgctgatatgatgaccattcaagaacataaaaataaaattaagcctaaaatagttttgacttgggctcctcatattaagcctattccacaagtagtagctaattcatttgctgaatggacactagcctgtggttatgatttaacaattacgcatcctaaagattatgaattaagtcaagaatttacaaaagatgcaagaatagaatatgatcaagaaagagcattacaagatgctgactttgtctatgtgaaaaattggtcatcctatacaaattatggtaaagtattacctgttcaagaaaattggatgttaacaaatcaaaaattgaatgttactaattcagcaaaaatcatgcattgtttaccagtaagaagaaatgtagaattatcagatgaagttttagatagtaaaaattctttgattttggaacaagctcaaaatagagtatatgcagcacaaatagtattaaaaaaaatactggaaacaaatttttaagatatgatacacatcataaaaataggaggtaacataattgacgacaatactaaattaaagtattttcttaaccgttttgctaaactaaaaggatctaaaatactcatacatggaggaggaaaattagcaacccatttagcagagaatttaaatatccaacaaaaaataattgatggtagacgagttactgatgttcaaaccttaaaaataacaaccatgatttatgctggattagtaaataaaacgattgtagctaaattacaatcttatgcttgtaatgctattggattaagcggtgtagatgcaaatatcattcagtcagttaaaagaactcatcaagacattgattatggttgggtaggtgatataaaaaatgtaaatatagaatttttaaaaagtttgattaataaaggattcgtccccattattagtcctattactcatgatggaaaaggtaatttattgaatactaatgctgatactatagctacagaaatagccatagctctctcagaagacaatgaagtaaatctaagattttcttttgaaaagttaggagtattgactgatccagaacaggataactcatggctgaaggttttagataaagacatgtacaatcatttaaaacaaaaacaaattatatccaaaggaatgcttccaaaattagaaaatgcttttagagcaactcaattaaaaacaatacaggtagcaatatgtcatgcagattatgccagtgaactaggagactcatttattggaactttaatagtataacaaatggaacatttacaaaaagaagccttagaacttttgcaaaaactaattaaaaaacaatcatttagtaaagaggaaaatgatacagcggatattttagatgaattttttattcataaaggaatatcaactcatagattattacacaatgtttgggtgaaaaataaatattttaatcatttaaaaccaactattttactcaattcacatcatgatacagttaagcctaataaacactatacaaaaaatccttttagtccagacatagaaaatggtattttatatggtttaggaagtaatgatgcaggaggttccttagttgcactagcagcttgttttgtatatttttatgatagacaagacctaaaatttaatcttatttatgctgctacagctgaagaagaaatatctggaaataatggaattgaaatagttttaccagaattaggtaaaattcattttggtatagtaggtgaacctactaaaatgaatatagcaattgcagaaaaaggattatttgtaattgattgtattgcgcatggaaaatcaggacatgccgcaagagatgaaggagaaaatgctatttataaagcattgaaagatattcaatggtttcaaacatttcaatttccaaaacaatcagaaatgttaggtaaagtaaaaatgtctgtaactgttattaatgcaggccttcaacacaatgtagttcctgaaacttgtctgtttacagtagatgttagaacaacagatgaatatacgaatgaagaagcattaactataataaaacaacatgtaacctctgaagttattccacgttctacacgtttaaatccttcttttgtttccaaagaacacccaatggttcaaacaggtattatgttaggtagaaaagtttatgcttcaccaacaacttctgatcaagcacttatgaatggttttcctacatttaaaatggggcccggtgattcagcaagatcccatacagctaatgaatatatttacatagaagaaataaataaagggattgaaatttatatagcgatgcttgaagaatacaataaagctaatcatgaaattgttatgaattaatactttatttataaataagtattaaaaaaataaaataactacaaaaaatgtagaactatcagaaataaaaatagttatgaaactttggcagaatacagataaagatacaaaaactactattgaaaaaatggtagaacaatttacgatagggcaagatactgtgtgggatttatatttagcagaagcagatataaaaggttctatagcacatacctctatgttacataaaataggattgttaaataatacagagttaaaagaagctcatgatggattagaagaaattttaaaaacggtacataataaaacttttcttatagaagacggaatagaagatgtacattcacaagtagagttattattaacaaaaatgaaaggagaagtagggaaaaaaatccatgctggacgctccagaaatgaccaatcattattagatattaaaatctttataaaatcagagataaaatgtattgttcaaaaaatagaaactgtatttaacagtttaattgatttaagtgagaaacataaaaatgatttattaccaggatatactcattttcagttagcaatgccttcttcatttgggttatggtttggagcttatgctgaaagcctatcagatgatttagaactgattcttgccgcatattatatggcaaataaaaatccattaggttcaggagctggttatggatcttcatttcctttaaaccgatcctttacaacctcattacttgattttgaaaccatgaattataatgtcgtttatgcacaaatgacaagaggaaagattgaaaaagttaccgctactgctttatcaagtatagcatcaacactgacaaaattttctatggatgtatgtttatatatgaatcaaaactttgggtttatttcttttcctaaagaattaactacaggaagtagtattatgccccataaaaaaaatccagatatttttgaattaatcagagcaaaatgtaatagaattcaagcattacctaatgaattaactttgttaactaataatttaccttccggttatcatagagatatgcagttaacgaaagagtgtttatttccagctattataaatttaaaagaatgtttagacatgcttcagttaatgttagaaaatatgagtattaaaaaagatattttatcagatgaaaaatatttaaacctatttactgttgaagcagttaatgaattagttttatccggaattccatttagagaagcctataaaattgtttcaaaacaagttgaagagaatgtgtttattcacaatagaaaaatacttaaacatactcatgaagggagtatcggtaatttacaaaatgatatgataaaaaaagaatttatcagaaatagaaaaaaaataatttaatcttctttcaaataataagctgtttcattttttaccatactcatcactatgttgctatgatattgacctatattagggatattagctaatttatttgtaacaaaattattataagcatcaatatcagtggttgctatttttaacatataatcgtaaatgcctgaaagactcgtcacttcaagaatttcaggcattttcattacctcttcctcgaatttttttagattctcgcgagattgtttttttagagtaatattgcaataagcaaaaagctttatacctacttttgaaggattaagtataacggcacttttttttataattccagattcttcaagatgcttaattctctcataggtaggagtataagaaagtccaaccatagccgcaacatctttcacagaaagtgtacaatcttgttgtaaaatattcagaatttttgcgtctattttatccataaaaaggaagtacaatattatttactcttttgtttcttcttcttttttcgtagcagtttcttctcccttagaagcttttttgaattcattcaaaccacttcctaaacctttcattaattcaggaatttttttaccgccaaataataataacaaagctgcaattattaatataatttcagttggacctaatcttcccatattcttaaaaattgtgcaaaaattgcatttaaattattatgcaaagataataaagaaaaaactcaaatgtaatttttaacgaattattattcatatactaaactacaagtctatatttcctatatttgtgatacgtataaattgagtttatggcgatactaaaaaaattcaaccgcaaagaatttcttgataaaattataacaaaaagacgtttaattatcttaaatgaagatacttttgaagaacaattttctcttcaattaactattttaaatgtttttttattactaactattggagctatttttttaatttcaatcaccacctatattattgcctttaccactttaagagaatatataccaggatattcatctactgaattaaaagaaaaagcacttctattaggtttaaaatcagattcattagattttgaaataaaaaagaatgatgcgtacatccaatcagtgaaaaaagtattaacaggcgatttagaatacgctaaagtaaataaagattctattttagcttcagattatgtggatccttctgagtatgatatgcaagtctctcaagaagaaaaagaattacgcaaacaagtagaagcagcagcaaaaaaagatagtaaataatgtctattaaaagtataggagcgagaatctttgcttccattattcatcgtaaaacccaaaaatgggttcagaatcccattgcaacgcaacaaaaagtatttaaacagttactagcacaagctaaagatactcaatttggtaaagatcattattttgataaaatttctaattatcaagaatttgccatacaagttccaatacgtgattatgaagctttacgcccttatataaatcaagtaataaatgggaaagctaatgttttatggaaagggaaaccattgtattttgctaaaacatctggaactacttcaggtgctaaatatattccattaactaaagaatcaatgccatttcatattcaagccgctcgaaatgctatcttgagttatatacacgaaacaggtaaagctcattttgttaatggaaaaatgatttttttacaaggaagtcctattttagaagaaaaaaatggaataaaactaggaagactttctggaattgtagctcattttgtacctcaatatttgcagaaaaatcgtatgccttcttgggaaactaattgcatagaagattgggaaatgaaagtaaatacagttgtagaagaaaccattaatgaaaatatgaccgttatatcaggaattccttcttgggtacaaatgtattttgaaaaactttctcaaaaagctaaaaaaccagttggtaatatttttaaaaattttaacctatttatttatggaggtgtaaattatgaaccttatagagcaaaatttgaaaacttaataggtcgtaaagtagattctatagaattatttccagcttcagaaggattttttgcttatcaagattcacaaaaagaaaaaggaatgttattgcttttaaattcaggaattttttatgagtttattaaagcagacgattttttcaaccctaacccacgtcgttacacaattggagaagtagagcttaatataaattacgttttaattatatctactaatgctggattatgggcatacaatattggtgatacagtacaatttacttccttaaacccatatagaataatagttacaggaagaattaaacattatatttcagcttttggagaacatgttataggaaaagaagttgaaactgctttagaagaagccatgaaagactcaactattactataaatgaatttacagtagcacctcaaattaatccaacagaaggattaccttatcatgaatggtttattgagtttgaaaatgagcctttagatatcgaaaattttgctctaaaaattgatcaagctatgcgtaaacaaaatgtttactatgatgatttgattacaggtaatgtattaaaaaaccttgttattactaaggttgtaaaaaatggttttcaagattatatgaagtcaataggaaagttaggagggcaaaataaactaccgcgtttaagtaatgatcgtaagattgctgatttttttaaataaaaaagcctcctgattataggcaagaggcaacctaaatgttttcacaacggaataatccttattgtgaattgctttcaaattttgttatacgaatatacattttttcgatcttaaaaaatagttttagtttattttttataataatattgttataaataaataaactaatgaggaaatttaacttaggattagatataggcaccaattctattggttgggctctagtaaataaagactacgaaaataaaaaaggcaaaattatagcagcagggagtaggatcattcctatgccccaagatattttagataaatttggttcaggagttattactgaaacacaaacagcactacgtacagattatcgtagtaaacgtaaattaatacaaagattcttattaagaagagaacgtttacatagagttttaaatgtacttgattttttacctaaacattatgctcaaagtattgattttcaaaagcactttggtaaatttctacctaatacagaacctaagttagcaaataataaaaatcaatttttatttgaaaattcttttcttcaaatgctaaaagaatttcaagaaaaacatcctgaattatatactgataataaaaaaattccatacgattggactatttattatttaagaaaaaaagccttaaatcaaaaaatagaaaaacaagaattagcttggttattacttcaatttaatcaaaaaagaggatataatcaattaagagatgaagaagaacaaaatatacctaataaaaaagtagaatattattctttacaagttatagaagttataccagatgaagctaaagaaggaaatgataaaatatggtacagtattaatttagaaaacggttggacttatagacgagaaagtaaaatacctttatttaactggaaaggaaaagtaaaagattttattgtaactactgatttaaatcaagatggctctataaaaaaagacagagaaggaaaagaaaaaagaagttttagagctcctagtgaaggagattggactctacttaaaaagaaaactgaaaatgaaattcaagcatcagggaaaacccttggagtttatatttatgatgccttacttaataatccaaatcttaaaataaaaggagcttttataagaaccattgatagaagtttttataaagaagaacttcaacagattattactaaacaaaaagaatatcacaaagaacttaataattctaaactatataaggcttgtatagaagaactatatcctaaaaatgaaatatataaaagtatacttaaaaataaagacattgcccacttatttattaatgatattttatactatcaacgccctctaaaaacgcaaaaatataacatagggaaatgtacttatgaaagtagaatatttaaaaaagaaggtaaaaaaattgcagaatttattccagcagtttctaaatctcatccattatttcaagaatttcggttatggcaatggataaaaaatcttaagatatatgaaaaattatctagtgataattgtactgatctttttcttactaatgagaaagattttgaagatctttttgaattcttatggaataaaaaagaaattgatcataaaggaattttagaatatttaataagaacaaaatttccggatttaaaaccaaaacaaattaaaatcaagataaaagaatatcgttggaattatgtatatgatcatgaaaaagatgaatcaaaaagctatccctgtggagaaacttattttttgataaaaagtaaactagataggattaataatattgaaagtaatttcttaagcaaagaaaaactttataatctctggcatattatttattcagtaacagacaaaaaacaatatgaaaaagctttaataaaatttgctctaaaaaataatattgatagtaagctttttgttaatagttttaaaagaattcccccttttaaaaatgattacgctatttattctttaaaagcaatcaataaattattaccattaatgagagtaggcaagtactggaattatgatactattgatacagctacaaaacaaaaaattcaatctataattaatggggaagaagataataccatttctactttagttagagaaaaaacaattcatttttcaaaagaaagtgattttaaaaacttacccctttggttagcgggatatatagtatataatactcataatgaaagtactgaaattgaaaaatggcagtcccctcaagatatagatacttttctaaaaaactttaagcaacatgctttaagaaaccctattgtagaacaagtaataacagaaacccttcgagtagtaagagatatatggttaaaaaaaggaggaggagaaaaagatttttttaatgaaatacatattgaattaggaaaagacttaaaaaatcctattgataaacgtagaaaattatcaagtactaatataaaaaacgaatcaacaaataccagaataaaagcacttcttacagagttatttaatcaaggaattgaaaatatcagacctaacgctcttaagcatcaagaaattcttaaaatatttgaagaaagtgttttaaattcaggaatagacatagatgaagatatacttaaaattagtaatatagcccaacctactaaaaagcaactacaatattatgtacactggctagaagaaaaatataaatcaccttatacaggtcaaatcattcctttaagtaaactatttacctctgactatgaagtagaacatattatacctagaagtaaatattatgatgatagcttatcaaataaagtaatatgcgaaacagaaataaatagattaaaaaataatcaattaggatatgaatttattaacaatcatgaaataagagaaattactttacaagaaggtaaaacaataagattattaagtccagaacaatatttaaattttgttaatacctattatgcaaaaaataaagccaaaagaaaaactcttttactagaagagcttcctatagaaatggtggaaagacaactaaatgacacacgttacataagtaagtatgttatgcaattattgtctaaaatagtaagaaaacaagatggtacagataatggtttaaactcaataaatgtactatctgtttcaggaaaaatgatcagagctcttaaaaatgattgggaacttaatgatatttggaacgatttattacttcatcgttttgacagattaaacagtataacaaatactaacttatttaccacttatagtgaacaaaagcaaaaaatgattcctattgtacctgatcaatatgcaaaaggatttcataaaaaaaagttagatcatcgtcatcatgcactagatgcaatcataatagcttgtataactcgtaatcatattaattatatgaacaatcagaatatacaaggtggaaaaaataaaaagattaaaatagataaacaatgttaccgcgaaatatttcaaaaatcacgtcttgagataagagcacagttgtgtcaaaaaaaatacaatgatcatgatcaaactaattataattgggtttttataaaaccttggaaagattttacaaaagaaactaaagaagttttagaatctattattccttcctttaaacaaaatttaaggattataaacaaaacagtaaattattacgaaaagtataatgaaaatggaaaaaaagtaaaaataagacagaccaaaggagataactgggcaattcgcaaaccattacataaagaaaccatttcaggaaaagtatatttgtcctataaaataccagcaaaaggaaaaattttaacagcaactcgtaaatttttagataccactgtagatttaaaatctattgaaaaaattacagatacaggaattcaaaaaatacttaaaaactatttagaatataaaggaactcctgagttagctttttcaccagaagggatagaagaattaaacactactatcgaacaatataatgatggttttgctcataaacccatttataaaatacgtatttatgaagaaggagtaaaatttcctttaggaactaaaggaaataaaaaaaataaatatgtagaagcagaaaaaggaactaatctgttttttgctatttataaagatcaagaaaataatcgctattttgaaacaattccctttaatgacgttttagaaactttaaaacaaggattgccagcagtttccgaaaaaaatcaaatgggtaatactctagtttttgctttatctcctcaagatttagtatttgttcctacattagaagaagtagaaaatcctgatcttgttgattttaaaaatctaacaaaacaacaaactaataggatttataaaatggtaagctcttctggaaagcaatgcttttttattaaagcagaagtagcaacatctattattaataaaatggaattcacaacctctaataaaatggaaaattccatagaaggaatccaaattaaatctaactgttggaaacttaaattagatagattaggtaccataacaagagtaactaaataaagccctcacattttatctatattgtttaacctctgtaaaagtaaaggaaaggacaaacatttttttgtttgtcctagccgttaatataaaaactttagttttataattaaaaatttattaaaaaaaacatacgaaccatatttattatcaattataaaccctttgtttctgttatgtttattatattaaatatttcataaaaagatgaaataaagtttagacaatagtgttttttgataaaatagagtaatcgtaaaaaagaatattaacaaaaaaatggtcaatcaagttcttatccaaaaaataaaaaacttcattaaccaatttaattgtacttttttaaaaaacatcaaaagtattttgattttcaatttcctctcttaacagagattataattcattatgaaaatatcaagatttgaaagcaattcacaacaaataaaaaaactgattaaaagggtttcgagttgtgatatatcacaaaggtacaaaaatttgaaagcaatttacaactgtaatatctgttaaaaaaatcataataacacatgtaatttcctacaaaaataagaaaaaacaataaaaaagcaaaataaaaaaacctaacaaggttgtcttttcttattgttagtttatcctcttcctaaaaaaacattatctaaaaagctaaaaaaacaataaaaccttaatattgataagaattaataaattatgttggtaaatatttaattattatgaaaatgttagaaaataaaataaataaaaaataataaaacacaaggtgtaattaaggtctaattttttatatttgaaactatgaataacaattggtccagatacaaagttaaaaaaggtgatacgctagaatcaatagcaaaagaaataggtattagccatcaagcacttagacgccatcataatacctattgtaaaaaaaaatacctaatagagtataatcatttaaaagggatagaagaaatactactaccctccattgaagagcttgaaaagcttctagaatttgaaaaaaaaacagagcctcttagtaatttacctttgtattacctacctaaaaatttttacaaaaaacaatatgatgtagaagaaacaattcaagaaattacatcacacacctttacaatacattccagtattgatatagaaataatagacaataaaaacggctatatagtgtcctttagaaaaaaagaccatgagttatcagaagataaaatcactctactatcattagcctgtataaaaacaatttatccaatagaatttaccatacgaccacaagggcaaataatagatataaataatcattcagcaataatagctagattcaaaaaaagtaaatcagcactattagattattatacaggagaaataaatcaagaatatattaataaattcgagaggaatttaatagacaaaaaaacacttctaaaaagttactgttcaacattattatatcaaattttatttcctaatatgagttggtttagtcaagaagataaaaaagattatttctactttcatcccaattcctataatgtagaatgtaattttagcactcaatatgattttgaaaattcagactatataaaaacgacaatcaaatcaaattatatagaaggaaatagctttcaagaaatattacgaagaaaagttattgaataccctaacgaaacaagacaaactcaagaagaaaccccatcagattggatagcagaaatagaactaacgtattacacttccaaacaaaacaaagaactgataaaagcacaaggtcaagtaatactatcaaataatgaagtagtctatatgaaacatacattaaatctaggctaacaaaaactaaaaacactgaaaaaactaaactaaataaagtctgtatatgaaaaaatatatagtacaaaaaggagataccttttcatccgttgcagaaaaatttggagtaaaagatggagaccaccttcgagcatatcataacctatattgtcgcctagatgatttattaggacctcaagttattgaaggaaaagaactactcataccaaacgagcctccttatatgaaacaacaagagagttcagaaattagatctaatactactgatatggtttcagttagccaagttgaagaaacgctaaagaaagaatcagagaaaaaaacggcagagagcagtaatcaaacatcaacttccagtccacacgaaggaaaacattttgtagtacaaaaaggccaatgtcaatgtaatcaaggctttcaatttccatcatttaaagttacaagccaaacaaaacactattggaacgattcagaaggctcatcagattatctagctgtaacagaagaagaccttcaattagatccaccagcacaaccttttggtcaatgcaaactaaaacctacctcaggaggatatttaccttgttctttttcagcagctggtaaatggactaaaacctatgataaagtaaagattttagataaaaagtgtgtaactgaactttcagaactaatgtgtagtacaggaggtaaaattaccatttttaaacatggtcaagaaagtcaaaccagtaaagaagatgttgcaaaagccaatccaagtcaacaacatctgtacaatcctattataaattttgaagaatatcaagaagaaaccacaaacaatagtaacgaagcttggtaataaaaaaatagatttattatgaaaaaaggagtttcagtaatgtctggaaacgtatctcccatagtaggtgaaaaatatacctatcatatagaagaatggtatccagctacccctacatccgaaagacaagcagaaaaagtcacttgggaactgttcaagaaaagaagtaatggacaatttaccactactcatataaagaaaaaaggcgatagtagttttacctttggtgaagcctcaataggagaaacctatcgtttagaaggatacctacatcaacccgaaggaggaggattaataataaaaccaaaagggaatagaacccctaaaataggaaaaatagacttacactacgtagatgataacaaaggtaatatttttagttttacggaaaaactacgagcaaaagcccattgtatcaatatgttgaataaagaagtaatatttaccctatgggaagacgatgctaaaggatcagggcataaagattcaaacaaaataatagataccaaaaaatcaagagtaaacaaatatggagaagcagtagctgaatttacccttacacaagcattaataaaaaaagccttggaaggggagtcagatataaaagaactagaattttatgtaacagtagaatattataagaaaaagaaacatgccagtgaaaacctagaaataaaaaatccacattccacaccaagagaaacaacatcaagttctagtacacatcaaataaaaaaagccaaaggctcaccagcagaacaaaaaccagcgagtaaaaaagaagaaaaaggattattaagtagtctttcagatggttttagcgaaatgtgggattgggcagagagcttcggaaaagctaaaagagataagccccataccgttcaaatttcaaaagaaaaaagtccagtattagtaggaatcgatcagatagtcagagaaaagttcaaaccagtaataggaaatggtgaagaagcagtaatatatataaccagtgaaattgctgctgaaatagaaattgataaaaatggaaaagtaatttcttatcctgattatggggcatataatggtaaagaagaatttaaaaaggataataaaatttattctaaaaaaataaaagtaggaaaagagataaaaagcgctttcccaactttcaaagcgtacatatataggggcaatactgtaggtgaagcagtacgtaaattaaaacaagacttgaaatttaatactcacgaaaatgctgagtcaactattttagaagtagcaagacattcgcttggtaataataaaaattatggtgataaaggtccaattccaccaaatagtataaaaaatttatatagactaagatataaaaaagctactaacaaaagtggaaaaaatagctatcgatacagaatcgtagacgaaaatttatcaaattttcccaatgttaaagattataaaaaagaatatgattcaggatctatgattttgggaaaacgcggatcaatatctatagatccatggaaatcatcaggtttagtcggatgcgtaggaatcagaggtaaaaatggtgaaaatcatctaagtaccaaagaaacatattcaaatcaagacaaagaaaattacaagtatatctatcattctttaaataattatcttgaaagtataattcctgaattaacagggatttatggtagaagaggtttttccacaagtgaaggaatagtaaaagtttctgcctcatcttatgatcatgagataaaagtatatgtacttgtagattcactaccagacttatgtacatgtgaatctttaaggtcgcctgtaaaagagagagaagatttttataattcatttggtactaagacaataaattatattgagcaagaatcaaaaaaaagcaataaatttaaaggactatatatgacagctcaaagaagggcagaaaatggatttgcaaaagtgataaatggaaataatcctatgaacatcaaaggaaatggagatctaggacagatagcttatgatacacatgagagtggaatattagttaaaggagaaaaatttgcaaatttctcatcagaagatactggttttaaaggatatctgagtttattaaaaaataattataattatgcgtatcaaactttttttgatgattcaaaaacaatagatgatttcgttactggtcttgaagataaaggaaaactaggcccttatgcaacaggtgataagaaaggtaaagaaggaacagataggtataaaaataatataaaagatatttttgagtcagttaaaaatgattatttaaaaatgtataaatgtaaattatgcaaggttaaaaatgatgaagaaaagaaaaatctacaggatgatattaatttattagaaaaacttaactaaaaatgacaaaaaaaatatttaaactattaatagtaattattattttttcgtgtaaagataaagaagtatcaaatgaaaataataaaacacaaagaactactaattctgtaaaagtaaatgactctaataaaacagaagatattgaggatatgacaaatcaaaaaataaaaagcattcaattttctgatctatttaatgaaggtataataattaatttttctcctaaagatttggaaaatccaagtaatgaagaagaaatacaattcaaagaaaaactcataaaatttgaaaaagaaaattcaaaaaaagaaaactttaagaatgataatttattgaatttaataaataatgaaacttttgaaaattgtgaatattatattaatagtgattggcttaactattttattgaaaaatattcaataagtaataaattaaaagaagttatgattgcagcaattaatcaagaagattataacgcagtaaaaataattttaaaaactggttatattatttcaattgatgaagttaaattatctgatgaaattttatcaaatactttaataaatatagagatcaataaaaacagaaaaggtctagatgaaaatggtgaaccaatattttatcgtgattcaaaatcaaaatcaaaacaaattaatgaactgcttaataaaaaatataattattatatatttgataaagatggtcattgtaatttgagagatgatgagtttttaaattcttatataaaaggacaaatcaaatcaggcgaacatatagatatttttaataacgaaaatcaagaatggctctatataaaatcaaaaagaaataaagaagaaggatatgtacacaaatcaagaataatttcaaaatgaaaaacactttaaactattctattaggattgaatatatgaaaataattttaatagatattggaatgttctactaataacaaggaggctgttctaaaagtaaaaaatcaacacacagtttatcactccgacgtaaggagtagtctcataatcaatactatgtgatttctccttttggtcgcaatgaccaatgacaaaatttagcttttatctttctctttcttctgttgaaaataaatttacaaaatcttctaatcactaacttatacaaacataggatgacaagattacggactttttggatagcctcattttatagatcaaatatgttagaatatagataacactacaaaaaaactgtgtaaataaaacaagctgctagaggttttagaatatttcatgaataaaaaaacataaaattcttatagtataaaattttaggaatttataggctagaaaagctaaagagtaatactaatagaataaattgtaatttgaattataaaaagataaaagagaacattagtcaatttatatataatgtctatagaaattaataaaaatatttagttagtctatagatgatcgaattttagggggaaaggattgttacaactaacaggtagatctgcgtatgaatatgcaaatacttatactaagaaagaaggagctgatataatttataattctgatttagtggtaagtaatgtttctattgctgttttgtcttcgatggcattttggaagtggaaaagtttaaatacttcatcaaacttaactaaagatgttataaataaaatttgccctaggattggattaaacacaggtattaaaaacgaaaatggaaaagattcaacaaattatattgaaaagaaaaaaatatttgacggattaacttcagaagtttttaaaattgatgaatgtaggttaggaaaagttaatgataataaaaatatctttgaaacttatgataaaaaatacaaagcaaatggaaatacttgttatataaatgttatagttccaactgatagacgtaaagaaggattattcgtattttttaatgatgatggtgtaattcaaaaaggatacgcattagctatgggaactaaaaacaatgctattttaattccagaaggtaaagggagtactcctactggattatggacatcatggtatgaaaaagtgcatacgggagaagctagttatggagattatggacttataaaaataaaagggattgatggtgatgctttaaaagctactaataaagggagagcaggtattgcaatacactgtggtcatactgttggtaatgaaaaaaaagagtataatgacaaaggagcattaatggtaacctatggttgtatcagagtttataactctgatatgaaagaattagtaaaaaattataaaattcaaaattcaaaaaaaatatatgtatatctagaagaaactctagatatagaaagtgcatataagaagtatggaatggatccagacgctaaggactatcaaagggtgtattctagaaatgctagacaataatattaaaaataaaagtttatgagaaaaacaatttttagaagtctaatttttgcattatttatagctagttgtaaagacaataataatataaatgaaaataaaatcgagatggattctaatagtataacaaaaaaatatgaggataatctttataaaacttatgaacccttaatgattaaatatcttaaagatgaaggttttaaatttttagatgatgcaaaatttaaagaaagaattcaagagttattaggaattgatatagacaaatcagaatatgatgatgtagaaccaagattagaaggagcagacttaaatattcataatatttattctattatgaggaaagataattttattgatttttatattttagatagaggtgaaattgatggtgctggagatcctctaaaatcattattgactgatgatagaaataaagatgataattttattatttataacaaacttctattgaatgatgataattctgcattaaattatgttttaaatgataagagttcattagaagatatatatgtttattttaattatgaaaaaaacgaagtgattagggaaaaacttatttctacattaactaacgttgatgactatccaattgaatttaaaaattcattaatatggtataataatataaaaagacaggataacattagaaagaatacacttatagcaataggcaataaaaatcctgattttttatttgatttaactaattatttaattacaaatcgcaaaataattaaaaaaccttttaatactttcgttgataagactattgcttgtttaataagtatacaattaaatctaggtagtaaagataaattaacaaataaaggctatatgcttttaaataatatgtttttaagtgattcttcaatgaaggaagtattcaaaaaaggatattattataattatgataatttaaaagaagcaattaaatattttgagacatcatctcaagaaaatataggagaagatttatatgttattaatgataaagatggttatacaaatttaagaaaaggtaaaagttcgagttcagagattattggtaaaattaatacaggaacagaaatttttattttagatgaaaatgataaagattggtggttaattgaaactacaataggagaacaaggttatatacacaaatctagaattgtaaagaaaaaataaaaacggcttttgccgtttttattttatagatcaaatatgttagaatatagataacactacaaaaaaactgtgtaaataaaacaagctgctagaggttttataatatttcatgaataaaaaaacataaaattcttatagtataaaattttaggaatttataggttagaaaagctaaagagtaatactaatagaataaattgtaatttgaattataaaaaagatgaattattaatatataggaacttcaaaattgtatttaataattttaatattctaaaattaataaaaaaagaacaaaaatttatcttgatttggaataagtatattttataaataacacattaaaaaatcatttttataatgttacgactaagataattgtacttttatccctaaaaagaatcaaatctatcagtaaattattgatacaataaattaatttatgaataaaatttttaagctcttcttcctaattggaactatagctactgctcaaataaaaggaaaagtagtagatgttaataatcatcctattccttatgtaaatattggagtacaaaatgaaaaaataggagcaactacggatgaagacggaagtttttatttacctataaaagaagaaaaaatgattgttttttcagctttaggttatgaaaaaaagatattatcatcttctgctattcaaacagtacaaatgatttcaaccacttatcaacttaatgaagtagttatcattaataaaaaagaaactagaacttttgaattatccatggcaaatggtattgctcaagcatttgaaaatggacctaaaatagacgctatttattttccttatgattctaaggtgaagaaaaatagatacttaaaaaaaattggattgtttacagaaagtaatatcgaaaccgctagtgtgaagatacatttttatacagtaaaaccagatggattacctggtgaagaattattgactaaagatttagttgttcaagttaaacaaggaagtcgtaagtcttattttgatatttctgatcgtaatttagtatttccaaaagaaggtctatttgttgctgtagaacgtttgctaatagaaaaaaataaatggattaaaaataccacagctattgatggtagcttaaaaacacaaactatttattttcccttacttttttataatttcgtagaaaaagattttacttatacttattacggaggaacttggtataaagaatttaaaaaaataatagatccaacttcaaaaagtcgagtttttgaacccgcaatcagcctaatattgacaaattaaaaa

SEQ ID NO: 1200 - DNA, 24383 bp, synthetic construct
  misc_feature 1..24383: note = Synthetic
  source 1..24383: mol_type = other DNA
gaacgaagccaactcaagaaagtccctcgtttaggagataaagcgttccaacaagcagccgcttttatccgaattaaagacgggaaaaacccattagataattcggcggtacacccagaatcgtataaaatggttgaaaaaatggccaaagatttaggaatcaaagtagccgaattaattggaaacaaagaaaagatagacaaaataaaaccagaaaattatatctctgaaagcgttggtattttaggtatcaaagatattttaaaggaattagtaaaaccaggactagacccacgcaaagcggcaaaagtttttgaatttgacccgaatgtaaaaaccattgccgatgttcgcagcggaatgattctgcctggtatagtgaataacatcacggcatttggttgctttgttgacattggaattaaagaaagcggactcgtacatatttcccaactcaaagaaggctatgtaagtgatgtaaacgaagtagtaaaattacatcaacacgtacaagtaaaagtcgttgaggtggatgaagctaggaaaagaatccagttaacgatgattttgtaaaacattaaaaaaaatcccaaattccatagtcatactgagcttgtcgaagtgtcttggaatttgggattttaattattaggatttttaaagtttattgtttaataaactttttagttatttcttctttatccgttttgattttaattatatacaatcctgctggtaattcatgaacatttatagttgtatttatatcttcatgtatgatcttaccttctaaatttagtatttggatagaagagataaaatagttattatctaaactaatgtttaaaatatcattagttggatttggaaaaatagaagcatgggtacgacttatttcaaaagtattattttcggcttctttggcaacagtaattttaggtaaactagagttattatataaacttattaagtaagcggtatccgtagagttgttatagttattgaaatgacctgagactaaaatttttccgttacgaagaggagtaatagataagacagaattattaaaaccattttctgtaatgaatgtactgtctttagttccattaggatttaaacggataatataattttcttgattttcgttaaaactcgtaaaagaccctccaacaataatttttccatctgtttgtattagcatagtagaaggtgaactgttaaaaccagttccaatgttaaatgttgtgtctcgagtaccatttgtatttaatctcacgaaataatttgcagaggaattgttaaaattggagaagtaaccactaattaaaattttatcatcagcttgtaaagtaatattgtttacagcagcatcaaagccagtaccagtattaaataacgtatctttaaccccatctgcttttaatcgaattatatttttttcagtttcaccattatatgaattaaattcacctccaacaattaaatttccattcgtttctaaagccattgttaatacatctgtatcaaaaccagtacctgtgttaaatgtagtatcaatactaccattggaatttagtttaataattcggttagcagtaacttcattatattgtgtaaattcacctcctacaaatatttttccatcaggttgtaaaagaatagtattaatatttccatcaaatccagttcctgtattaaacgttatatccttagttccattagagtttaaacgaataatatgattttctgtaactcctttgtaagtactaaaagagcctgcaacaattaattttccatctggttgaactacaattactgatacatttttatcaaatccatttcctatattgaaagatgtgtctttagatccattaggatttagacggataatatagtttgataaattgtttttataacgtgtaaaatgaccacccaaaactatttttcgatccttttgttctactgcggctagtacggtcttgtcaaaacctatattagggttaaagtttaaatcaaatgttccatttgtatttattgaaactatattattagctgaatatccttgattataaatagagaaatatcctccagctataatttttccacatggaagaagtgaaagacaaataaggcttcttttacaactccccgtgctaaaattgttgtcttttttcccatcaggatttaaacgaattatatttgtttctatggggccaacatgtacataaggttttcctattacagctattacaatttttccatcattttgaattgctaatgatcgtatagcaccatcaaacactacatctgtattaaaagtcgcatcttttgatccatcattagttaatcgaattaaatatttttgagaaacaccattaaaatttttaaaattgcctccaacaataattttcccatcggtttgtatagcaatagagttaattgtactatcaaaaccactaccattatgaaaactattatcttttgtaccatttgtattgatacgtataaaattatttacgttctgacctttgtatgttgaaaataaacctgtaactaaaatttttccatcagcttgaagtgccatatcagtcactaaattattaaatcccgtatctgttataaatgaagtatcgctagaaccattaccatttaacctagctattttattttgaatggatccattataattgttaaaattgcctccaacaataattttcccattgggttgtacaagtactttagttacactagcatcaaatccagttccaattataaaactattatctttagttccattactatttagtcgtataattttattttggcttgctccattataagtggtaaaatgtccgcctataagtatttttcgatcaggttgtacagcaatacaagttatatcatcgttaagaagtattgttgtagaaaaagacttgtctatcgtaccattaccatttaatcgtactatttttttgactggttgtccagcatatttatgaaaagtacccgctacaagcatttttccatcaggttgtacagtaatagtacttactgtaccatcaaatccatttgttgaaccaaatttttgtgcaatttgtccaggattttgcgcattaccaataagtgtaaagaacattaaaagatataaatgtgttttcataagttgtatttaaatttctaaattagataaataagcctataaaaacaagtaaaatataaatatctgtaaataaggtaaataatataaaaattaagcgttttaattgatgaatataaaatctttatttctgattttggatgagacttttggatgaggataaaaggaataaagaatacaaaatataaagaaattggttcttcagttttggctttatttaataaagagacacagtactaaaaaaaagaatgcttttttgtatgacaaataatttcgtgtaaataaaaaaatcgctcctaagaacgatttttttatttatttaaatttctgatttttttaagtaatttcttctaaatattttatagaaaataatatttaaggctaggtagacgaatagtatagagaatgttatcaatatattttgttcttgataaggcatatttaaaattcctacaaaaagtactatgtttaaaaaaataacttgtaaataacttttactaaaaggtagtatattatattttgtatacacatagtatgttttaaaaatattatataaaacaatagaagtagtagaactgatagcaacacctaacagacctaattgtgtaaattttaaaaagtaaataaccatagttaaatttagtaataacaaaatagctacaataaataaattaaatttaaagtatttagaataagcaataatttcgctattaaaacctgtagctacattactaaaagcgcctaagcataaaatccaaacaatagtttctatatttaaaaactgattttgtggatctaaggtattttttatataaggtaaacttataagaataacacctataaatattaaagaatagaaggaagcatgataagtagaacttttatataatttacttagtaaataaattttcttttttaaaagtaatttcgaaatggcaacaccataaatagcatttatacctgtagtatgcataaaaatgatggaggttaatgttgttaaaatagaatataaaccattttcactcatcgataagtagctgggaactataatactatcaattctgtttatcaatagcaacgcaaaagaacctaaaaagctaaaaaaacaatattcaaaaaattctcttatactcaccttctcaaataagaaatagtatttgagagaaaaattagtattactttctttggttacataaaagtgcataatgaacgttaatacagcataacaaataacataaaataaaagaagttcattatttggaattacctttatataatttaaataaaataagacaggtaaaaataaccgaggggcaactttttctaaaattataacaaaacttacccgattatatatgatagatacacttttggttaaatctatcagggctaaaattaaacccagtataagaccaaattcataatagacggcattattaaaaggtttcagtttatttgttataataaaacctatgaaaaaaatgaaaaaaattccaattgatattaataaggaagttccatgtaatttaggaacatgaaacttctcaaaataaggtgtaaattttactaaactttgtgctaatccaaaaagaaaaaatggaaaaacaaaataaccgatagtttctacgtatttaatttcacctaatacacttagagatttaggaaataagaaaaaaccagcgattatacttaggaataagcctaaataatttgcagtagaataccagtagagttttatttttctactgttgttaaggatttttggggctaaaaaacgcatgatttacaaactaatattaaatagtttacctaaccaagttcttttttcagcacttttaatagaatcgcgtcctgttatgataaggttttgaatatattcatccatagtacgattacgttcttctaaaaagttatttaagaaagaaataccactcgattctccttttttagcttctattattttaacttcttcgtacaaaggaatgatgaatttagctaaaatagcattgttaacacctgataattttacggtaatatcaactatttcgtcatcaactatagcaggtataaagtcagcaatagcccaaatgaatttaccgttataagtaacaaactttaaaattttagtatttctttctgttattttattatcctcaattattattttttcaatagattttggaatatcaggatgaagtatagaattaaaatttttaccaatcaaatctttattttcaaaacttgaaacttcagtaaaatacgcatttacatattcaatttcattatttggtaagatttttattacaagcgtgttgcttttatcccaaggagcggcatcatctaataatttaacaggaatctctctttctactacttttgttaaaccaatatttagtttattctcagcttcatctaaaagtgttacaatttcttgagaagtactagacagatctaaatataattcttctgcaattgctttattgcctaatttatgttcaacataaatttctttagcaagtttatgaagtttaacatgttttacatcaaatctttggatttcttctaattccccaaactcgtcgcgaccttctgactcaaaccattttcctaaacgacattgtaagtgtgatacaatttcactttcagctaattctattttgtcatctaacaagtccctcattttgtgcatccaacccaaatgatctaaacgtgcttgttcaaagctaattttcatttccatatcaagtaattatttagttttttagtacaaaaataataattataaatattgtcttaaaatctttcagttagttttattataaattcattaaacaagttatttgttattaatataatcaaaaaatccttgaaaaaatcaattatataaattaatgatattttagtaatatttcagatttatagtttatttagatattaaagattgtcttaaaatgtaatttattaaaattttattcaaaataataaaacttttttaaaaaaagttaaaaataaaaatatttttacgttaattgttatgtcttgttttttattgttgattgatatagatgagtccttaatttaatataaaagtacttttattccagtagactgtatcctactctccttcttattttaagctaaatacattataaatttatattttaaaaaggactttttatagtatatcatcttttttatttctatatcttataaaaattcaatttgtgtttggtatttaaatatagaaataagaactatattcacttagctcagacaatataaaataatatgaaaacgtctgtgaaagtaggagtaactggtatttaaaaacaatcaactgaataaattattgaaaaaaatcaagaagaaaagaggagattaatttaagagaagataaagaatgaaaagttttgattatatcgaaatctagaaaaatacctaatatgtgctcagttcggatttgattatgtcatgagaattacgttaaagaagattagccgtaacaatcaaaatcaagaattttggattaattacaagtttagtggtaatgaactcaattcgaaattagggataatagtaatataaaagaagaaaatatgtttccattagttctggagttaggtatagttctttttttttaaatagatctttcataaccttgctactcaattttgaatagatgatttacaatgttttgtatgtgcagatgatgaggggggtaaaagggaaaagtaaccgctatggtattgttgctactctcacaatattttcggtacgtatatgagttagaatttcggattttagagaagtgtatgaaatcgtttcaaaacaactgaaataaaaatagttggtatacaatacaaataccttattcaaatacggaggtaataaaagatgatttacaaaataataagataaatcgaagaatttaccagaatcaaaaaaacattaataaatctcagttaaataataagaagttttgtttttgaccgtgttcatcacaatattactgctatatcgccatcatttgaagtattggttaacttgttaccacaaattattgtaagtttcaatatctgtaactgcaatttttaacatataaccacaaatacatgaaatactgattacttctagtatttcatgtattttcattcattcctccttgaaattttttaaattttctaaggattgttttttaagagttatattacaatatgtaaaaaactatatacccatttttgaaggattcagaataacagtacttttcttgataactcctgattcttgatgatttttaattcttttatagatttggagtataagaaagccctatcatagccccaccatattttactgaaagggtacaatctggctgtacaatattacttactctttagtttcttcttctttctttgttgcagtatcttctcctttagaagcttttttgaattcgttcaaaccacttcctaaacctttcattaattcaggaatttttttaccgccaaataataataacaaagctgcaattattagtataatttcagttggacctaatcttcccatattcttaaaaatttcgcaaaagttgcatttaaattaagatgcaaagataataaagaaaaaactcaaatgtaatttttaacgaattattattcatatacccaacagcaattctattttcctatatttgtgatacgtataaattgggtttatgtcgatacttaaaaaatttaaccgcaaagatttttttgataaaattattacaaaaagacgtttaattatcttaaatgaagatacttttgaagagcagttttcacttcgattgactattttgaatgtttttttattactatctattggagcaatttttttgatttcgataactacctatattattgcctttacaactttgagagaatatattccaggttattcctcaaccgaattaaaagaaaaagcactgttattggggttaaaatcagattcattagattttgagataaaaaagaataatgcttatatagaatcagttaaaaaagtattaacaggtgatctagaatatgccaaagtaaacaaagattctattttagcttctgattatgttgatccatcagaatatgacatgcaagtatctgaagaagaaaaagaattgcgaaaacaagtagaagcagcagcaaaaaaagatagtaaataatgtctataaaaagtattggagcaaaattatttgcttccttcattcatcataagacccaaaaatgggtaaataaaccaatagaaacccaacaaaaagtttttgatcaacttatccaaaaagcaaaacacacacagtttggtaaagatcaccaatttgaacaaatacaatcatttgatgattatgttcaaaaagttcctgttcgggattatgaagaattacgtccctatatagaccttgtagtcaagggacaagaagatattctttggatcggtaaacccatttactttgccaagacttctggaacaacttctggagcaaaatatattccgttaacaaaagaatcgatgccgtatcatatagaggcagcacggaatgcaattttggagtatgtatacgaaacaggaaaagcggattttgttaataaaaaaatgatttttttacaagggagtccaattctagaagaaaaaaatggaattaaattaggaagactttcaggaattgtggcgcattatgtgcctaaatatttgcaaaaaaatagaatgccttcttggaaaaccaattgtatagaagattgggaaactaaagtaaatgctatagttgaagaaacttttcaagaagatatggctattatttcaggaattccatcttgggtacaaatgtattttgaaaaactttcagaaaaagctaaaaaaccagttggagaggtttttaaaaacttcaatttatttatttatggcggagtgaattacgaaccgtaccgagcaaaatttgaaaacttaataggccgtaaagtcgatgctattgaattgtttccagcatccgaaggtttttttgcataccaagattctcaaaaagaaaaaggaatgcttttattattgaattctggaattttttatgagtttataaaagcggaggaattttttactgaaaaacctaaaagatataccattggagaagtagagcttgggataaactatgtactaattatatctaccaatgcgggactttgggcctacaatataggagatacagtacaatttacttccttaagtccgtatagagtaatagtttcaggacgtatcaaacattatatttcagcttttggagaacacgttataggcaaagaagtagaaaatgctttgcaagaagctatggaaggtacaacagtgcgagtaaatgaatttacagtagcgcctcaaattaatcccacagaagggttaccttatcatgaatggttgattgaatttgaaaataaacctcaagatttaaatgcctttgccttaaagatagacgctgccatgcgtaaacaaaatgtatattatgatgatttaattgctggtcacgtattaagaactcttctaattactgaggtaagaaaagatggctttcaagaatatatgaaatcaatcggaagattgggcggacaaaacaaactaccacgtttaagcaatgatcgtaaaatagccactttctttaaataaaaatagcctcctagttataggcaagaggcaacctaaatgttttcacaacggaataatccttattgtgaattgctttcaaattttgttatacgaatatacatttttttgatttaaaaaaatagttttagtttcttttttataataatattgttataaataaataaactaatgaataaatttaacttaggattagatataggaaccaattctataggttgggctctggtaaatgaagactatgaaaataaaagaggtaaaatactaggagcaggtagtaggattatacctatgacacaagatgttttggataaatttggttcaggaactattaccgaaacacaaacagctttacgaacagattatcgtagtaaacgaaaactaatacaacgatttttattaagaagagaacgtttgcatagagttttaaatgtacttcattttttacctaagcattatgctgaaaatattgattttgaaaaacatttaggaaaattcttaccaaatacagaacctaaattagcatacaaacaaaatcaatttatttttgaaaattcttttcatgaaatgctaaaagaattttatgaaaaatatccagatctttttttaaataataagaaaattccttacgattggactatttattatctgcgaaaaaaagcacttcatcagaaaatagaaaaagaagaattagcttggttattacttcagtttaatcaaaaaagaggctataatcaattaagagatgaagatgaagaaaatagccctaataaattagtcgaattttactccttacaagttatagaggttgtagcagatgaagttaaaggaggaaatgaaaaaatatggtatagtattaacctagaaaatggatggatttatagaagagaaagtaaaattccattatttaattggaaaggaaaaataaaagattttattgtaactactgatctgaatcaagatggttcaatcaaagaagataaagacggaaaagaaaaaagaagctttagatctcctagtgaaggtgattggactttgcttaaaaagaaaacagaaaaagaaattctagaatcaggaaaaactctaggaacttatatttatgacgcattacttaataatccagatcttaaaattaaaggcgcttttgtaagaactattgatagaagtatttataaagaagaacttttacaaattattacgaaacaaaaagagtaccatcccgaattaaataacactaaactctataaagcttgtttagaagaattatatcctaagaatgaaatatataaaaatgtattaaaaaacaaagatattgcgtacctttttattaacgatattttatattatcaacgtcctttaaaagctccaaaatataatattggaaaatgtacctatgaaagtcgtacatttaaaaaagaaggtaaaaaaattacagaatttatcccagcagttgttaaatcacatccattatttcaagaatttcggttatggcaatggatcaaaaatctcaagatatatgaaaaattatccaatgataattacactaattttttcctcaaagatgagcaagatctagaaaatctttttgatttcttgtggaataaaaaagaaattgaccataaagggctcttagaatatttaataaaaacgaaattcccagatttaaaaaccaagcaaattaaaaataaaataaaagaatatcgttggaattatgtgtacgatcatgaaaaagatgaatccaaaaactatccctgtggtgaaacctattttttaataaaaaacagattagataaaatcaataacattcaaaatgattttttaactcaaaaaagactttatcatctttggcatataatttattccgtaacagataaaaaacaatacgaaaaagccttaacaaaatttgctatcaagaataaacttgatgtaaaactttttgttaatactttcaagagaatacctccttttaaaaatgattatgccatttactctttaaaagcaataaacaaattattacccctaatgcgattgggtaagtattggagttatgacaatattgatacaattacaaagcaaaaaattcaatctattattaatggagaagtagatgacaccatttctaccttagtaagagaaaaaacaagtaatttttctaaagaagataattttaaaaatttaccaattggattagcaggacatataatatataatagtcataatgaaagtactgaaattgaaaaatggaaatcgcctcaagatatcgatatttttttaaaaaaatttaaaagacatgccttaagaaatccgattgtagaacaagtcgtaacagaaacgcttcgcgtggtaagagatatatggattaagaagggagaaggtaaaaaagatttttttaacgaaatacatatagaattaggaaaagatctaaaaaatccggttgataaacgtagaaaaatatccagtactaattccaaacatgaatccacaaatatcagaataaaggcactccttacagagttacttaatgaaggcgttgaacacgtaaaaccaaactcaaccaaacatcaagaacttttaaaaatatttgaagaaggaattttaaattcaggaattgaaatagaagaagaaattataaagatcagtcagattgcgcagccaacccaaaagcaattgcaacaatatagaatttggttagaacaacaatataaatcgccctacacaggtcagattatacctttgagtaagctatttacacctaattatgaaatagaacatattatacctagaagcaaatattatgatgatagcttgtttaataaagtaatatgtgaaacggaaattaatagattaaaaaataatcaattaggatacgagtttattagtacccatgaagtaagagagataactttagaagatggtaaaacaataagattattaagcccaaagcaatatttagagtttgttaatacacattatgcaaaaaataaaataaaaagaaaaaaccttttattggaagaacttcctatagaaatggttgaaagacagttaaatgatacacgttacgtaagtaaatatgtcatgcaattattgtctaaaatagttagaaaagaagatggaacagataacggaacaaactcaataaatatcttatccgtttcaggaaaaatgactagagcacttaaaaatgattgggatcttaacgatgtttggaatgatttactattatatcgttttgaaagattaaatactatcacaaaaacaaatttatttacgacctataacgaacaaaaagaaaaaatgactcctatagtacctgatcaatacataaagggatttcgtaaaaaaagattggatcatcgtcatcatgctctagatgctattgtcatagcttgtataactcgtcatcatattaactatatgaataaccaaaatgtacaaggggaaaaatttaaaaatataaaaatagataaagaaaactatcgtgaaatatttcaaaaaacaagattggatttaagagcacaattatgcgaaaaaaaatataataaacaagatcaaacaaaatacaattgggtctttacaaaaccttggacggattttagccaagaaactaaagatattctagagtttatgatcccatcttttaaacaaaatttgagaattataaacaaaacggtaaactactacgaaaaatataatgaaaacggaaaaaaagtaaaagtaagacaaacaaaaggagataattgggccattcgtaaaccattacataaagaaacggtttcaggaaaagtatatttgtcttacaaaacaccaacaaaaggtaaaattttaacagcaactcgtaaattcctagattctagtatagattttaaatccattgaaaaaataacagatacaggaattcaaaaaatacttaaaaagtatttagaatacaaaggaagtccagaattagccttttcacctgaaggaatagaagaattgaatactaatatagcacaatataatgatggttttgatcataaacctatttataaagtacgtatttatgaagaaggagtaaaattccctctaggaattaaaggaaataaaaaaaataaatacgtagaagctgaaaaaggaactaatttattttttgctatttataaaaatgaagaaaatgatcgttattttgaaacaatcccttttaatgacgttttagaaatgctaaagcaaggactacctgctgttcctcaaagaaatcaagaagggaatcatttagtttttgcattatctcctcaagatttagtatttgtacctacaccagatgaaatagaaaatccagatattgtagatttcaaaaatttgacaaaagaacaaacaagtagaatttataaaatggtgagttcctccggaaaacaatgtttttttattaaagcggaaatagcatcatctattgtaaataaaatggagtttactagctctaataaaatggaaaacgctattgaaggaactcaaattaaatctacatgttggaagctcaaattagatagattaggaacgattacaagagtaactaaataatatatattatttaatgatagataaaaaggattttgaataaaagaatctttatatttttctttggtaaaatgtatcaataaaattaagattcaagacctccttatttttaattttaatcccgttttaagagtttactcttaaaaacgggttttatattttttaaacccagatcccgtattagatttcgtgatgaagatgaaaagggaagaaaaaaatatacggaattttttcttgtagatctaaggggcagaaaccgtaatctaattcactttgagtttaacgcgtaatctgggttaaatatattgaaggatgccatttcaagaagtaaaaatctaaaaaaataaattatagtttcaccttcaatatttcaaaaattagtttggaaattattcttattaaagtgtagaaaagacttaagtatttactcgtgaatcggtctattaatttcgtttttattcactattaaatttttaaaaagtactactgtttgtctcttcaatctagtaaaaccaaatagacataaaaatcctgtacattctacttttctgcttcattacaaagattaacagatgatcggttttaagaaaggagaaagagtgcaaaaataagttaaaacaagcatttttattaccaaaaaaacgagttatagaagttttttattaataataagataaaaaacttcatcaaccaataactcttacaacttttaatttatttagaataaatatttaaagcatctgattgtcaattttcttttaatagagactaactcattatgaaaatatcaagatttgaaagcaattcacaacaaataaaaaaactgattaaaagggttttaagctgtgacatgtcacaaagatacaaaaatttgaaagcaatttacaactgtaatatctgttaaaaaaatcataacgtaagatgtaatttcttacaaaaataaaaaaataagttgaataaacaaatgtgtgttttaaaaaataaaacaaaatgttaataaaatattcttaaaaataatggattatatgcctgatttagactataactgtctgatatgttacaagtttagaatgaaataaaaagtaaataattataacttaaataaattatttctgtttattctaatagagcgttagttccacgtgaaaacactggtcattttttaaaatcagatttttcgataaattttgtaatgaagataaagaaggaaagaaaataaaaatacatagaaattttttcttacccattttgagattaaaaagtaataacttaatgtattattttttaattcaatcaaagaaaaagttgtactatcagtactatgtaatatgatttgacttcatctattcacttcgagttttcctttgaatgattgaaaagattccgaccttttaggacaacctaattaaagacaaaagatgagtgtttttttaaattcaaagtattttttatttgtactgaattctaacgcagaatccaagttaaattagaaaagaaataaactagatttctaatatggaatttgagtttaagatatattggttttttagccttttaaacggaagtgatatgaaatagtattcataagataattgtacttttatcattttaaaaagtcttttaaattaaattatgaaaaaaatattaatattccttttagtaacaacaacaatggctactgctcaagtaaaaggaaaggtggttaatcttgataatcaaccgattccttatgtaaatattggagtgcaaaatgaaactataggtactacatcagatgaagatgggagtttttatttgcctataaaacaagaaaaaatgattgtattttcagcattaggttatgaaaaaaaaataatatcatcttcagctattcaaacagtacaacttgtttcaactacttatgaactaaatgaagtggttgttatgaataaaaaggaaacaaagacatttgagttatcattcaataaaggaattgctcaggcatttgaaaatggaccaaaaatagaagctgtttattttccttatgaatcgaaaattaagaaaaacaggtatttaaaaaaaattggattatttacagaaagtaatatcgaaacagctactgttaaaatacatttttataaggtaacttctagtgaattaccaggtgaagagctattaacaaaagatttgattgttcaggtcaaaaaaggaagtcgaaaatcctattttgatttatcggattataatcttgtttttccaaaagaaggactatttgtagcagtagaacgtttattgatagaaaaaaataaatggattaaaaatagtatggccattgatggtacactaaaaacacaaacggtttactatcctttacttttttataattttgtagaaaaagattttatttatacatactatggaggtaagtggtataaagaatttaaaaagacaacagattttaccacaaaaaatcgagtttttgaacccgcaattagcctagtattaaccaattaaaaacatcttttaattttgtatttcagtaattctaatgatcttaagaaaacggataaatattaggaatagatttagagattataatttaaatgagtacaatttgtgggatagtgtctatatcaatttaaattataatctctctagtttttatttattcattagtaataattcatttataactatttctgttgagttgcgtttttctccatttttatcttcccaatttttataagttagtttaccttctaccattatttctttgcctttattgacaaaattttcaataatttcagcagttttcccccaagctgtaatatgatgccactgtgtatccgttaccttttctttattttcgttataatatacctcgtttgttgccaatgttagtttagctaattttcttcctccctcaaggattttaatttctggttcttgtcctacatgaccaattaattgtactttgtttcttaatgcattcatggcgtttaaaatttaatgttagtattaatctaaaaatcatttattctttcgtttattcaacattgcaaatttgtagcatttttttataatgattcggtcactcatcatttattatcggttgtaattatttgttgtcgtttacaaataattttttagtatctttatatttttaattttaaagcaataactatttgaataatagtgatttgtttgtttatttagattacaaaaatattttgtgcttattaatttaaagatgtaattcttttatcttttttgaaggtaatatgtgagttataatgtaaattgtgtataagaagttatccaaaagcttttcagatgcaaaagaatatatttaatatccttaagtttgaagaaatagcaaattaaaaaaatattagagttggattgaatagataatcacaaaatagcaatagatatgaaacaatgtttggaatgccatgaaaactttatgggtcgagaagataaaaagttttgtactgacgcatgtcgtaatgcttataacaatcgcatgaataaagattgtaccaatctaatgcgtaatattaacaataaacttcgtaaaaattatcgtgtattaactgaacttaattcagacggtaagactaaaataaaccgcacgaagttaataagtaaaggatttgattttgagtatttcacttcaatatataccactaaaacgggtaacatttattatttcttatatgatcaaggatatagagcgatcgaaaatgatttttacattttagttaaaaaagaatcttgaaaaatgattaatacaaataaaacaatttctattttaggttgtggttggttgggattacccttagcagaaagtttaaaccttaaaggattctcaataaaaggatccacaacatctttagataaattagagattttagataaattaaatgttaaaccctacttaattcaactatccgaagataaaattacaggaactatttcagaatttttagaagaatcagatattttaattattactatacctcctaagttgcgaaaggccaaccatgaaaatttcgttattaaaataaaacaccttatacctcatatagaagcggcgggtatatcaaaagtcctttttgtaagttctacttctgtatatggagatacgtctgaattggttaccataactgaaaataatgttgctattccttctacagaaggaggtaaacaattactagaagtagaacaaatattacaaaaaaatcaaaattttaaaacaactgttgtacgttttggaggtttgataggatgcgataggcaccctataaaatatttagcagggaaagaaaacttagaaaatccagaagctccagttaacttaatccatcaaaaagaagctctatccattattgaaaaaatagtaaatcgtaataattcagataaaatatggggaatgacgttaaatgctgtcgctccatttcatcctacacgaagagaatattatacaaaaaaagcaatagaaaaaaaattagaaatacccaagtttgtcaactcaaaagcacaagggaaaataataaattcaatctttttaataaatgaattatcatacaaatttaatttagatctctattaatgaaactaattcaaaaaatacaatccctaggattacctattttagctcttatatgggtttgctttttttttggaacaacttggttggcttcaaaacaaggagtaaaagtaatgcctgctttacaattagctgctatccgacagtttatagcggcctttttttatataagttatttttggtttaaaaaagttccatggcctaaagccaagcaatggagaactatttttattttgagtattttaaactttgtactgagcaacggactgagtacttggggggtaaaatatatttccagtggattaggagctgtaataggtgctatttttccattatggatcgtaattattagtttttttaatggagaaagattatcaaaattagctgtagttggcttattagtgagttttagtggtgtatgtatcgtgttttttgattatttaacggattttattaaacctgattttcaattgggtatttttctttccgttttagctacaattacttgggctataggtagtatgtatactaaaaagaaagcaaaaaattttaatccttatttcagtataggactccaaatgcttatttctagtatcttactttttgcatatacaggtgctacaggaacgtccataagcctatttcaaattccatcccaagcgtggtggtctattgcttatttagttgtgtttggttctattactacttttatagctttaatatatatattgcaacacttacctacagaagtaagtagtatttatgcttatgtaaatcctattgttgctgtaattttaggagcaattatttttaatgaaccctttactattactttattaataggtgttgttgttgttattcttggaatttatcttattaatagaggtattaaaaaaggatcataatacaacataatatatattcctaacttaaaaaaatcaatcaatatttaaatatgaagaaaacatcattacagttgttcgtgctttccctagcgattcatacaatagcacaagacaaaaaaaatgtagttgtaccgaatgaaaatttaattacagaaaacattgcccccatatccaaagaattagttcaaaaggttaaaaaatatacagaaacacgaggagccagtttatcagcaatacatcctataaaagaagaagtaattatatctactcgatttggttcaacaaatcaattacataaagtaatacaacctttaggcgctcgtaaacaaattactttttttgaagaacctattgttgcagcatcttatgagccaaccaaaggagagtatttggtttatagtcgtgatacaggaggaaatgagtttggacaattatataagttagacctaaagacaggacaatcaaatttgttgacagatggaggacgttctcaaaatggaaatataatatgggaaaaagaaggagttggattttatttttcttcaacaaaacgcaatggaggcgatcgtgatatttattatatgaatcctaatgatccttcatcaaccaaattaattttggaagtaaaaggaggagggtggaatattgcagatatttcagaagacggaaaaaagctattagtaatagaaggtatttcagctaatgaatcacatatttggatgttagatatatcaacaggtaaactgacacaagttacgaatagagaagataagggagtggtacaaacaaatgcaaatttttcaaaaattactaacgaaatttggtttacaacagatcgtgataatgaatttcgtcgtttagcaacatttaatcttgaaaataaaaaaattacatattttacgtcttctattccttgggatgtggaaagttatgatttgaatgaagataaaacaaaattagtttttatgaccaatgaaggaggggtacataagttgtatttaatggatacagcaactaagcaaattaagattatccctaatcttccaataggattaacaggaagtgtccgatttactaaagatggtcagagtattttcttttcacaatctacagcagactcttcttctgatgtgtataaactaaatttaaaaactaataaaataatacgttggacagagagtgagttaggtgaaatgcaaaaagcagatatggcaattcctaaattgattgaatggaaaagttttgatggaatgaaaatttcgggcttttattaccctgcttcaaaaaaatttactggaaaaagacccgtaatgattaatattcatggaggacccgaagggcaatctttagcatcgtttttaggagcaagtaattattatacaaatgaaatgggtatagtactaatttatcctaatgttagaggttcatcaggatttggaaaaacttatttagctaaagacaatggtttcttaagagaagactctgtacaggatattggagctttattagattggatagcacaacaaccagaattagataaagatcgtattatgattatgggaggaagttatggaggatatatgactttagcgacagcttttcactatgctgataaaattcgttgcagtgtagatgtagtaggaatctctaattttaatacatttttaaaaaatacagaagattatcgtcgtgacttacgtcgtgtagaatatggtgatgaacgagatcctaaaatgtatgatttcttagataaaatagcacctttaaataatacaaataaaattaagaaaccaatgtttatcattcaaggtacgaatgatccacgtgtacctgtaaccgaagctacccaaatgcgagataagttaaaaagtcaaggtaatgtcgtttggtatttagaagcaaaggatgaaggacatggatttcgtaaaaaatcaaatgttgactttcagcgtttagcagtaataagatatatggaagaatatttattaaaataaaaattttgataaatgccccaaaaagaatgtaactttttggggcatttattattgaataaataaagcttttaattctgtagcttcatctggtttcatttttccagctaatacaagacttaattgttttcttcttaaagcagcatcatatcgcaatttttcttcttctgtttgaggaattatctgaggcacttcaacaggtctccctgtttcgtctaccgctacaaatgtataaatagcttcgttcgctttcgttcgattacctgattcacgatcttcgatccatacatccaaaaatatctccatagaagagttaaaagctctagaaactttggcttcaatagttaccacacttcccagaggaattgaacgattaaaagcaacatgatttacagaggcagtcactgtaattcttcttgaatgtcttctagcagctatacttgcagcacgatccattcttgctaaaagttcaccaccaaataaattatttaatggattagtttcacctggtaatactaagtcagtaataacagttagagattctgaaggggatttaggttgcataatttaaaatttttgcgaagatacaatgtttttgttgtgtaaaaattaaaagagagtgtctaaaaagtagtaactagatatttcgtttgttatttctacgacaatagaagtaacattgtcacaattatgtgatttgctccacctattcactttgttcgaatctctatttcgtcgaaaatgataaaatggcaactttttagatcccttttttgtgcattataaattttttattaataaccaagcttcgggattgtctttttcctgaattgtagttagttgatgttgtgcatccgtataagtagcataactgccataaaaaacaggaaataaaccttgttcattttgtggcataatcttagcttcagaaaaccctttagtttttaattcattcaccgtacgctcagcatttgataaacttctaaaagaaccagctactaaatgaaatgctaatgttttttcttcagcatgaagaggaacaggattttctataaaaaaagtagcttcttgtaatttagtttctacttctttttgaacttccttttgtaccattaacgacttagattgttcttgttgttctagataacctaaatatccaaaagttccagctcctatacttacggttaggactgctgtatattttagaaaatttttaaaaggatttttcctttgaggaaccaacgtcaatgtagtttccgttttctcttcctcctccagtattgtaatagtttcctgaggaactattgtttttagtacctcccgcttaatagtaggggataccaatgaagtaaatccaaacgatgaggttaaataattagtatgctcaaaagcttcaaatacaatatgattttcaatattgtactttaagataccaatattttttaaaacaataaattcacgtctctgcaatttttgctcccattcttttactaaagaatccaattttgctacagctaccacataacttattccttcttgtaaggctatgtgattagctagtaaaccatcattattttttatataactattaaacgaaacgatttttttaggaggaaaaaaagtagtggtgttttcttgtaccgtagtcgttatagtttcagttagaaaagcacccaaattgggtacaattacacattgataacgatagagtaattcggatatatattgttcgatattcatctattttaaatgatattattagaggtaattcgagtgaaaactagggttcttttttaaaaaccaagttgtttgaattaaataaacgtaaactaccttcattttattgggaacaaaattaaaaattacaagccgaaataaaaattttattaacaaatgttatcaacaatttaaaaaatgtgtaacttgtagtattattatttatacgccatgttacatactgatttattttatgccttagcccttttaaatacagaaggagtaggagatataatagctaaaagattgatattaaattgtggatctgcagaagaagtctttaaagcgaaaccaacccatttagccaaaatagaaggaattggaactacattaatacaaaatttaaaaaagtcaagctcttttattaaagccgaaaaagagcaaaaatttctattaaaagaatctattaatgtgtggtattttcaggattctttatatccaacaagactaaaagaatgttatgatgctcctattttgttatttactacaggaaatatacgattagataatccaaaaattatcagtatagttggtacacgccaagtaacacctcaagggattgatttttgtaaaaactttattcaagatctagttccactaaatcccattattgtaagcggatttgcttatggggtagatatagtagcacatcaatatgctatagaatacgggttacaaacaataggtgttttagcacatggtttaaaccaaatttatcctaaatgtcataaaaaatatat

SEQ ID NO: 1201 - DNA, 24383 bp, synthetic construct
  misc_feature 1..24383: note = Synthetic
  source 1..24383: mol_type = other DNA
gctggtggtcaatccccgatactaaaaaagattgttgcaacctccccacctgctttttagagaggaagccattcaaaaatcgatgccaacgagggtgattgtcaagccattgtacaaattcctcttcagaataagggttagcccagttataaatatacaaactcaccggcagccctaaaatatacgaattaggcttttgaaaaataaaattgtttatctttgcatcatcagtaggggtaccattcacgtaaaccttgttttcgcgcagcaaataatcatcggcagccacccgtttagtagcctcacaagccgacaaatagcagagcaaaacacatagcccactgacaaacgaatatcgaaaaaacgcctttctcacaaataattgtttttagggctcaaaattacataatatatttatgcttagcaaaaatcaagtaaaattaattcagaagttacaccacaaaaaatatcgtaacgagctgaacctcttcatagtagagggcaagaaaagtatcaacgaatttctacaagcaggctacacccctcagctgcttatcgctactgaagcctttactaccaacgtgccacagcatcttattacacctgttagcaaagacgaattgcgtaaggtcagcgccctccaaaaccccgatgagggcttagccgtttttgagcagcctaagcacaaaggtatcttgcaagagggcgttattgtggcgcttgataatgtacaagaccctggcaatctgggcactatcatccgcctatgcgattggttcggagtcgaaaccctactctgcaacacccaaacggtcgattgctacaatcccaaggtagtgcaagcctctatgggctcgcttacccgtgtagcagtgcattacctcgatttagccgcttttctaaccactactaatatgactgtttatactacggacatcaataaaggtagtggactttactcaacaccttttcctgatgatgttatcattatattaggcaatgaagctaatggcgtaactcctgaagttgctgctttagccaatcaatctctttacataccccgttttagcaaacaccaacgcaccgagagcctcaatgtagcgatggcaggagcgattattttaagtgaagttatagggcatcattagaaaatttttctaaatacacctaccctatacaatcgatataggaaggatacaggaacaccgaacaatcagcgaaggattagcgaaggattagcgaaggattactgaagtacaaccatctaacaatcgcttatcccacccgtctcacctgtctcactcgtcccacctgtcccacctgtcccacccgtcccacccgtcccacttgtctcacaatcgccggtgcggcttgcactcccacctatctctacattatattaagtatcttcttttattcaataaaatcatatttttcgtgtatgcttgcccgtcacatctccccctttgaagggggcaggggggatgttactcctccccgtttgccccagacttcccagccctcccagtcctctcagccttcccaatcgtcccataatcgccggtgcggctcgcactcccacttttttagcacgatttttgcatcacattctaaaacctaacacctaatgcccttaccttatatattaatactgtttcgctttttattagcccccactatattgtggatagcctacgccacccccgaaagcgtagcccgtcccgctattgtcattgctatagtgttaggactcctatccgacatcttcgatggcatcatagcccgccataggggcattagcaccgtaaagatgcgccgcctcgatagccaaaccgatttagtcttctggctttcagtgggggtagcctgctattggctcaaccccgacctaattacagcctaccgctatcagattataaccctattcgttatggaagccctttgctatggcttgagctttctgcgctttggcaaagagacctgcacccacgccttcctttctaaaatatggggacttacccttctcgtagcctttgtgtctcttattggctttgggtatggcggcttcccattgcagttagctatctattggggactattatcccaaaccgatgtcattcttattatattgttgctcccccgttggcaaaacgacatccccagcgcctaccacgcctaccttatcagaaaaggaaagactatcaaaaaaaataaatggctgaatagttaggatagttagaaaaaaagtgctatatttgcctgcttaattataaactttaaaaacgtatgaaattaccaattattttggggcttcttaccgcctctattacagccagctttgcacaaccttttcgcgacacggctgtgctacaattagccgacaccaaagtcctaacggcagaaacctctcaagcccagcacttaaacctaaacccttttttagtaaaggacaaagaatttgattttggagcgctactcaaagaaatcaatttcgtacctttagagaccacggcacaaagccgtttagggcagattcgcaaagtcgttaccactgccgaacacatctatattatggacgaccttaaagagttgggcatagccattttcactcggcaagggaaattcgtaaagcgtattcctaacggcaaaaagccagaacaactctatcgcctttatgacatcgattttaatacccaaaccaatgaactaatagcttacaagcgttcgtttcttcttatttttgataaagaaggcaattttcttcgtttcaaatacctgcctataggctttctcaatatggcagctacccccgacggatatgtgctaaaatcgcttgtagggcaaaatataaacttaggcgacaaaagcaactaccgtttgcagtttataaataaagacctcaagctcaatgcggtagccctacccgataaagagagcaaagccttttcggctaaaagttacctttatagagtagccgatttggtaaagataacagccgaaatatccgacactatctatcaatataaccctaaagacaacaaattggcagcagagtttattttagattacgaccacagactgccacgttcgtatatttatggcaaagattttagtgtttttgaagaggctatacgcaaccataattataactattgtataggcgattatatcgaaaccactcatcagaatgtattttttatttctaataaaacagccaatgttgtagtttaccgcgataagcacagtggcaatatggtaggagggggtatagcccaaagcaaacaaggacttcctttcttagctttccctgatactttttatgatgatcagcttatcaagtattattatccaggtgaaaatgattatgaagtgctaaaagagatgccatttctttctgaagccaacaagaagaaaagcgaatccttcaaaaaaggcgataatcccattctaatttattacacattaaacaaattctaaagagataactaaagaaataaagagatatagaaatattttttgataaagaacttcggaaaaaactttgctaaaaactatagaatacccactataactttttagcaaagtttttttgcacaatatcccacccatccctacatcgtattgttcgtgtctgcttgcccgtcgcatctccccctttgaagggggcaggggggatgttactcccaagcctctcacctgtccctatatcatattgttcgtgtatgcttgcccgttgcatctccccttttgaagggggcaggggggatgttactcccaagcctcccacctgttcctacatcatattgttcgtgtatgcttgtccgtcacatctccccctttgaagggggcaggggggatgtttcctcccaagcctctcacctgtccctacatcatattgttcgtgtatgcttgcccgtcgcatctccccctttgaaggaagtccgcgagctagcgcagcggagtatgtgttaggagggatgtttatatcactcccccaaaaaacttcctcttcctaacctctgattaccaaccacttaactatccccctcaaaaaaacttcaaaaaaagttgccaaaaaatttgcagaattaaaaaaacgccgtacctttgcacccgcaaatgagacgataagcgctcttgcaaataagaaaacaacacgtacattgacataatgttgtacagcacaaaaaagatttaaagaatcgagtgaaacctgaagtcaataacttaaaaatcggttaaaagaaattaaagattttaacgatgaagagtttgatcctggctcaggatgaacgctagcggcaggcctaacacatgcaagtcgagggaggagctttcgggcttcgaccggcgtacgggtgcgtaacgcgtatacaatctgcctttcacatagggatagcccgaagaaatttggattaatacctaatggtatataggggtggcatcacctttatattaaagctgaggcggtgaaagatgagtatgcgttctattagctagttggagaggtaacggctccccaaggcgacgatagataggggttctgagagggatatcccccacactggtactgagatacggaccagactcctacgggaggcagcagtgaggaatattggacaatggtcggaagactgatccagccatgccgcgtgcaggaagacggccttatgggttgtaaactgcttttgcaggggaagaataaggactacgagtagtttgatgacggtactctgcgaataagcatcggctaactccgtgccagcagccgcggtaatacggaggatgcgagcgttatccggaatcattgggtttaaagggtccgtaggcgggctaataagtcagaggtgaaagcgctcagctcaactgagcaactgcctttgaaactgttagtcttgaatggttgtgaagtagttggaatgtgtagtgtagcggtgaaatgcttagatattacacagaacaccgatagcgaaggcatattactaacaattaattgacgctgatggacgaaagcgtggggagcgaacaggattagataccctggtagtccacgctgtaaacgatggatactagctgtttggttgttaagactgagtggctaagcgaaagtgataagtatcccacctggggagtacgcacgcaagtgtgaaactcaaaggaattgacgggggcccgcacaagcggtggagcatgtggtttaattcgatgatacgcgaggaaccttaccaaggtttaaatggagactgacgtacttagagataggtatttcttcggacagttttcaaggtgctgcatggttgtcgtcagctcgtgccgtgaggtgtcaggttaagtcctataacgagcgcaacccctgccattagttgctagcgagtcaagtcgagcactctagtgggactgccggtgcaaaccgtgaggaaggtggggatgacgtcaaatcatcacggcccttacatcttgggctacacacgtgctacaatggtcgttacagagagcagccactgcgtgagcaggcgcgaatctataaagacgatcacagttcggatcggagtctgcaactcgactccgtgaagctggaatcgctagtaatcggatatcagccatgatccggtgaatacgttcccgggccttgtacacaccgcccgtcaagccatggaagctgggggtacctgaagacggtcaccgcgaggagctgtttagggtaaaactagtgactggggctaagtcgtaacaaggtagccgtaccggaaggtgcggctggaacacctcctttttagagacgaccgatgttatagacgaatagaaggataacaccttttctttaaatcttgctggacaacaaaaaaacaagcagtctcatagctcagctggttagagcgctacactgataatgtagaggtcggcagttcgagtctgcctgggactacgaaagagatagctatagaggaaattctggaagctgatgcggggaattagctcagctggctagagcacctgccttgcacgcagggggtcaagggttcgaatcccttattctccacgacacgcacccacaagttccctctccttgggagagggttagggtgaggaaaaaagtacattgacatattgggataaaaagcataagagatcaataatagattattgataatctaacgaaaaaatattaaaaagaatcaaagagaacgaggtattttcttaatttagaatttataattcagaattaagaaagactacaagcgcgaaaagttatgtaagggcgtatgggggatgcctaggctctcagaggcgaagaaggacgtgataagctgcgaaaagttgcggggattggcacatacgagttgatccgcaaatatccgaatggggcaacccagtacattgaagatgtactacaccgataggtgggcaaacctgctgaactgaaacatcttagtaggcagaggagaagaaaacaaaagtgattcccagagtagtggcgagcgaaatgggagcagcccaaacccatattgttacggcaatatgggggtagtaggacccagatctaggttgtaaagctggattagaagtgtttggaaagacacaccatagagagtgaaagtctcgtataggtacagttttataaatcttatgggtatcctgagtaggtcggggcacgtggaaccttgactgaatctgccgggaccatccggtaaggctaaatactcctgagagaccgatagtgaaccagtaccgtgagggaaaggtgaaaagaaccgtgaataacggagtgaaatagaccctgaaaccatacgcttacaagcggtcggagcagtattagctgtgacggcgtgccttttgcataatgagcctacgagttactgttaccagcgaggataagtatttcagatacgaatccgtagcgaaagcgagtctgaatagggcgataaatagttggtagtagtagacgcgaaacctggtgatctacccttgggcaggttgaagcgctggtaacacagcgtggaggaccgaactggttgtcgttgaaaagacttcggatgacctgagggtaggggtgaaaggccaatcaaactgggaaatagctcgtactccccgaaatgcatttaggtgcagcgttgatgcgagtttaatagaggtagagctactgattggatgcgggggtttcatcgcctaccaattcctgacaaactccgaatgctattaaatgctcatcagcagtgagggtatgggtgctaaggtccatatcctaaagggaaagaacccggaccatcagctaaggtccccaaatatatgctaagttgaccaaacgcggtctgactgcactgacagctaggatgttggcttggaagcagccatacatttaaagagtgcgtaacagctcactagtcgagcggttgggcatggataataaacgggcataagcatattaccgaagctatggggttattactaagtaatataccggtaggggagcattctattggcgtggaagctaaaggcgtgagccatagtggagcctgatagaaaagaaaatgtaggcataagtaacgataaggcaggcgagaaacctgcccgccgaaagatcaaggtttcctcagctatgctaatcagctgagggttagtcggggactaacgcgaacccgagtaggggtagtggatgtacaataggttaatattcctataccattagtctgttaaaagtgacggaatgagataactaccgcgtactgacggaatagtacgtttaaggagttgttatgacttcgaaagtacgctgaggcttcggccgaggtgagtgtggtgacaacgtttccaagaaaagcgaaggctaatgcccgtaccgtaaaccgacacaggtgattgggatgagaattctaaggcgctcgagagattcatggctaaggaactaggcaaaatagacctgtaacttagggagaaaggtcgcctatcattagataggccgcagtgaaaaggtccaagcgactgtttatcaaaaacacaggactctgcaaaatcgaaagatgaagtatagggtctgacacctgcccggtgctggaaggttaagaggagagcttagcagcaatgcgaaggtttgaattgaagccccagtaaacggcggccgtaactataacggtcctaaggtagcgaaattccttgtcgggtaagttccgacctgcacgaatggtgtaacgatttggacactgtctcggccatgagctcggtgaaattgtagtatcggtgaagatgccgattacccgcagtgggacgaaaagaccctgtgcacctttactatatcttcgtattggtcttggataagtgatgcgtaggataggtgggagactgtgaagcggctattccggtagttgtggagtcattgttgaaataccaccctttgcttatctgaggtctaactttgcacaaggcaaaggacaattcgtggagggtagtttgactggggtggtcgcctccaaaagcgtaacggaggcttctaaaggttccctcagcacgcttggtaaccgtgcgtagagtgcaatggcataagggagcttgactgagagacttacaagtcgatcaggtacgaaagtagagcatagtgatccggtggttccgtatggaagggccatcgctcaaaggataaaaggtacgccggggataacaggctgatctcccccaagagctcacatcgacgggggggtttggcacctcgatgtcggctcgtcacatcctggggctggagaaggtcccaagggttgggctgttcgcccattaaagtggcacgcgagctgggttcagaacgtcgtgagacagttcggtctctatctactgtgggcgttagaaatttgcgtggatctgactctagtacgagaggaccgagttggacgcaccgctggtgtatctgttgtcttgccaagggcatagcagagtagctaagtgcggatgggataagtgctgaaagcatataagtacgaaacccgccacaagatgagatttcttttaagggtcgtgggagatgaccacgttgataggttacaggtgtaacggtggtaacatcatagccgagtaatactaataacccgtagacttttcgcgcagcattctttttaaaggagagttagttaaatatttgctttttatcctcatatgttaaaatatatgggctatgattaatatgatatagtctaacgatttaaggtggttatagtcaaaggtctcacctcttaccattccgaacagagcagttaaaccttttagcgcagatggtactacgcaagtgggagagtatgtcgccgccttcttataaaaagagcaatctaattatttagattgctctttttttgttgtaaattttaatagataagtaagatatgagagtagtaattcaaaaagtaacacaggcttcagtaagtatagaaaatcaaatagtggcctctatagataaaggcttacttgtgttagtaggtatagaagatggcgatacgaatgaagatatagcgtggctatcgtctaaaatagttaatttgcgcgtttttgacgatgaaaatggggtaatgaacctctctgtaaaagaagtggagggagaggtgcttattgtgtcgcaatttaccttgcacgcctctactaaaaaaggcaatcgtcctagctatataaaggctgcccgtccagaggtagcaatacctatttatgaagcttttataaagcaagtagaaactctcttaggcaaaagagtacctacagggcaatttggagcaatgatgcaggtcagcctatgcaatgatggaccggttaccattcttatagacacaaaaaataaggaataaaaaggaaccctatcgttgggatagggctcctttaagtgttttcacaacggaataatccttattgtgaattgctttcaaattctacggcaaaggtaagtataatattttttataagcaaatttttcttaacattttttgtttttatttcttttttgttatctttgcctcaccaaaatgtaaaaagaatgaaacgtatattaggattagatttgggctcaaactctattggttgggctttcgtacaacaagattttgaaaacaaacaaggaaaaattattgctgctggtagtaggattatccctatggatcagaaaatgttaagtaactttgaggaagggaccacagtttctcaaactgccgaaagaactacttatcgcagtatgcgtcgcctgcgagaacggcatttacttcgccgtgagcgacttcatagagtacttcacatattaggatttttgcctcctcactacgattcacaaatagatttcagcaaaagatatggtaagtttatagatgatgctgaacccaaaatagcttataacaataggaattttatttttatggatagttttaatgagatgattgaggatttcagaaaacatcaacctcagttattctacaagaaatctaatggcgaagagagtaaaatcccctatgattggacaatttattaccttcgcaaaaaagcactctcacaaaaaattacccaacaagaattagcttggcttatacttcacttcaatcaaaaaagagggtactaccagttgcgcggtgaagaagaaacagaaggaaatgacatggaaattatatcttctaaggtattatctgtgattaaaaaagataaagataaaaaatatgataagtattggtatgatataactttagagaatggtttagtgtataaagcagctttttacaatgatttagtatatagttggattgatcaaaaaagagaatttgtagtaaaacgagctcttttaaaaaatggagatgaaaaaatagagctttcatatttacctacttttgatgaaattgctaaaatggataaaaagcaacaagacaaattttatcaaaaaataaaagttaagacagaaagtaatattggaaataaaacggtaggtgcttatatctatgatcatttattgcaaaaccctaatcagaaaattaaagggaaattagttcgtactattgaaagaaagtactataaagatgaattaaaagctattttagctaaacaaatagcacttcaaccagaatttttcaccgaaaacctattagcggactgtataagagaattataccgcaaaaaccagacgcaacagcaaaaactattatcaaaagatttccttcatctgtttctagaagatattattttctaccaacgcccattgcgtagtaaaaaatctactattgccaattgtcccttagaaaagcgttcgtatatagataaggaaactaatgaacgcaaagatgttcctataaaagtatgtgccaaatctaatccttactaccaagagtttagagtgctacaatggctacaaaacttgagaatttacgaaatagaaaccgaccgtgaggtaacagctgagtttatcggaacagcccaatactatgaggctctcttcaacttcttgatgtctcaaaaagaaatagataatgaaagcttactgaaatactttttacttacaaaaaatcctcaaattaaagacaaagcagctaaaagcgagctaaaaaaatggctcactacttatcgctggaactatgtgtatgatgccgcggataactcctccaaaaaataccctatgaatgaaacaggctatgaacttcagcggtatttgcagaaaatagaagggcttcccgtcaattttctaacttttgatataacatatcgattgtggcatttgttatattcggtgaaggacaaagttgaatttgaaaaagcattaaagaaatttgctcaaaaatatcaattagaggaagcatcgtttgtagatagtttcaaggacttcaaaccctatcctaatgaatatggtagtttttctgaaaaagcaattaaaaaaatgctccctctgatgcgttttggcaagcattggaatttcaagaatattgatgtacatactcaaaaacgtatagacgaccttattaatggagtggcaaatgaggatatccgtaccatcattagagaaaaagcagagaaatatcagctcaatagtgagacctgttttcaagggctacctctttggttggctcagtatatagtctataatcgttacgccgaagctactaatatagaaaaatggacttcagtgagtgatttagaaacatatttagaagatttcaagcaacattcactgagaaatcctatagtggagcaagtagttaccgaaactttacgcgtagtaagagatatttggcaacaatacggcggcggacaagctaatttctttgatgaaatacacatagagctcggcagagaacttaaaaatacttctaaggaaagagaaagactttctaaacaaaatcaggaaaatgaaaataccaacctacgcattaaaaaattactcgctgaattaaaagaagatgcaaacatacagaacgtgcgtccgtattcgcttgtacaacaagaactgcttaaaatttatgaagaaggtgtcttcagtagtacagatgatatagaggaagatattcagaaaattcgcaaaaaagctgaacctaccaaccttgagatacaacgctataagctttggttagaacaaaagtataaatcgccctatacaggagaggtgatttcacttacaaaactattcacagaggagtatgaaatagaacatattattccgcaaagccgttattacgacgatagtttatctaataaagtaatatgcgaatcagctgtaaataagctaaaaacaaatcaattaggattggaatttatccagaatcaccatggcgagaaagtgcgtatagcgggtaataaagaagttactatcttcacagaagagcagtacaaagagtttgtgaagaaatactatgccaacaatttggctaaacagcaaaagctccttttgaatgacatacctgaaaaaatggtggctcgtcagctgaatgacactcgttacatcagcaagtatatttcagaaatactttctaaaatagtgcgttcagatgaaaaagatgagggcgtaaactctaaaaatataataccttgtacaggtaaaattactactgccctcaaacaagattggggacttaatgatatctggaacgagcttattcttcctcgttttgagcgaatgaaccagcttacacaaacacagctatttacttcatataacgacagacttcaaaaaaatctccctactgttccaataaaatatagtcaaggtttccaaaagaaacgcatagaccaccgtcatcacgctatggatgccttagtgattgcttgtgctaccagagagcatatcaattatatgaataaccagcatgcattggataagagtaaggataaaaaagaaaaacaacaatctcgcatagtccttcgcactatcctctgtgagaaaaagaataataactggcagttcaagaaaccttggagcactttcactcaagaagccaaagaagcccttgaacatatagtagtgagttttaaacaaaacttaagagtgattaataaggctaccaactattatgaaaaatgggaagagaaggatggtatacttgtaaaaaagaaagtaaaacaagagggaactaattgggctattagaaagcctttacacaaagaaactgtttcaggtaaaattgttttggataaaaaaataggtaaagataaaatacttacagctacccgaaaaacagtagatattacctttacagaaaaagttatcagtagtattaccgatacgggtattcagaaaatattgcttaactatctcaaatataaagggagtccagaagtagctttttcagcagaaggattagaagagctcaacaaaaatattgctcagtataacgatggtaagaaacatcaacctatttataaagtgcgtatttttgaagaaggaagtaaatttcctcttggagaaacaggagctaaagttactaaatatgtagaagcagccaaaggaacgaacctcttttttggagtatatcaaggcaaagaaaaacgcacttatgcaactattcctctcaacgaagtaattgaacgacaaaaacaaggactcccttctgtccccgagcgtaatgaaaaaggagaaccattgttgtttagcctttcgcctaacgatttagtatatgtacctatggaaggagaagccccagaggcaatagatttcagtaatctcagcaaagaacagaaagaaagaatttataaaacagtgagttttacaggaaaggaatgtcattttgtaaaatctactatagcttctctcataaaatcctatgatgctaaatctaagataggagaattaggaagtttgaataagttagaggttactattagtggagatagtagaataaaagaagtctgtatcaaactgaaagtagaccgcctaggaaacattaccaaagcatagagctctttttaagaataggaaagagaaaacctcctcttctgccttatgagcaaaggcaaaagaggaggtttttcagtactgtttttcagtaaaactcattgatactaaaacctttaaaagattgaggttgttatcaatcacaaaatcacaaaatttgaaagcaattcacaacgcagtaagtcctcgatattcttggcggtaagttgttatcaatcgcaaaactacaaaatttgaaagcaattcacaacacgagggttcccactctacatccatatagtgttgttatcaatttcaaaactacaaaatttgaaagcaattcacaaccgcctacaagtgctgcaatgcgggtgaatagttgttatcaatcacaaaactacaaaatttgaaagcaattcacaacagaaggggcaatcatactatgatagtccttgttgttatcaatcacaaaactacaaaatttgaaagcgattcacaacaggctcgtgctcggggcaacgatgggtgtggttgttatcaatcacaaaactacaaaatttgaaagcaatttacaaccgatgataagtggtacttcgctagtattgcattgttatcaatctcaaaaccacaaaatttgaaagcaattcacaacattctaatgctttcatactattaatgtgttgttgttatcaatcacaaaactacaaaatttgaaagcaattcacaacgctttgtcttttcagtgtacaactcccgacgttgttatcaatcacaaaactacaaaatttgaaagtaattcacaactgtttctttttttctaaaaaagaaatatttgttgttatcaatcacaaaactataaaatatgaaagcaattcacaacttactaaaaacgtgtacttctgcctcgatagttgttatcaatcacaaaactacaaaatttgaaagcaattcacaaccatcaggacttaccattacaagagagaaaagttgttatcaatcacaaaactacaaaatttgaaagtaattcacaaccccaaacggcaatttataggcaatcatactgatgttatcaatcataaaactacaaaatttgaaaggcaattcacaactgattggtgggatattgtggcgagccttacgttgttatcaatcacaaaactacaaaatttgaaagcaattcacaacgcagaacagctaccgcctcttcaatagcttgttgttatcaatcacaaaatttgaaagcaattcacaacacaaagtcgtaaataagggaagctaagcgttgttgttatcaatcattaaactacaaaaattgaaagcaattcacaacggttgcgccaagccttatttttctcgctacgttattatcaatcacaaaactacaaaatttgaaagcaattcacaacccctgctcctgctatctcatcacgacatacgttgttattaatcacaaagttacaaaatttgaaagtaattcacaacgatacttagttgttgggaatagagagtaaagttgttatcaatcacaaaactacaaaatttgaaagcaattcacaacagcctctacaagtatatccaaatctacgcgttgttatcaatcacaaaactacaaaatttgaaagcaattcacaacacctcacgttaatatgaggaaaatgcaaagttgttatcaatcacaaaattacaaaatttgaaagcaattcacaaccgctgcgtacatcggggttgtagctgtggggttgttatcaatcacaaaactacagaatttgaaagcaattcacaactaacctcttcgggcttgagcttgtcgaactgttgttaatcacaaagctacaaaatctgaaagcaattcacaacagttttgtgccagggcattgatgaactgaagttgttatcaatcacaaaactacaaaatttgaaagcaactcacaactatatcgagagcatcttcttctttctttagttgttatcaatcacaaaactacaaaatttgaaagcaattcacaaccggtgtggtctctgccctctggtgtagcgggttgttatcaatcacaaaactacaaaatttgaaagtaattcacaactgtcgggtttctcgcctttatgcaaaatgcgttgttatcaatcacaaaatttgaaagcaattcacaactggctcaacctcaataaacttgctttcagggttgttatcaatcattaaactacaaaatttgaaagcaattcacaactctacttttatgcagctctaaaacctcgctgttgttatcaatcacaaaactacaaaatttgaaaacaattcacaaccatacactcacattaaatctgaagcgcaaagttgttatcaatcgcagaactacaaaatttgaaagcaattcacaacttgtaactgcttgcgataatcggcagcagcgttgttatcaatcacaaaactacaaattttgaaagcaattcataacgccgaaagcaagccaaatatgggcgaaactgttgttatcaatcacaaaactacaaattttgaaagcaattcacaactatttatgatgtaaaaatatatcaattttagttgttatcaatcacaaaactacaaaatttgaaagcaattcacaacaggggagacaaatgaatgaaatattagaatgttgttatcaatcataaaactacaaaatttgaaagcaattcacaactatttgctaggcagcttcctatcgaggaaggttgttatcaatcgcaaaactacaaaatttaaaagcaattcacaacgttttgataacgtaccacacgaaagcctcggttgttatcaatcacaaaactacaaaatttgaaaccaattcacaacggttcacctggacgagaccccccccatatgttgttatcaatcacaaaactacaaaatttgaaagcaattcacaacttttttgcataaaagagtatcttctccctctttttatttgttttattatataataattcttatctttgtactttaatttaaatttttaatttatgggaattattacaacacttattattggtgccatcgcaggatggttaggaggaactatctacaaaggtagtggattaggtcttattgggaatatcattattggtattcttggaagtagcgtcggatattggcttctaggaagtgtattacacatctctcttggagaaggattgattggttctatcttaacaggagctattggagctattgttattttatttttaataaatttgatatttaaaaagaagtaataaggaaataggagaaataaaaagccccgaaatattatatatttcggggctttttagtatactttttctcttaattacctttttgcgttagcaatccaggtctttccatctgtagtatacagaatgtacagtgaagatgcgtttattctaattacttttaaaccatcttgcaaatcaacatttactaaagtgttatctccttcttttttgaaactaacaccttttaggtcttcaatgccatctgaaaaacggaaataataatcattccctgtttttacaactgttactgaaccattgtcaaaagattttttctcttctccttttaagaaagaaattttacctttataggttcctacaaaaaggtcattgtctgctgggtcatcattcttgctgcaagatatgcaagaaaaagctactagtgataaacaaatcactgttactaaagcaaagatttttttcatttttggttgaatttaaaaattaatattaaagtttgatgtggataatatattattgaaatatttaatgcaattttaaagatattaattgtgatattttttaagaaaacatttttttatttgtttttgtttaaatacctttttgctaaaagttgcataccatagcccaaagctatatttatccatcttttgttactaaataaaagagatgcccaagtgttagctaataaattctttggagttaaactctctgctgaagctgatacttgttgcgatagagatagcctatcaatctctttttctaatcgaagtagtctaatctcattatcaatttcttcaaatgatgaataagtcttattgttcattttcttcttcgtcttctgggtcagatttaaaatagatttctgatagtttttgcaatagcgacctctcaattagtttcttgcgaaacaataaaactactaacgataacaatatatagaaagctcctacaatagtaaaccctaaaccattactacctaaagcttcacctatagcataagcagcagcaagtgataggaaaaataatattaataggcaggcaaaagcataaacaaaaaaagttataagcccatacgaagacttagctataaacctgaaaagtatcattttatagtaagcaaattgcgaattaaaggctgtgtttgcttttgtagggacttctacaaacgtttctttaatagaataaatcgccataaaattacttcttaattttagcggcttcttctttcaatgacgctaatttcttttctagaatagcaatcatatcttcagatttattacttgcttttgagaaaagtctatctactttttcttctaaggaaccttttaattccaaagatttctcacgcacgctctctgtaagattatctaattgttctttaaattcatcagacttgtctctaagagagtccttaatttttttacgtgtgtttttaccttcgtctggcgcaaaaagaatgcccaaacctactcctatagcagtacctactgctaagcctaatacgacatttgttgtttttgacatagtgttcaaatttaatgttattaaattagttatataaattaagtatgaggcaaaggtacaaataaactttaaaggattttgttttcaataatactttttaactataggctataaagaaaaattattattactttttatatatttgtttttaaggcgcttatatgtttcttttaaattcgtttttccgttcttaatctataagttatgcagggtataaaatcattgcaatagcccaaatgattgccagaaatattatccaaggcaaacaacctgaaaacatatggtataaggcactaaacgtttcaaatataatattatttttcatagcgagataattaactaattatcacggcgctaaacgctctattttccaatcgtagtcttcggtaagggtatagcgaagacgatcgtgtaggcggttagggcgtccttgccagaactctatgctctgagggcgcactaagtagcccccccaatgcgcaggacgcggtacttccttgccttcgtattgcgcttctaaagcgtgcagttgttcttctaagtactcgcgcgtgggtattacctcgctctgtggcgatactatagctcctaatctactccctaaagggcgcgattcaaaataaccgtcagaggtattggcgggcactcgctcagctatccctttgatgatgacttgccgctcaatagaaggccaaaagaatgacaaacacagatgcggattagcttctattgctctgcccttttcgctgtggtagttggtgtagaagataaacccttcgtaagtgtattgtttgagcagtactacgcgcgttttagggaagccatcaagtccgatggtgctaactgacatagcattagcttcgtctatgctatccgtttcatcagcttcataaaaccacgtctgaaaaagttgcatagggttttcaggagcatctttctctaaaagctctcgtttattataggtttttcgataattacttaagtccattttgttttttcgcaaatatactaataatttataaatcggcaactaataaaataaaaataagaggtaataagcactcacttattacctcttattttattacttatcaagttgtttctattaatagaaagcacttatgttttctttgatagtagcgctgttttcaagcgatttgagtatgccttgtccggcgcgctctgtgcgtagcttctcgatagtctctgcatacgttttgtaatcattagtagcaggcgctactgatactgatgatacttgtattacatacacagcgttctcaccatcgataggtttagagatagcaccttgcttaagtccgaaagcagccccgattactttaggctcgcgtccttctcctataaggatagggttgttcattgttaatccggtagccgtttttacttctgttttgttagccgaagcaattgctgctaaactgttgcctttagctttctcttttagtatagcggcttttttctcgcgtataagaataggttttacaaatggcgctacgtcttgtacgtcgctaagtccttcttctccttgtttcactaattgagctactatatagttacctccgttagtgaattttttaaggtctcctacttttgtttctttgttgaacaaccattgtactatttggcggttagctccaagtccgataatttggtcgtcgtttttgtgtaggttatctgcacgaagcacagtcaagtctgatgatttagcgatgttagaaaaatctttaggattttgactcgctttcatctcaaaattgctcactttagagaaaagttcgttaagggtagcttcagaaggctctactttgcgggtgatagtagccaattgtactgtaggtgctttgtcagttactttcactacgtggtaaccaaagtcagtttctacaatacctatagtacctacagggttagcgaaaacaaattgctcaaaaggttttaccatagccccgcgtttgaagaatccgaggtcgcctccgcgatagttagcacctggctcatcagaattttcgcttgccaatgcagcaaagtcagcacctgcagctttagcctcagctaaaagcgactcagcttttgctttagcttcctctttagtacgagtagtattaggagtagcggcttggctacctttgtaagcgataagtatatggcttgctttcacagctccgttagggtctttagctatcatacggcttagttttaggttgccatcttcttcataaggaccaaatactttgcctacaggtagggcgaaaagagtatcggcataagcagaacgcaaatcttctttgcttacgaaaagggtatcgtaaggagtatcagagtggcggtctacgaactcttttatgtttttagtttgagcgaaaccagcgatagtatcgttagcgtgtgtttggttgttaaacacgatttcaggctgaagcaatttgttgatagcttctttttcagcttgcgtatcggcagccgaaggtttttcgttcaccactatatattgtatattgcggtaagcctcttgtttgaattgtttttcgtgttttttgatataatcttttatttcgctatcgctaacatttatgtttttatcgtcaatactgctgtattgtagcgcaacatagctaatgtcagccatatctttttcttggtgataagctatttcagcttcagcattggttactcctaagccagcacgtataaggctgaagtacatttgctgtttagccccttctatgatagcgtcttcttgcattttccactgagcataggcttgcggattgttgcttttgagggtattgaggtaagcggtaaatttagaagggtcaaatacaccatattcgtttacgaactgagggttttgagcaagaggggttttagcgagtatagagatgatttggtctttctccacgctgagtcctaatttctcaatttgctgattgagaagtatttgctgaacgttttgctcccacacatactttgcagcttctatgctacttgcctgaccgttagcctgatgcacggcattttctacctgtagacggaaagcgtcaataggtacatcttcaccgtttaccgtacctatttcggtaggttgatggttactaaagcgccctttgccaataaagtctgagatgataaaagcaaagagagcgagcccgataattgcaatcaagaatacggttttacttctgattttttcaagtactgccattgtttataatcgtttataaaaagtataaatttgtttggtgttattaatcaaacggcaaaagtaatcctttttattgaaatacaaaaataattagcaaaaaaaatgttgatttgctaatttgtcaatttgccgatttgccaatttgccaatttccccaaacctccattaattagaatttttatcttttatacttaccctttactttcaatatagctaccctttaccttgagcgaaggattagcgaaagatgagcgaagtataaacgactaatcgccgccaaaaaaatagtaaaatttgctaattatcaaatttttactatctttgcgctttgaaatatctaaaaaatgcctaccactatctataaaacttatgtatgtatccttttctttgcgctacaactctgctttgcccaaaaaggggaggaggcactgtttatcaaagaaggtacgctactcaaatgtgagaacagccgcattcctgctgacggtcgtatagagttaccacgtacagttaaaatcattgctcctgaggcgtttaaggattgctcccgactcaaatctatcaacataggggggagtgtaactctcataggcgaccgcgctttctacggatgtaatacccttactaaggttgagtttctgcccaatacggttacggctataggcgaacaagcctttgctttttgtgggaggcttaccagtgctaacttgcccaactcggtggctactattggcacagaggcgtttcgcgcttgttttgctcttaacgctatcactatccctgaaagtactactaatataggtgataacgctttcttagattgtagcacgctacagcaggttacttttcttactaaccagttgtcgatacttccttccggaattttttaccaatgcaagcagctcaaagaggtggtgctgcctgccagtgtgcgccgcatcaaaagcagtgcttttgcttattgcgagagtctgagtagggtagtgctacccgaacagttagaggctataggcgatgatagttttgagtactgcaagagtctgcgcgctatcgatattcctgatagtgtggtgtttataggggcgagtgcctttcatagctgtagttcgctaaccgatgtgaagttgccctacggcttgcgccatttgctcaacgatacttttttagattgcacttcgctcaaggctattctcatacccgatacggtagaaaagattgatatgcaggtgtttcgcaactgtagttcgttagaggcggtacaatttcctttggcactaaccgacatactctatgccgctttttacggttgcaaaaagttgcaagaagttaccctgcccgacgaggtaaaatatataggtatgtttgcttttgctgaatgcgagagtttagcgtatatagagttgccccgtgcggtggtcgatatagccgctaaagtgttttataactgtacgagtcttagcgaggtgaagctctctaaattcaccgccactataggggtacaggctttttatggctgtacgaatctgaaagacttacgccttccgccttcggtagaaaagattgacttaggggcgtttgaaaacacagggcttaccgaattgcactgcaaggctatcgcaccgccagaggtgaacaggagttttggatataaggggaaagtattagtacctttccgttcgttagacgcctacaaagcagcgataggttggcaagattgtgccttagaataaaaaaatattaaaaaaagttttgcagattaaaatatttgcagtacttttgccacccaaaagcgtgcataatagggcgcttaataactcaccaaataaattaatacattatggttcagtatgttaaagaatcttacgaagaactaaagaaccacgttacgtggcctactcttgccgattcacagcgtgaaatggtggtagtagtggtattctctatcttattctcattagttatctggggaatggattcgttctttgaatggataatagctgagtattttaaatttatgcaata

SEQ ID NO: 1202 - DNA, 24383 bp, synthetic construct
  misc_feature 1..24383: note = Synthetic
  source 1..24383: mol_type = other DNA
taatcatttgttgcctaatgtggaaatcattacaccaatcagagataaaaaactgagcagagaagcggaaatcgaattcttgaaatcacatggtgtaagcttcaatttcgaaaaagcggtgtacagtattaataaaggattgtggggaacttctgtaggaggtaaagaaacgttgacttcgtatcaaagtttaccggaagaagcatggccaacaccagtttcggctactgaatctgtagatattacattgagttttaatgaaggcgaactgatttcagtaaatggacattcatttgaacatccgtctattgccattgaatatttacagcaaatggcacaacctttcggaattggaagacacattcacgtaggagatacgattatagggattaaaggaagagtgggttttgaagccgcagctccagaattgattatcaaagctcatcatttactggaaaaacatacgttgaccaaatggcaattattctggaaagaacaattatcaagctggtacggtaactggttgcatgagggccaaatgctggatcccaccatgagagatatagaagcttttttggcccacactcaaaagaccgttagtggcgaggtgtacattaccttgcatccgtatagatatgaattgaacgggattgaaagtccgtttgatttaatgtcggcaaaattcgggtcatacggtgaaatgaacaacggctggagcggcgaagatgtaaaaggatttacaaaaatattcggcaatcaaacctcgatttaccatcaggttactaaagaattgagtgatgcaaataattaaagccggaattattggtggagctggttatacagctggagaattactcagaatcctgattaatcatccgcaggtggaaattgggtttgtgcatagtaaaagcaatgctgggaagttcatttatgaagtgcatgatgatttgtttggtgataccgatttgaaattctctgaaacgtatcattctgatatcgatgtggtttttttatgcgtcgcgcatggtgaagctaaaaagatagtgactgaattttcatcttcggttaagataatcgatttaagtcaggaccatagaattgcggctaatcatttttttgtttatggtttgtcagaatggaataaaacagcgattcaaaatgcaaattatgttgcgaatccgggttgttttgcaacagccattcaattagcgttgctgcctttggccaaagcaggtttactgagtggtgatgtgtatgcttcgtgtacaacaggatctacaggtgccggtcaatcattgaccgaaacttcgcatttcagttggagacagaataatttgtcggtatacaaagcttttacacatcagcatctagcagaaattaatcaaagcgtacagcaagttcagcaagtgtattcgggcaacctacatattttaccgcaaagaggttcttttactagaggtattttggcttgtatcacgttaaaatcaaatcagtctttagaacaattgcaatcgttatttgaagaaaaatacaagcaggaatcttttgtgtttgtttcacctaaaaacattcatttgaaacaagtggtgaataccaataaatgcctgctgtatctggaaaaaaacgaagaggatgtcatgatcgtgagcgtaattgataatttattgaaaggagcttcaggacaggcggtgcaaaatatgaatctgatgttcggtttacccgaaacaacagggttaaaattaaaaccaagcgcattttaaattatggacacaataactataaataacccaacacaaatgaatctattcgatgtgtattcggtttcagatattgaaattgtgaaagcactaggttcggacttatgggacaaaaacggaaaacactatttggatttatatggcggtcatgccgtaatttccattggtcatacgcatcctcattacgtttcaagccttacagaacagttgcagaaaattggtttttattccaattcgattgtgattgaccagcagaaacaattggcaacaaaattaggcctactttcgggctatactcattatcagttgtttttgtgcaattcaggtgcagaggcaaatgaaaatgccttcaaattggcatcttttcataatggaagaaaaaaaataatcgcttttaataaggcttttcatggtagaacatcattggccgttgcaagtacagataatcctgcaattgtagcaccagtgaacgaaaacaaaaacacaacttttttaccattaaatgatagtaatgcttttgaccaagccgtaaacgatgaggtgtgctgtgtcattattgaaggaattcaaggcgttgccggtattcagattccagagcctgcatttttacaacatgtggcgcaaaagtgtaaaacactaggtattgttttgattttggatgaagtgcagtcgggttacggaagaacggggaaattttttgcccatcaacatgcgggaatacagcccgatattattactgtggcgaaaggaatgggcaacggatttcctatagctggtgttttaatcgcaccgcatattcagccaaaaaaagaaatgctgggaaccactttcggaggaaattatttggcttgcgctgctggattagcagttttagaagtgattgaaaaggaaaacctaatggagaatgcccaaaaaatgggagagtatctcatagaacaattgcaaaacattccaaatatcaaagaaatcagaggcatgggattgatgatagccatcgaattgtatgagccttgcgcagctgtacgtaaacgattattggacgaattcggaatttttaccggaaccgcgagcaataaaaataccctgagaattttgccttcattggcagtgacgaaaaaagaattggacgaattgttacaagctttaaagattattttgaagtaaaacgtcctgattagaaatgattaatgaaagagaaatgaaacattttacatcagtaaacgatattgaagaccccatggctttagtgaaagaagccatagaattaaaaaaaacagaaagaatatctcaaatagggaagaataaaaccatcggattgttattcttcaattcgagcctgagaactagaatgagtacgcaaaaagccgcacaaaacctaggaatggaagtgatgattcttaatgtaaacaacgatggttgggcactggaatttgaagaaggagccgtgatgaacggaaaaactgtggaacacattaaagatgcagctgctgtaatgggtttgtattgtgatattctagccattcgttgtttccccaatctggaaaataaagaagaggattatgccgataaaattatccatcagtttatgcaatatgctaaagtcccagtggtgagtttagaatcggcaacaagacatccgttacaaagtttggcggatatgattacaattcaggaatacaaaaccaaagagaagccaaaggtggtgctgacttgggcgccacacatcaaaccgattccgcaggtggtagccaattcgtttgccgaatggactttgtccagtggttatgatttgactattacacatcctgaaggatatgaattgagcgaggagtttacaaaaggcgcaacaatcgaattcaatcaggaaaaagcattacaggatgccgattttgtttatgtaaaaaactggtcttcgtataccgattacggaaaggttttacctgttacagaaaactggatgttaactaacgaaaaattggaagtaaccaattcagcaaaagtgatgcattgtctgccagtgagaagaaatgtagaagtatcggatgaggttttggacagcgaaaactcgttgattctacaacaagctgaaaacagagtatatgcggctcaaacggtattgaaaaaaatagtggaatctaatttttaagctatggtacacgtaataaaaattggcgggaatattattgacgatgcaataaaattagatgatttccttaacagatttgctaagttggatggaccaaaaattttgattcacggtggcggaaaattggctaccagtgtagcaaagaatttgaatattgaacaacaaatcatcgacggtagaaggattactgatgctgagactttaaaaattactgcgatggtctatgccggattggtaaataaaaccattgtggctaaattacagtcaaaatcatgcaatgccattggattaagtggtgtagatggaaattgtattcaatcggcaaaaagaaatcatccaactattgattacggttgggtaggtgatgtggaaagtattcatgctggttttttgcaaaatcttatagacaatagaattgtacccgttatcagtccaattacccacgatggaaaaggtaatttattaaataccaatgccgatactattgcaaccgaagtagctatagcactttctgaaacgaacgaagtgaatcttagattttgctttgaaaaattaggggtgttgacaaatcctgaagtcgatggttcatggttaagaaagctcgataagaaagaatatcaatctttaaaagaggcacaaattatttcaaaaggaatgctccctaaattggaaaatgcttttaaagcgagtgaatctaaaatagcgaaggtcgaaatctgtcatgccgattatgctagtgaacaaggcgagtcgtttattggaactttaatagtataaagaatggaacaattacaaaaagaagcattggaattgctaaaaaagttaatagcgacacaatcgtttagtaaacaagaaaatcatacggctgaaattctgaatgatttttttgttcaaaaagggattcttactaatcgattactacataatgtttgggtaaagaataaatattttgacgattcaaaaccaacaattttactaaattcacatcacgatacggtacaaccaaacaaacaatatactagaaatccttttagcccagatattgaagacgggattttatatggtttgggaagtaatgacgctggtggaccactggtttctctagcggcctgttttttgcatttttatgacagacaggatttgcagttcaatttgatttatgcagccaccgcagaagaggaaatttctggaaataacggagtggaaatcgttttaccagaattaggaaagatgtattttggaatagtgggcgaacctaccaaaatggatatcgctatcgcagaaaaaggactttttgtgattgattgtattgcccacggaaaatcaggacatgccgctagggaagaaggagaaaacgccatttataaagcgttgaaggatatcgaatggtttcgaacattcgaatttccagaggaatcggaaatgctgggtaaagtcaagatgtcggtaactattatcaatgcgggtgtacaacataacgtggttccagaaagatgccagtttacagtagatattagaaccaccgataaatacaataacgaacaagctttggaaattatcaaacagcatgtggattgcgaagtcattccgcgttcgactcgtttgaatccttcatttgctccaatagagcatccaattgtgcaaagtggtatcgcattaggaagagctatttatgcttcaccaaccacttcagatcaggcgttgatgagtggttttccaacgttcaaaatgggaccaggcgattcggcaagatcacatacagccaatgaatatatttatgtggaagaaatcaacaaaggcattgcaatctatattgaaatgctagaaaaatttaatacgatagactatgaagttgtggcaaaatacatcagataacgtaaaaacttccatttcagcaatggtggaacaatttacgataggccaagatactatttgggatttatatttggcagaagctgatatcaaaggttctttggctcatacatctatgttgcatgaaataggattattaactactgaagaactaaaggaagcccacgaggggttgcaatccattctgaaaatggtacttgataagtcatttgtaattgaagagggggtagaagatgtgcattcccaagtcgaattgttactaactcaaatgaaaggagaggtaggaaaaaaaatccatgccggtcgttccagaaacgatcaatcattgttggatattaagttgtttctaaaatcagaattgaaacaaattgtcgaaaagaccgaaactgtttttaatactttgattgatttgagcgagaaacacaaaaacgatttgctgccaggctacacgcattttcaattagcaatgccttcctcttttggtttgtggtttggcgcttatgcagaaagcttaagtgatgatttagaactgattttagcggcctatgctatggctaataaaaatcctttaggatctggtgctggttatggttcttcttttcctttaaatagaacattcaccaccttgctactcaattttgaatcgatgaatcataatgtggtctatgctcaaatgacgagaggaaaaatggaaaaaacaactgctatggctttatctggaatagcagctacactcacaaaattttcaatggacgtgtgtttgtacatgaatcaacatttcggatttattagttttcctaaagaattaaccacaggaagtagtatcatgccgcacaaaaaaaatccagatattttcgaattgattagagccaaatgcaacagaattcaagctttgcctaatgagctaacgttattgactaacaatttaccctcggggtatcacagggatatgcaattaaccaaagaatgtttattcccagcgattattaccttgaaagaatgtttagacatgcttcaagtaatgttagaaaatattaccattaagcaaaacattctatcagacgaaaaatatttgaatctattcacggttgaagccgttaacgaattggttttatccggtattccgttcagagaagcctataaaatagtttcaaaacaagtggaagaaaatcagtttatctataattatgaaacgctaaaccatacccacgaaggaagtattggtaatttgcaaaatgataaaatcaaagaggagtttattaaaaagaaaaagaaaatgatttaatcctcagctaaatagtaagaagtttcatttttcaccatactcatcacaatattactgtgatattgtccaatgtttggaatattggctaatttattcactacaaaattattgtaagcatcaatatctgtagtcgcaatttttaacatataatcgtaaatacctgaaagactagtaacttctagtatttcaggcattttcataacttcatcctcgaaattttttaaatgctctcgagattgtttttttagagtgatattgcaatacgcaaaaagtttgatacctacttttgaaggattaaggataacagcactttttttaataacaccagactcttgaagatgtttaattctttcataagtaggggtataagaaagacctaccatagccgcaacatctttcacagaaagtgtacaatcttgttgtaaaatattaagaatttttgcgtctattttatccataaaaagaaggtaaatagtagtatttactccttagtttcttcttctttttttggtgcagtagtatcttctcccttagaagcttttttgaattcattcaatccacttcctaaacctttcattaattctggaatctttttacctccaaaaaataaaagtattgctgcaataattaatataatttcagttggacctaatcttcccatgtttttaaaaattgtgcaaaatttgcatttaaattatactgcaaagataataaagaaaaaactcaaatgtaatttttaacgaattattattcgtataatgaagagccattctattttcctatatttgtagtacgtataaattgagtttatgacgatacttaaaagattcaaacgcaaagaatttctagataagataataacaaaaagacgtttaattatcttaaatgaagatacttttgaagagcaattttcacttcgattgactatattaaatgtttttttattagctactattggtgccatttttttaatttctattactacttatattattgcatttacacctttacgtgaatatattccaggatattcatcaacggagttaaaagaaaaagcattaatgttaggtttaaaatctgattcattggattttgaaatcaaaaagaataatgcttatatcgagtcagtaaaaaaagtgttaacaggcgatttagaatatgctaaagtaaacaaagattctattttagcttctgattacgtagatccttcggagtatgacatgaaagtgtctgaagaagaaaaagaattacgaaaacaagtagaagaagctgcgaaaaaagatagtaaataatgtcgattaaaagtattggagcaaaactatttgcctccttcattcatcataaaacacaaaattgggcaaataaccctattaaaacccaacaaaaagtctttgaacagttacttcaacaggcaaaaaatacccagtttggtaaagatcatcatttcgagcagataaaatcattcgaagattttgctaaaaatattcctgtacgagattacgaggaattacgtccctatgtagatcgcgtagtcaacggagaagaaaacattctttggaaaggaaaaccactctattttgctaaaacttctggtacaacctcaggagcaaaatatattccgctaacaaaagaatctatgccgtatcatataaaagcagctcgtaatgctattttaagttatgtacatgaaacaggtaaagctgattttgtaaacgggaaaatgatttttttgcaagggagcccaattctggaagaaaaaaatgggattaaactgggtcgattatcaggaattgtggcacattttgtaccaaagtatcttcaaaaaaatcgcatgccatcatgggaaacaaattgtattgaagattgggaaaccaaagtcaatgctattgtagaagaaacgtttcacgaagatatggcggtaatttctggaattccatcttgggtacaaatgtattttgaaaaactttctgaaaaagctaaaatgccagttggtcaggtttttaaaaacttcaatttgtttatttacggtggcgtaaattacgaaccctaccgtgcaaaatttgaaaatttaattgggcgaaaagtagatgctatagaattatttccagcttccgaaggttttttcgcgtatcaagattctcagaaagaaaaaggaatgcttttgttgttgaattctggaattttttacgagtttataaaagcagatgagttttttacagaaaaccctaaaagatataccattggagaagtcgaattaggtattaattatgtcttgattatttctaccaatgcaggactttgggcttataatattggtgatacgattcaatttaccagtttaaaaccctatagaataatagtttcaggacgtatcaaacattatatttcagcttttggagaacatgttataggtaaagaagtagaaagtgccttacaagaagctatggaagggacatctgttcgagtaaatgaatttactgtagctcctcaaataaaccccgtggaaggcttaccctatcatgaatggttgattgaatttgaaaacgaaccccaagatttaaaagcttttgccttgaaaatagataaagcgatgcggaaacaaaacgtgtattatgatgatctaataacaggtcatgtgctaaaaaaccttgtaattactggggttacaaagaatggttttcaagaatacatgaaatctattggcaaattaggcggacaaaataaattgcctaggttatctaacgacaggaaaatagcagatttttttaaataaaaaagcctcctgatcataggcaagaggcgacctaaatgttttcacaacggaataatccttattgtgaattgctttcaaattttgttgtacgaatatacaattttttgattaaaaaaaatagttttagtttattttttataataatattgttataaataattaaactaatgacaaaatttaacttaggattagatataggcaccaattctattggttgggctttagtaaatgaagattgtgaaaacaaaaaaggtaagattttagcagctggtagtagaattatacctatgacacaagatattttagataagtttggttcaggagcagctactgaaacacaaacggctttacgtacagattatcgtagtaaacgaaaattaatacaacgttttttattaagaagagagcgtttacatagggttttaaacgtactggattttttaccgaagcattatgccgaaagtattgattttgagaaatatttgggcaaatttttacctaatacagaacccaagttggtatataaccaaaatcaatttatttttcaaaactctttttttgaaatgttaaaagaatttcaagaaaagcatccagagttatttctaaataatcaaaaaatcccgtatgattggactatttattatttacgaaaaaaagcattaagccaaaaaatagaaaaggaagaattagcttggttattactacagtttaatcaaaaaagagggtataatcagttaagagatgaagaagaagagaatacgcctgataagctggtagaattttattctttaaaaattataaaagttacagcggatgaagccaaggaaggaattaacaaaagatggtatagtattaatctagaaaatggatggatatatagacgagaaagtaaaactcctttatttaattgggaaggaaaaacaaaaaattttattgttactactgatttaaatcaagacggttcaataaagaaagataaagaaggaaaagaaaaaagaagttttagagctcctagtgaaggagattggacgctacttaaaaaaaagacagaaaaagaaatttacgaatcaggaaaaactcttggaacctatatatatgatgcgttgcttaacaatcctgatcttaaaataaaaggagctcttataaaaactattgatagaagtatttataaagaagaacttcaacaaattattaataaacaaaaagaatatcattcagagttaaacaattctaaactttataaagcttgtttagaagaattatatcctaaaaatgaaatatataaaaatgaactaaaaaataaggatatagcgtacctatttattaatgatattttatattatcaacgtccattaaaagcaccaaaatacaatattggaaaatgtagctatgaaagtcgtacatttaaaaaagaggataaaaaaattacagagtttataccagcagttgctaaatcacatcctttatttcaagaatttcgtttatggcaatggataaagaatctaaaaatatacgaaaaattaactaacgataattatacggatttttttcttactaacgaacgagatattgaaaagctttttgatttcttatggaataaaaaagaaatagatcataaaggaatattagaatacttaataaagacaaagtttcctgatctaaaaccaaaacaagttaagagtaaggtaaaagaatatcgttggaattatatctatgatcatgaaaaagatgaatctaagaactatccttgtggtgaaacgtattttttattaaaaaataaattagataaaattactagtattcaagacgattttctaaacaaaaaaagacttgaaaacctttggcatattatttattctgtaacagataaaaaacaatatgaaaaggctttagcaaagtttgcacttaaaaatcaacttgatacgaaatcttttgtaaataccttcaaaagaattcctgcttttaaaaatgattatgccatttattctttaaaagcaataaaaaaattattgccattaatgcgagtaggaaaatactggaattatgatgatattgacccaatcaccaaacaaaaaattcaatgtattattacaggtgaagaaaatgatacgatttctactttagttagagaaaaaacaaatcatttttctaacgaaaatgatttcaaaaatttatcactttggttagcaggatatatagtatataatagtcacaacgaaagctctgaaattgaaaaatggaaatcacctcaagatatagacaccttcttgaaaaagtttaaacaacatgctttaagaaatcctattgtagagcaagtcgtaactgaaacccttcgagtagtaagagatatatggttaaaaaaaggccaaggtaagaaagacttttttaacgaaatacatatagaattaggaaaagatttaaaaaatccagttgataaacgtagaaaaatatcaagtaccaattctaaaaatgaaacaactaatattagaataaaagcacttcttaaagagttgcttaaagaaggtattgaaaacataaaacctaattcacctaagcaacaagaaattttaaaaatatttgaagaaggtattttaaactcaggaattgatatagaagaagagattataaaaattagtcaaatagcacaacccaccaaaaaacaattacagtattatagaaattggttagaacaaaaatacatatcaccttatacgggtcagtttattcccttgagtaagctatttacatcaaaatatgaaatagaacatattatacctagaagcaaatattatgatgacagcctatcaaataaagtaatatgtgaaacagaaataaatagattaaaaaataatcaattaggatatgaatttatcaataatcatgaaatacgcgaaattactttagaagaaggcaaaacaataagattattaagtccaaaacaatatttagattttgttactacatattatgggaaaaataaagcaaaaagggaaaatcttttattaaaagaaattccaatacaaatgattgaaaatcagttgaatgatacgcgttacgtaagtaaatatgtaatgcaattattatctaaaatagttagaaaagaagatggaacagacaatggcacaaattctataaacattttatctgtttctggaaaaataaccagagtacttaaaacagattgggggcttaatgatgtttggaacgatttattatgttatcgttttgaacgattaaataaaattacaaatacaaatttgtttacaacgtatagtgaacaaaaacaaaaaataatacctatagtccctgatcaatatgcaaaaggatttcataaaaaaaagctagatcatcgtcatcatgctctagatgctattctaattgcctgtattacccgtaatcatattaattatatgaacaaccaaaatatacagggtgaaaaacttaaaaattttaaaatagacaaacataactatcatgaaatatttcaaaaatcacgattggatatgagagctcaattatgtgaaaaaaaatacaatgatcatgattcaacaaaatatacttgggtcttcacaaaaccttgggctgattttactgaaaacatcaaagatactttagaatttattattccatcttttaaacaaaatttaaggattataaataaaaccgtaaactactacgaaaagtataacgaaaatggaaaaaaagtaaaagtaaggcaaactaaaggagataattgggctatacgaaaaccattacataaagaaaccatttcaggaaaagtacatttgttgtataaaacaccagcaaaaggaaaaatcttaacagctacgcgtaaggtgttagatagtagtatggattttaaatctattgaaaaaattacagatacaggaattcaaaaaatactcaaaaattatttaaaatacaaagaaagccctgaattagctttttctccagaaggtatagaagaactcaacataacgatagcaaaatataacgatggtttttatcataaacctatttataaggtgcgtatttatgaagaaggagtaaagtttcctttaggaaatagaggcaataaaaaaaataaatatgtagaagccgaaaaaggaactaatttattttttgccatttataaagaccaagaaaataatcgttatttcgaaacaattccttttaatgacgttctagaaacattaaagaaaggaatgtccgcagtgccagaaaaaaatcaagaaaaaaatactttagtctttgcattatcaccacaagatctagtattcgtacctacattagatgaaatagaaaatccagatattgtagattttaggaatttaacaaaagatcaaaccaatagaatttataaaatggttagttcctccggaaaacaatgtttttttattaaagctgaggttgctacttctattgtaaataaaatggaatttacgacttctaataaaatggaaaactccattgaaggtattcaaattaaatcaaactgttggaaactaaaattagatagattaggtactattacaagagtaatcaaataaccccccgttctacctacctcgtttgatctatttaaaagtaaagggcaaacaatcctcttgtttgtcctcatcctcagtctgaaaagtacattttatcttttaaaaaacttcatttttaataccatattttaataagaatcaagagtgcaaaataatttatcaaagacataagcaagcatacaaaaaaacgctgtagtgcattataaatgattagtacataatagaaatatagtacagataaaatttttgaacctaaaaagacatttcattttttgtcctcaatatagtaaaatcatatctgtaagaaagaaatatatgaattttcttctatcgtaaagtttagaatacgatttgtatttaacttttgattattatatgcaaaaggctaggctttgctatctaaacctcattggaggttgattttatttctcggtatttgttttataagaaaaccattcttagtggtgatttgatcaagaaaatgaaaagtatttaattcctcatttttattggaattctaactcattatgaaaaaatcaaaatttgaaagcaattcacaacaaataaaaaaactgattaaaagggttttaagctgtgaaacagcgcaaagatacaaaaatttgagagcaatttacaactgtaatatctgttaaaaaaatcataatataaagcgtaatttcttacaaaagtataaaaaataagttacaaaacaattttttaaaataaaattatattttttaacacttaaaaataacaaaatattaaaaatatttttttgatacactataaatcctgtctttgatgtcacacaaaaatctattataaaatatacaaaacatttaaaatagtaaaaaaaataaactccatcgtcataaaagctcattgattactttttattttcatataattttttaaatcataaattgttatatattgactgaataaatttataaaaaacatatttgtaaataaaaaaataagaattaaattgcatttaataaaataacaagaatattatagtttagtgtaattattataaaattgttagtaaaataaataagtaaatgttattatattctgtttttatatttttaaacttatgaacatcagttggtctgtacacgtagtacaaaaaggagataccttagaatcagtagcagaagaattaggaattagtggcaaatcacttcgagagtatcacaatacttattgtgagttaaaatatttgataaattataatgatctaaaaggaataaaagaactaatcttaccctctacacaagaaattaaagaaatcaaagaaacagaaaaaaaagtaagaatcctaagtagcttaccgttgtactacctaccccaaaattttcataaacccagttatgatatagaagaaacaatagaaacatcatcaaaagaaccctttacagtaagctataagacgaccctaaaaactacaaaagaaaaagaaggaaccataatatcgttaacaaacagccattttcaaaaagaagaagaaaccccagaagataagatctctacattagccatagcctgtataaatgcaatatacccgatagaatttattataaatcctggaggtcagataataaacataaaaaatcatcaagaaataataaacaaatttaaagaaagaaaattagaccttttaacctatttttcaggtaaaataaatcaaacttatattgatacgtttgaaaaaactttaacagacagaaaaaaaattctaaagagttattgttcaaccttattataccaagttcttttccccaatatgagttggtttagtacagaagaaaaaaaagactatttttattttcaacccaattcatacaacgtagaaagtgcagttataacacaacatgattttgaaaacacagactatataaaaaccattgttgcatcaagttatgaagaagggagcacatttgaagaaatattacgtaaaaaagttatagaatattcccaaactacaatagatccccaagaagaagatctatcaaattgggaaggaagcataagttttacctattacacctccaaaaaaaacaaacaattactaaaagcagaagccgaacttaagataaaaaacaaccaagaaatatatgtaaaacataccctaaaaataaattaaacaaaacaaacaaacaaaactaaacaactatatatgaaaaaatatagagtacaaaaaggagacacgctaaattccctagctgaaaaatttgctataaaagacggagcccatcttcgagcatttcacaacctatattgtcctttagaagacttattaggggcagaagtagtagcaggaaaagaactcctaatagcagaggaatccccttatataaaagaaaaaaacagcccatctgaaaaccctcaaaaaacatcagaagtagcggtatccaagagttcagaagaaacaacaaaaaaagaaacaagtccaagtcaatcctcatcaagttccacagcacatgaaggcaaacactttgtagtccaaaaaggacaatgccaatgcgaccaaggttttgaatttccatcctttaaagtaacgagtcataacaaacactattggaacgattcggaaggagaatcagattacctagccgtaactgaatcagacatacaactaaacccatcagcacaaccctttggacaatgcaaactaaaacccagctccggaggttatttgccctgctcttttgcagcagccggaaaatggagtaaaacctacgacaaagtaaaaattttagacaaaaaatgcgttaccgaaatatccgaattaaagtgcagtacaggaggtaaaataacgattttaaaacacggacaacaaagtcaaagcagtaaaagccaagtaaaaaaagccaatccacgagaacaacatttatacaaccccattatgaattttgaagaatttcaagaagaaatcagcagtaaaaacaacgaagcttggtaataaaaacacagatttataatgaaaaaaggcatatccgcaatatcaggagtaacctcgccgacagtaggcgaaaaatacacctatcacatatccgaatggtaccctaataccccgatatccgaaagagaacaagcaaaggttacctgggaactattcaaaaaaagaagcgatggtagatttaccaccacccatattaagaaaaaaggagacagcagttttacctttggcgaatcctcagtaggagagacctaccgattagaagggtatttataccaacccgaaggaggcggattaatcataacccccaaagccagcaaaatcccgaaaatctgcaaagtagacctaaactacgtagacgatagcaaaggcagtgtttttagttttacagaaaaactacgagccaaagcccattgcataaatatgtttaacaaagaagtcctatttaccttatgggaagacgatgcaaaaggcagcggacacaatacaaccaaccaactcattgataccaaaaaagcaaaagtagacctatacggagatgcagaagtagactttatgctaaccaaagcattaatgaaaaaagccatggaaggcgagacagacatacgagaactagaattttatgtaacagtagaatattacaaaaccaaaaaacacacaacctcaaacgtagaaataaaaaatccatcccccacagaaaataaaaaaccatcacaacccacggcaattaaaaaagccaaaggttctccggcagagcacaaacctaggagtaaaaaagaagagaaaggagtatttagaagcatttcagaaaccatagacgaaatatgggattgggcagaaacccaaggaaccgctcaaagagacaaaccccacaccattgaaatccccgaaggaaaaagccctgctgttataggaaaaacgaaggtggagagagcatcatctaggggtacagattgtggtgagagatattgtatcaaaaaaggagataaaagtgaactcatacgagaaattaatattcgtttagctggttttggtggaaatgttccaacggatgaattcacagagcgtactgaaaaaatgattaagcaatttcaacgtgattatatgaaagttcctgaaacgggaaaggtttgtggtaatgtgttgagagcgattgatgatttttctactaagtttgatataggtgtaactttttggaaccaattaaagtgtagttgttcaaccaaagggcaacaaacaacttctaagctaagaaaaataaaagaattaaacaaatgcactggttttggcgatcatacaggaaaaggaacatataaagatacaccccatagtgaagcaaatcataattatgaatatccaggaatacatagaagtttgctttttggaatcaaagcattgaaattttattttagcaaacaaacaatgtacactatagatcttatatcatctggatacaggtgtcgtttcaaaaattacaatacgacaaatcatcagggaaaagcaattgatattcagtttagtgaaaattccgaaccaatcagatatgagaacaaaagtaacttgccaaaactaagagatataagagatgaattttatataaagtatttaggtgctcagaaaaattggccagacgaggataaattttcaatagaaccaattgatttattgtatgataaaaaaggaaatgttagatatgatcatacatttagttggatacatattgatgttagagaatttaaatctatttatcttgatgacaaatacttttgcaaagactctaatggtttaaatggaaaaagtatagtgcttttagctcaagagttaggttttaaaaatgtatgtaactgcttagcgtctttcacaataaagaaaccccaagcaaacaattcaaattgtacaacttgtaaaatatttgaaaaaacccgatacgaattttatgaagaatttggaaatactgcaataaaaacagtaaaaaattttgggaagtcaaataaatttaaagggttatatatggtcgctcaaagacgtcaagaaaatggttttgataaagaagttccaaacaacaatccaatgaatattaaagggaaaggggatttaggaagtaaagcttataatacacatgaagaagtaaatggtaaaaaaatacctattaaggatggatttgcaaatttctcaagtgtggagaagggatttatgggatatgttgatttgttaaaaacaaattacaaagaagcttatgtggcaattatggacgattctaaaactattgatgattttttaataggattgcaagacaaaggaaaattaggttcttttgctactgcaagtaattataaaatatctgtaaaaaatattttcaaaggtgtagtgcgcgactatcaaaaatggctcgagtgcaaacttaaatgccaatcttattcatcaaagattgaagaaatcaaaaaagacattgaattattaaataaattaaaataaatatgaagaaattattcattcttagttcatttttacttcttttcataaactgtaaaaagacagaggaaaaaaaacaaagcaatattaataaatttccaatttccaataattgcaatttaaatcaagcacaaaatgaaattttaggattaaatgaagttgtaaaacaaaatcacttcattgattctatatctaatcataaaaaaggtatatcgctaatgtctgacagtttagttgtagaaaataaaacattttatcaaattaaaactggttataattcagatattagatttgaaacatactttacttttaatgtagaaaaagggaattgcgaaaatattaaagtattagaacctatagaaggaaatatgatttcgttatctgaatggagagaattaaataattctaataacattcaaaataatacaataagtgcttcagaaatggtaaatctcccttttaattttgaagaaatgactaaattatgtgggaacaatgaaaaaaagtgcaaagaaaaatatccatttttggaaggtaatgaattagagaacgttaaaaagttgatttcaggaaattcagaagatagtcctgataaaatttttaaaatcaacaatggtaacttggacttcaaaaattatatatattgtacatatggtgattctgattcacaaacattaatatcagtaagaaatgataaaataatttcaagcgcatctataggttacgctatgcctgagaatgagagctatcaatcttttgtttttgaaaaggatttatcaatagttgtttatgatattaaatataatacattaacaaaaaaaatattggaaaaatatcaagtaaaaaaagacggcacaatacttaagactaagtaatctattactaattttgacaatcaataaatagtctatctttttaagataataaataaaaacggctcaacgccgttttgtactacacgctcctttacaaactaaaaaccaattggggacataactgagatagaagaaggaaaatggcaacattttccttgccccacaggtatataaccttaaaaagaagacaagaatttgtgcggaaaaaggagcgatattacaaaaccaatacacacaacctcaaacgtagaaataaaaaagtaaagattttccggcagagcacaaaccaaggagtaaaaaagaagagaaaggagtatttagaagcatttcagaaaccatagacgaaatatgggattgggcagaaacccaaggaaccgctcaaagagacaaaccccacaccattgaaatccccgaaggaaaaagccccgctgttatgggaaaaacgaaggtggagaagaaagagaaatttaaacctgtgataggaaatggcgaagaagcagtaatatacataaccagtgaaattgcaactgaaatagaagtggataaaaatggtgatattgtttcttatcctgattttggaggttataatggaatagaggagcatataatagacaataaaatttattgtaaaaaaattaaagtaaaaggaaaagtaaaaagtgcatttcctacgtacaaagcctatatttatagaggtaatacagttggtgaagcagtaaaaaaacttaaacaagatataaaattcaatactcatgaaaatgctgaatcgacagttttagaagtggcaaggcatacaaaacgtaacaatctcaactatggggatggtggtccaatacctcccaacgtaattgataaactttatcgtttaaaatacaagattggaacaaacgatagtggaaaaacaagttatagatatagaattgttgacaatattccaagaaattttacaaaaataaaagatttcaaaaatgaatatcaaaatggagatatgtctctaggtaatagaagttccatttcaattgatccttgggattctcgtacactaattggttgtataggcataagaggtgtcaaaggagcttatcattcaagttttacggctttaaccgtcgagcagaaaaaaacttacaaaaataaatatcattgtattaataattacttagaaacaattataccagaattaacaggaatttatggtagacgaggatattccagcacagatgatattgcagtagctgaatcaagttacacaaaagaaataaatacttacgttttagtggatttattacctgagataaacagctgtaaatgtaaaagtttagatcctcctgtgaagaaaagagaggatttttacaattcatttggaactaaaactattgactatattacaaaaaaatctaatgcaaataaatttaaagcattatatatggtagcacaacgacgtcaagaaaatggttttacaaaaaatgttataggaaacaatccaatgaatattaaagggagtggagatttaggtcaagttgcaatggatactcatgaaacattaaaaaacgggaagtacgtgtctgtgaaaggagagaaatttgccaatttttcatctgaggatgctggttttaaaggatatatagatttgttagaaagtaactttaatgatgcatataagtctttatttgatgattctaaaaccatagatgattttacaactggattagaagacacaggaaaaaatggaccatatgcaacaggaaaagcacagggaggattaagtgcaaccgacgattataagaaaaaagtaaaagaattatttgagggtgttaaaaaagattatataaaaatttacgaatgtaaactatgcaaagaaaaggattctaaaaaaaaggaagaaattaaaaatgatttagagttattaaaaaaattaaaataaaaatacagatgaaaaaacttatttacatattatgtattgtaacaaatatctcttgcaaaaatgaaaattctaatgatactaaaaagatcgaagtaaacccaaaagaaaccatagatagcattaacaaaacaaataataataacttagaaatgaataataacctgattagttttggagaaattttcgatgaaggaatcacaaaattttctcctaaagaaattgaaaagccttttaccgaggagcaaaaagaatttaaaataaaattaaataaattcgaaagccaaaataaaaattttgaaccagataatttgcttcgactaattaatgataaaactttcgaacatagggaatatagtatagatagtgaatggtttaattattttgtgaaaaaatataatttgcaaaataatttaaaaaaacctctagaatctgcaattaatcaagaagattttaatgttgtaaaaattatactgaattatgattataaaatatcaaaacaagaattaaaattagctactgaatcttatgaaaattatttatcaaataaaagaattatagatgaaaaaaacggaataggtgaagacggagaaccaataccttacgaaatcaaaaattcaaaagctacagaaattcttagtttattaagaaaagaatacaattattatatttatgacaaggatggttcatgtaatctaagagatgacgctatgtcagcagggtttataatcggtcaagttaaatctggtgaacatatagacataataaataatgaaaatcaagattggttatatataaaaacaaaagacaacaaagaaggatatgttcacaaatcaagaattgtatcaaagtaaataaaaaaacagctattatgtcgttttttctctacattcttataaactaaaaagacaatgaaaaaattcatttatctagcactaatagttacgtgtttttcttgcaaaaaagataatgatacaacaaataattcgcacgattcaaataaggaagacacatctaaacttaataatcaagaaagtaacagtttagaaaatcaagaaagttcgattgaatttggcaatttattcaatgaaggatctcaaataaattttactccaaatgatatagaatcgacaaaaaacaatgaaataaaagaatttggaaaaaagctaaaactatacgaaaagaaatacattttagaggaaggattggatggtagtatgcttgaagatttaattaataattctacatccattggttgtaatagatatgttaacagtagttggttagcatattttttaaacaaaaaaacaatctagaaattttctatgatgatttaataaaaaaagcaattactcaagaagatttggatgctgtaaaaacaatagttcaacttaattatatagtttcaaaagatttactgcaaattgcgaatgatacaaaactacagcaaaaattggaaaaaatgaaaaaagtaatgttgatacctatttaattgaagaatctaagattgatgaaattataaaatttcttaatctcaaatacaagtctaataaaatttatgataaagatggatatactaatttaagagaaaaaaatcaactaattcaaacgtagtgactaaaattaattcgggtgaaaatattaaagaagacaaggatttgtacagaaaaaggagcgatattacaaaacaaaaacacacaacctcaaacgtagaaataaaaaaataaaggttctccggcagagcacaaaccaaggagtaaaaaagaa

SEQ ID NO: 1203 - DNA, 24377 bp, synthetic construct
  source 1..24377: mol_type = other DNA
  misc_feature 1..24377: note = Synthetic
atgcaatttgaccacttcatttacatcagaaacgaaaccgtctttcaattgagaaatatgaaccaatccgctttctttaattcctaagtctacaaaacatccgaaagcggtgatattgttgacaattcccggaagaatcattcctgtttttaagtcggtaatcttttttacattcggatcaaattcaaaaacttttgcggcttttctaggatctaatcctggtttttccagttctttcaaaatatcttttattcctaaaatcccgatgtcttccgttatatatttttcaggttgaattaaattgattttccctttattagcaactaattcattggttttaatgcctaaatcttttgccattttttcgataattccatacgcttcaggatgaactgccgaattatctaaaggattttcgccattggtaatcctgatgaaagctgcagcttgttgaaaagctttttctccgagtcttggaactttcttcaattgttttctgttttcaaaagctccgttttcagcacggtaattcacaatgttttctgccatcttttcaccaattccggaaacgtagcttagtaatgatttacttgctgtattcaaattaattccgatggagtttacgcacttcatcactgtagaatccaattcgtttttcaattgtgtttgatctacatcgtgctgatattgaccgacaccaattgatttagcatcaattttcaccaattcagccaacggatcggaaagtcttcgtccgatagaaactgcaccacgaaccgtcacatcaaaacttggaaattcatctcttgcaattttactcgcagaataaacagaagctccggcttccgaaactacaaaaacctgcaaaggtttatcaaaacctatttttttaatgaaaaattcagtttcacggcttgcagttccgtttccgatagaaattgcctgaatatgataagcatttaccattgagcgaatttttttcattgccattccgctttcgttttgcggagcgtggggataaatagtttcgttgtgcagcaaatctcctttttcatccaaacaaaccactttgcaaccgcttttgaaacctggatcaattgctaaaattcttttttctcccaaaggcggcgctaacaaaagctggcttaagttttcagaaaagatttcgatggcttttttgtctgctttttctttggcttcctgaagcgtttcgttggaaatcgccggctctaaaagccttttataagaatctttaatggccaaagcgatttgctctgagctttcatttttagatttgataatcgcattttcaataaaatcaagtgcttcatctttatcgattccgatattaatttttacgaagccttcagtttctgctcgaagcattgctaaaagtcggtgagaaggtgttcggttaaggctttcttcccattcgaaatattgcgaaaatttttgagctccttcgtcatcttttttagctttaacgactttagaagtaacagtggcttttctttgaaataatcggcgaagatttttacggacgtacatattttcattaatccattctgccatgatatctcttgcaccttgcaaagcttcttcttcagaagaaacctgctcattcaaatattttgaggctaaaaattgaatatcctgagctttttggctcataatgattttggctaaaggctcaagacctttttcctttgctgcatctgctttggtttttctgcgttttttgaaaggtaaatagagatcttccaattcctgaatatcaaagctttcttcaattcttgtttttaattctggagataaagcatcttgctcttctatagattttaaaatactttctttacgttttatgatgtcttcaaactgtttatttagtttaaaaatttgctctatttgaatttcatctaaatttcctgtagcatcttttcgataacgagaaataaaagggattgtacagtcttcagatagtagttttaaagtagcattaatgcttttatcggataggttgagtgttttatggataaattctgttacagtcatgaggcttttttagaatggctaaaatactgacttttttagaggaataaaatatgtgtgaaggcaatttatactttgtaaggtttatcgatcaaacatatttaatgaatctgataatgaagtaaaaatattgatttgttgaaaaagataaataatctacatttttagtagattatacaattgttttagataattatgttgtggtatgaataaaaatactatatttgtgcaccatcacaaaatattatgcctatgaggaaattttctacttcttctatttcttttgtatttacaaattcagatgtttctttaatccaaaaaacatcttattcacttactaaccatattctattattatgaacagatttttaatgatcctggggattttgctgtgctttcagctcaaagtctccgcacaatgtacggcggtgcccgtcccttttttacaatctttcagcgctggagtattacctccctgctggacaagccaaaaccctacaagtacatcaacaagcttatatgttaaatggagatttagcacgtctgcgggatacggtgcaactggaaatggaggtaagcccgcaggaacttttgcctgggttgatgcaagctcaccatacgataatgagcacacggttgaactcatcagtccgcagattaatctgacaggattgaccaatccttatgtaaaatttgaatggtttaaaaaccatcttacttcagcaacaggaacagttcctccttacgagcataatagaatgaagctcgaagtaaataacggaagcggatgggttgagatatggtctgataacagcaatgcctcagaatggagaacggtaggcgttcctcttgctgcaacgtatgtaggagcgacggttcagcttaaatttacagttgataaagatgtcgctaacaacggatatttttatgatgatgtgcttttggatgaagttcaggtaatacaggcaccaacgtgttttgaacctgtgattgcattagcaacaaatatcactcccaattctgcaaccctgaattgggctgcacccttagctccggctcctgcacctgcaggtggatatgagtattattacagtacttcaaatacacctccaactgcggcaacggtaggaactattgttcctggaatttcagctaatatcactcctttggttgcaggaagtacttattattggtgggttcgttcggtgtgttctggttcagataaatctttatgggtagagggagagccttttactccgggacagatcggtggcggaacagcaactcatgcctatttgccggtatattcttgctcaggatttaattattctcaacagatctatacagccacagaaattgcaggtgcggttggaacaaataatatgataacttcggtaaagttttttgtatctactactgcagctgctcaggcaaattataatcaatgggttgtttatatgggaaatacggctcaaaatgattttgccacaacgacaagctggattcctgccggaacaatgactcaggtttatacgggaacactccctgcaatgactgcaggaacatggattgaaattcctcttgctacacctttcctttgggacggaacaagcaatgtagtggttgcggtagatgaaaatgttactggcacatcttgtacagccaactggggaagttattctgcaggagccaacagagggatgctttattataattcaaccaccaatccggatccactgaatcctcctacggcaacgagcagatatgctgttttgccaagattgcaacttacaggtactgttttgccttcgtgtacgaatgtgccgccgtcaaatattgcagtaagtaatattacagctacttctgcttcagtatcttggacggcaactcagaatgcgacttatgtcgtaagatacagagttttaccatccggagcatggcaaacgattaatgttactacaccatttacaaataatgtacagcttcctgggcttattgagcaaacccagtatgaagtggagatcgctacaatttgtggtactcagggtgttttttctgcaccagtttcttttactacaccggctcttacttactgtagttcgggaactgccactgtgaccaatggatatattaacaatattaccatgatagggactaatgttccgaccacaactaacaattccggaccaagtacttatactgattattctactgatccttctaagacgattactttattaagaaattcggttaataatacattgtcggtcggcagagcgattgcttctggaacttattctacgtacgcatggattgattttaatggtgacggaattttcaataacaaccctgtaggtactgcaggaggagaacgaatcatgaatttagggtatactaatacaactcctgtaactgcaaattttgatgtaccggccaatgcatataatggtaccagtaaaataaaaatgcgcgttattgtatatttcaatactccaacagacccttgtatgaatcttacaagcaatggagaagtagaagattatcagattaaatttattgatcttcaaccttgtaccactgctcctccaacaggtattgcagtgggtaatctcacacataactcagcgtatgtatcttggatgccaacagctaatgcaacttatgttatcagatggagacaaggcactactggcgcatggttaccaagtgcagcaggattaacacttcctgcaggtcagagctttcatacaattaccggtttgactgagcaaactgcttatcaggtacagatagctactatttgtggcggaaatcagggagcattttcaccattggtagattttacaacaccagcgattacttactgtaatatgactggaactggtacgaatgattacatttctaatgtaaaagtgacccctgtaaactttccaatgatggagaatatttcacttcaaacgaactacattagttatactacacctacaacattaattaatctggaaataggttcaataggtaatcaaattgcagtatcaaaggcttgggtgggaactaattatggagattcggtacacgcctggattgactgggatagaaacggaattttcacagacagtgaaaaaataatgaatactccttccaatactacaaccccgattaatgctacatttgatgttccggcaacaggagtttatacagggacgaatactacgacaatgagagttgtgcttaaacgaggaagtgcaccagtgatgtgtcaggatgcagtgaatggagaggtagaagattatgcagtaaaactaagaccatgtaataatgctactccgggaactcctacttttacaacgataactcataattcggttattattaattggactccagctgccaataacaatgcatttgttttagaatacagagcggtaactaaccctgcttctggatggacgacattgaatctttctgttttaggaggaaatccacctgtgaatattacaggattaacacctgcaacaacgtatgaagttagggttgcggcagtatgtggaagtggtggagcaggtgcttttacgcctgtacagacatttacgacaagatgcgatcctacaccgccaaatgtagtgatatctaatattacatcaaattcagcgatggtaacctggaaccctgttgttccaaatgctacttatgttttaagatggagagaggtaggaacaaccgtgtggaatactcctacattacctccgccgccagtaaacacttatacgataccaaatcttgagtcttataaaacttatgaagtgcaggtagcaagtatttgtaatggagaaacaaatcctaacccgtggtcaattacacagatatttacaacgataagggtttgtgaagttctgccaccaggctttaccatcacacagataacccctacaactgcagaagttgtttgggatgcgtatacaggtacaggagcgaccaataattacatattgagatacagaaaagtagggataccaagctggacgactattaatgtaagtaataatacctataccataacagggttattagaattaactaaatatgaaatgcaggtcgcaaatgtttgtagtggaggagccggaaattatacacctccttactattttacgacaccgacggtgatttattgtcagatgcattcaactaactttgcttctgaatatatttcaaaagttactgccacaccgagtggtaagcctgaaatgattaatgtttcaacaggagctgcttattctgattttactggagattcaactaaatttattgaattaattcaagggtcaacaggaaaccaaattactattgataaaactcaaggagcagattctggagttgcggtatggattgattttgacagaaacggaacttttgatcttgatgaaagaattcttgcagacggacctaattcaaatcctacatcaagtatgacattcagtgtgccttctgatgcatttatcagtatgaccaattctaaatatgttgtgatgagagtagctatggctaaaggtgctataccagttaactgtatcagtttcgatgatggggaagtagaagattatacggtaagaatatcaaagttacccattgtaaattcggttaatcagacagatattttgatttatccaaaccctgttagatcagtattgaatgtcaagaatattagcgagaaggcaaattataaaatttatagtgctgctggaagactagtatctagtggattaatcgttaataataaaattgatgtcagcgcacttattagtggcgtttacgttattgatattgacgataagaaaggaaatgtgcagaaaaaattcattaaagaagaataactgttttagtttccatttataaaaaataagctctcaattctgagagcttattttttatattaaagcataattatttattttaaaacatcattgtaatacaacaagtcattattttcatcaaaaccaatgatcatcacacggaaattctttgcatcatcgttattataccattgcacgatagtaggttccttaggtttactttccagataaggattccaatataaaatacttcttttgtcctcaggaacagattttgcactttcttcatcgtagatgccgttattaaaaggtatttctttgtcgtaaccgtatagtttaacttctttaagattagacggtagagtagtatctatcgctgcagagccagtatttccaccacgtcgggtatagatggcaacagctccgtttcctcctccaaagcttcctgcaaaatttcctttaatgactttcaccattgctatgtttgatacaggaatattagaaatttggcttgcatcaactctcatttcgtctaagaaaaactccatagctccaccccgatttgtagcagtatagctaccaccctgcatctgaatctgaagaccggcaactctaccctgtagatattgcaaaatattttgagaaccttgtgcactttgattttcattcaccaaatcaaaaacagtttcatttccacttctgaaaagaggactgcttagttcattattaagttttttggttaaatctttcttttgtgctttaactttaacttcttcaataagcgtttctttttctcgtaagcctgtctgtgaacttttattcgctacggcacgttctatttcgagaggtattttatctgttgaattgcgctgtacaagagtataattgctagaaggtagattgcttctaaatggtaagaatgaaaatgcgggttggaaataaatctgtaccgaatttttattagctttctcgtgattaagctgataagaaaatgccattgaatcttcaaaaaccaaaccacttaaggtgaacattccctctttgtccgttttaatcaaattatacttaattccctgatctggcattttgaaaattaaattaatctcttcttccgaagcaggtttccctaatttagttgcttttcctttatatgaaagataactttcaggtttatatttgataactggaaaatttccggacataatggtttgccaattaaatctagaccatttttctgaaattaataaagcatccagtgcatctgtgtttctgttttcactgaaatattgggcaggataatatatttttgacataagatctcctgtaagccaaagtgtgcttggtaaactattttcgttctcaggattttcactttcattatcggatacacttaccagataactcgacatagatgagtcgttatcaatgttaaaagaattgctgtctctgggttttaaactgagcgaagtcccttttaaagaaggttgtttaagtttaagaacttgaggttgtataaaacaaagtcgttgggcaacaatgttttcagactcatcaaaaatagtaagattaagaattccatttaccaattggctggtcggaattgtataaaccttatctgaaatttgagaaacattcgctttgtaaaccaactgattattgatcgttcctaagattttatatttagcgttttgatcaacatttttacctttaaagacaaattttacggcatcagattgactctgaacctgtaaatttattcctgaagaagctacttcgggtaagttaacagtctgcttgattcctttatcatcttctactgtaagctgatactttttcccgccaattggtgtaaaactaaaagatcctgtattttgatcaaatcctttgaaagtaactaatttggtttgcggattctgagtttctgtaatgaatccattccagtttgttggtgtttcgccttttgattgcagtcttacggcaaatttagtattgatgccgtcaataaaagttccactttccggaaatactgcggcagaccatggagcagaagtgtttttcactaacttttcagacgatgaaggattgtatattgtaatcggcattatttcattgaaatcgtcactgaaattccccatccatgtagtataagctctgatataataaacgtcttcttttaaatctgcgggcaaactaatacttccgctgcctttaccattaatgagaggatagatttttttactgatttgctttttattttgatcgtatagttctataaaaacattggtagaaattgtagaagggctgtatccgtcaaatacaaaagatgtaaaccacagattttcaccggcaacataattctttttgctcataaggagatgtattttttcctgagggaagttttcttcaaactttttaattgcttcttctgccttgttctgagaaaaatataatggagcaataattaatgataatgcaataagtggtttttgagagaaacagatattcattgtatggattcgtgttttaatatatttcaaaaatacatttttttctattgaaagagagatgaatagtgctgttatttaaataaaaatgccccgcagataggcgaggcgctaaatgttttcacaacggaataatccttattgtgaattgctttcggatacaaatctaaaaataatatttttaatcaatttacggttttccacatttttatgaattaaattcttattaatttagaaaactcgattaaaataaataaccatgacaagtatacttggattcattacgaaaaaaaggttgttcaaatacatgaacaacctcagaaagcaattcacaacagatacctgattagttaaaaactaaatctgctggaaaataatatcaatattaactgttggcaggaaataagttgggcttggacctccaatcaaatcaatttcgtcaaatagattttgatattttcttattgcaaatatacaataaatttaatattatcaggtatcttaaaatatttaatttaaatttgtaaaatatttaagataatgataggctttaagtttttttgaaaaatactttttaaattaatactttttaataaaatggcaaaaaatatacttggattagacttgggaaccaactcgattggttgggcgctaatcaatcaagactttgaaaacaaacaaggtaagattcttggaatgggaagcagaataatccctatgtctcaagatattttgggcgattttggaaaaggaaattccgtttcccaaactgctgcaagaacaggttatcgaggtgtgagaagattacgtgaaagatttttgttaagaagagaaaggcttcacagagttttgaatatcattaattttttaccagaatattatgcttctcaaattgattttgaaaaaagatttgggaaatttaaagaagaaacagagccaaaactagcttataataaagatggttttgttttcaaaaattcttttgaagaaatgcttgctgattttaaaaactaccaacctcaacttttagaaaacgataaaaaaataccttacgattggacgatttactatctccgtaaaaaatcactttcacaaaaaattgaaaaagaagaactggtttggattcttttgaattttaaccagaaacgtggttattatcagttgcgtggtgaggaagaagaagagaatccaaataagttggtagaattttattctttaaagattgtagatgttttggcggatgatccacaaaaaggaaaatctgatatctggtattctttagttttagaaaatggctgggtttatagacgttcgagtaaaacacctttgtttgattggaaagataaaacaagagactttattgttactactgatttgaatgatgatggaagtattaaaacagataaagacggaaatgaaaaaagaagtttcagagctcctgcggaaacagattggactttagttaaaaagaaaactgaacaggaaattgataaatctcacaaaaccgtcggtgtctatatttatgaagcgcttcttcaaaatccaaagcaaaaaattaaaggaaaattggttcgtacgattgagcgaaaattttataaagatgaacttaaacagattttagaaaagcagaaagaatttcatcaagaattaaaaaatgatgatttatacaacgactgcgttcgtgaattgtaccgaaataatgaagcgcaccaattgactttaagtaaaaaagaattcgtacatcttttgatggaggatataattttttatcaaagacctttaagaagtcagaaatcgtccatttcaaactgcagtttagaatttagaaaatacaaagatgaaaatggagtggagcatactcaatttttaaaggctattccaaaatcgaatccgtattatcaggaatttcgcatctggcaatggatttttaatcttaatatttacaaaaaagatgatgatactaacgttacgaaagaatttttagatacaatcgaaaacttcgaaagtctgtttgaatttctaagtaacagaaaagaggttgagcaaaaagcattaatcaaatttcttttagagcaaaaagattttaaaggaaaattgttaaatgctgaagtggaaaaattccgctggaattttgtagaagataaaaaatatccttgtaatgaaaccaaaacaatgatttcttcacgtttggataaagttgaaaacatttttgaagatttcctgacgagagaagttgaacagagaatttggcatattatctattctgtaaatgataaaatggaatatgaaaaagctttaaaatcttttgctagaaaaaataatctggatgaaaattctttttttgaagcgttcaaaaaattcccgccattcaaaagtgaatacggctctttttcggaaaaagcgattaaaaaattattgcctttgatgagattggggagatattggaatgaggatgaaattttgaaatatagtgatgattattttaaaaatatagaatccttattaggtgtgctgaaacaaagagataaaaatatttctgatgctgaccggcaaaattataataaaacaataaataataagctacgtgaagaattagaaaattttcaaaatgcagaaatagaatcttttcaagggttaagattacatattgctcaatatattttttatggtaaacattctgaaggtgataatgaaaaattcgcttctgctgctgatttggaaggatttttaaaagaatttaaacaacattcactccgcaatccaattgtagaacaggtaattacagaaacgcttcgtgtggtaaaagatatttggttgcaatacggaaatggagctaaagattttttcaatgaaattcatattgaattgggcagagaaatgaagcagacaaaagatgaaagatcagatgcgacaaaaagaattacagaaaatgaaaataccaatcttcgtatcaaagcattattggctgaaatgatgactgataattcggttgaaaatgttcgtccatattctccaatgcaacaggaaattttaaaaatctatgaagatggaattttaaaatccgacatcgaaattgaagatgatattctgaagattagcaaaacagcacaaccttcttcatcggatttaaaaagatacaaactttggctcgaacagagatataaatcgccttatactggacagattattccattaaataaactattcaccccagaatatgaaattgaacacattattccgcaaagccgatattttgatgacagttttagcaataaaattatttgcgaatctgcagtgaataaattgaaagataattatatcggactaggttttattaagcaatttggagggactattgttgaatgtggtttagggaaaaatgtaaaagtttttggagttgatgaatatgaagattttgttaaaaaacattacgccaacaatcgaggcaaaagaaataagcttcttttggaagaaattccagagaaaatgattgagcgacaattgaatgatactcgtcatatcagcaaatatatttcaggtgttctttctaatatcgtgagagcagaagacggaacagatgaaggtgtaaattccaaaaatattgttccgggaaacggaaaaattacgacacaacttaagcaagattggggattgaacgatgtttggaatgatttgattcttccacgttttgaaaggatgaatcaacttaccaattcaacagatttcacagcctggaacgaaaatcaccaaaagtatttgccaactgttccgattgagttttcaaaaggtttttcaaagaaaagaatagaccatcgccatcatgctttagatgctttggtcattgcttgtgcaacaaaagaccacgtgaatttattgaataatcaatctgcaaaatcggatactaagcgttacgacttgaaaaagaaactgatgaagtttgagaaagcggtttacaagcatccacaaactgacgaaagaatagaaagagatgttccgaagcaatttttaaaaccttgggaaagctttacaattgatgctaaaaataatttagataaaatcatagtaagctttaagcaaaatttaagagtcattaataaagctaccaattattatgaaaaatatctagagaaagatggtgttaaaaccaaagaaataataaagcagacaggaacaaattgggcgattagaaaaccaatgcataaagaaactgtttctgggaaagttaatttgccttgggtaaaagttccgaaaggaaaaatattaacggcaacgagaaaaaatcttgatacgtcttttgatttaaaatcgattaattcaatcacagataccggaattcaaaaaattcttagaaattatttggaatttaaagaaagcccggagttggctttttcacctgaaggaattgaagatatgaataaaaatatcgagaaatataatgatggaaaacttcatcaacctatcaataaagtgagagtttttgagttaggaagtaaatttcaagttgggcaaactggcaataaaaaagataaatacgtggaagctgccaaaggaacaaatttgttttttgcagtttacgaagataaaaatggaaaaagaagttatgaaacaattcctttgaatattgttattgaaaggcaaaaacaaggattgtctgttgtcgacttaaaaggagtaaatgatttctatctgtgtccaaatgatttagtttatattccttcggaagacgagcttgaaaacgtaaataacattgattttaaaaatttcacaaaagaaaaaaatgaaagaatttataaagttgtaagtttttcgggtagtcagatattctttgctagacaagatattgcggtatcaattgttaataaagcagagttttcaactttaaacaaaatggaacgtgcaattgatggttctatgattaaagagcattgtttaaaactaaatgttgatcgtttaggaaatatttcaaaaacataaatctatgataacccgttccatctacatcggcaatcccacctatctgaaactcaaagacaatcagatgaaaatcttatgtccggaaacaaaagccgaaaaggggagtgtacctgtcgaagatttgggtttgctgatgttagaccattttcagattacgatttcccatcaactcattcaaaaaatgatgggaaacaatgtcgtggtcgttagttgtgatgcacatcatttgccacatggaataatgttgccactttacggacattcggaacattcggatagggtaaaagaccaattagaagcaagtgaaccactcaaaaaacaactctggaaacaaacaatcgaatgtaaaattgaaaatcaaaaagaagttctccggcgattaggaaactattacgaaccgatgattgagtatcaaaacaatgttaaaagcggtgatgttaccaatatggaaggcatcgcagcacaacattactggaaatatctcatcagtttggatttcctgagacaacgttttggagattcacccaatcagtttttcaatttcggttatgccgttctaagaagtattgtcgcaagagcaatagttgaaacaggattgcttccggttctcggaattttccataaaaataaatacaatccttattgtcttgctgatgatttgatggagccttaccgcccatttgtagatttgctagtcatgcagtggcttgaaatacatcccgaaaccgaagaattaacaaaagagttcaaagcccatatcctccaaattgccacaaaagatgttcggattgatgataaaacaagacctttattaatttctgtaaaaacaactgcaacctcgctttataaatgctacaccggcgaaaaaagaatgatttcctatccagaattacagtaattttttttatgggcagcttttccgccttccgctcccaatcttttttgcagacgatttcacattaaatagtatttgagagcaagcaaaaaaggatttccgctcaagtcgggctgcaaccattataccgcaaaacaaaaccatgaaaaatgaatgccgaaaggtttaacgcttaccgaattatgtgggttttagtattatacgacttaccaacggaaaccaaagccaatatgaaagatgccaaccgctttcgtaaaggcctaattgatgatggctttacattatttcaattttccatgtatgttcgccattgcccaagtcgcgaaaatgctgaggtgcacattaaacgcacgaagtttaatcttccaaaggcaggaaaagtagccatcatgtgtattaccgataaacaatttggcgacatagaaatattctttgccagaaataaagaagaaccgtcgcccacattccaacaactcgaattattctaaatttcaaatactaaaaaacaacaaaacccattgaataacaatgggttaaattttgaggttgtgttatatctcaaagatactcaaaaatgaaagcaattcacaacaagttaactcttttcctgtaagtgagaaatgttgtgttatatctcaaagatactcaaaaatgaaagcaattcacaacaagcaagttgccacaaaatatcaggggtaggttgtgttatatctcaaagatactcaaaaatgaaagcaattcacaactatagagcctctactgtgtactggttttagttgtgttatatctcaaagatactcaaaaatgaaagcaattcacaacacaaattgtagagtcctctcatcctcttccgttgtgttatatctcaaagatactcaaaaatgaaagcaattcacaacactttaagaactgtaacacctcaacaaatggttgtgttatatctcaaagatactcaaaaatgaaagcaattcacaacagctgctgtcttattcttatcgatcaaattgttgtgttatatctcaaagatactcaaaaatgaaagcaattcacaacccgtaaaatgctgcaatccaaaatatttatgttgtgttatatctcaaagatactcaaaaatgaaagcaattcacaacaattcagggtcactatcaagacacattcttgttgtgttatatctcaaagatactcaaaaatgaaagcaattcacaacaagtgatgcaagcaatcaaggaccatactggttgtgttatatctcaaagatactcaaaaatgaaagcaattcacaacactgtagtgctcagggtatttgctttcacagttgtgttatatctcaaagatactcaaaaatgaaagcaattcacaacgctgtagatcccctcatttgaatttgagaggttgtgttatatctcaaagatactcaaaaatgaaagcaattcacaaccggttttgatcctatactcagtgctgttatgttgtgttatatctcaaagatactcaaaaatgaaagcaattcacaacgatattaataaactgctgagcactgtatccgttgtgttatatctcaaagatactcaaaaatgaaagcaattcacaacattctattaatttccctctccaaataccatgttgtgttatatctcaaagatactcaaaaatgaaagcaattcacaacacaacgagtcttttgaatattttaatgcgggttgtgttatatctcaaagatactcaaaaatgaaagcaattcacaaccctgtaaggacatttccttctgtcccttcggttgtgttatatctcaaagatactcaaaaatgaaagcaattcacaacatctggtgacgatatatcaacataggtattgttgtgttatatctcaaagatactcaaaaatgaaagcaattcacaacgggcgaaggctttgtgattatctatggtgggttgtgttatatctcaaagatactcaaaaatgaaagcaattcacaaccgtgaaaagggtggtttaaaaacacaatttgttgtgttatatctcaaagatactcaaaaatgaaagcaattcacaactcatgatgattttggtttaaatagtactttgttgtgttatatctcaaagatactcaaaaatgaaagcaattcacaacatgtaaaacacgctcctataatgagcacaagttgtgttatatctcaaagatactcaaaaatgaaagcaattcacaactacagactgctcgtaagcatctgatttagtgttgtgttatatctcaaagatactcaaaaatgaaagcaattcacaacttcttacgctgcttattataaagatctaaagttgtgttatatctcaaagatactcaaaaatgaaagcaattcacaaccctgcttttaactgggattatattcagtttgttgtgttatatctcaaagatactcaaaaatgaaagcaattcacaacgacaagctttgtgacaagaaatgaaggtctgttgtgttatatctcaaagatactcaaaaatgaaagcaattcacaaccgccagatagtcatctattttatgagctgggttgtgttatatctcaaagatactcaaaaatgaaagcaattcacaacaaataaaatactcgtatggaactaatatcagttgtgttatatctcaaagatactcaaaaatgaaagcaattcacaacaaagtatgatttagcattaattactaaagggttgtgttatatctcaaagatactcaaaaatgaaagcaattcacaacatccataaccacggcttattttctttatctgttgtgttatatctcaaagatactcaaaaatgaaagcaattcacaacgtccgcttctgcgtatgaaataaaagttgggttgtgttatatctcaaagatactcaaaaatgaaagcaattcacaacgagctcccactgcagaagttgaagttttcagttgtgttatatctcaaagatactcaaaaatgaaagcaattcacaactacgtcggcttttcgatacgcggccatttcgttgtgttatatctcaaagatactcaaaaatgaaagcaattcacaacagtggtgatatggacgattttgttgatttggttgtgttatatctcaaagatactcaaaaatgaaagcaattcacaactgttttctctcgctggcatatagttttcaagttgtgttatatctcaaaaatgaaagtaatttttaaaataaaaagttcccaaaataatttcaggaactgtaagttaaaatttttgatacttaaaaataactaaggcaaaagtttttcgtaataaacaggagtgtatttttcagcatcaaatcccataatcagaaaacggaatttttttgcagtatcattattataaaaatcgacctttgcaggagtagccggatctatctccatattgggattccagtagagtacaggtctgtagtcactgcttattttagataattcagaatttccataatcagaatcagggtattcttcagattgattataaccttccataacaaaaaagttaagattgaccatttctgaaagtgagtttgttttggttacaggttttgtatctcctcttttagtataaataagtacacctccgctaccaccgccactcataccaattgcaccgtctttaataatttttaccatagcgatattatctgaagataagccggtaagagtgcttgcatcagttaacatttcatcaagataaacattcgcttttgcttgacggatgtatggggttggaattccattttcgtaattaattgttaatcccgcagcgcgaccttgtagccattgtaatatattttgtgaactcagcgactgattttcattgacaaaatcaaaaaccgtctcactcatgcttctataaagcgggctactcagtttgttattaagttcatctttgaggtttttctttttagcttttaattttacttcctcaatggtaattatcttttcatcatattctttttttgctttttgagaagctattattttattaatttctgcgggttgcgatgaatctgatgttctgtctaccaattgatatccttcaattgcaggtaattctttttttagcggaataaaagtgttgacaggatttacaaaaacattagttcggctttttaaagcggcattcgccccattgaattgataggtgattttgatgggtttttcgaaaagcatattgtcgaagaaaaattctccattactgtctgtttcaacctgaagaacttcgcttcccgatttgcctccttctataaacataatcaaatcttgctgaggtgcaggctttgcattaagggttactcttcctttatatgaaatgtatttagaaggatgatttataatagaagggtaatttcctgctataatttctttccagtcgaaagatttccattgttctgaaatcaataaagcatcaagtgcttccgtatttcttttttcggtaaaatattgtgcaggtctgtcgattttagacttgataacacttgtaagccataatgagcttaaaagattttcatcctgcaaagattttttaaactcagggtcaaatacggttacagaataattgatgatatctttaataggcttaatttctaaagaatttaaagctcttttttctacgctgattatttcaggctttacttcaggagctacaatgtttagatgctgaggcattacaaagcacattctgcttaccaatacattttctttatcgtcaaataccgtaagttgtaaaacaccgttgataagctgattggtgggtatcgcctgaaatgaatcttttaactgattaactttcgctttataaaccaactgatcaccgatattggcgataacagtgtagtagggaatactttcgccggtgttttttattttgtatttaacattatctttttcactgataacctgcagacctactcccttttctaaagctttcggaagtgctacagatttttgtaaaccgttattatccgtaattatcgcttcgtaaattttatctttttcagggcttaatgagaaaacggcaacattttcgtctaaacctttaaaagttgcgattttcttttctggatggtctttttcaattacatacccttcccattgagagggtggagttccgttgttatgaagacgtatagctattttagactgatttccggcaataaaagaatttccttccggatgtactgttgcagaccatgaagaagatttatctgcaactaattttctaggtgaagaaggattgtatataggaatttgtttaatatattggaaatcctcattcagattgctcatcatcggagtataagctctgacgaaataaatattttcacccagattttcaggaatctgaaaacttccctgaactaccccgttaaaaataggaaatctttttctcaaaatctgttttttatttttatcataaagctcaataaaaaagttggttgaattatcagatatcgaaaagtttctgaaaaccattgcattaaaccacagtgtttccccagaaagatataaatccttatttgtaaggatataaatattttcctgtgaaagattttcgttaatatattgaagagctttgtcggcagattgttgtgagtgaatgtggctgaaagatgccaaaagaaaacagaatgtaattattcttttcatattctatactacattaatattatacaaataaagtgaaaactgtttgtctgataaaatatttaatatattttatgatttaataatttattagagatattttcaagtaattttataatttataaaattatttatacggaatattttaggtcatttattttgatttaatccctctttttcagctactttaaacttatttaatctcttaatttgctgtaaagtagtttgttgttaactgaggaattattgattaaaattatctgtaaaatggaattcgctcattatgaatttgttaataaataaatattgatagtggttaattcattaaaaatcactaatttcgcacccgtaaaaatcattcatgcaaaacattagaaatattgcgattatcgcacacgttgaccacggtaagactactttggttgataagattattcatgctacaaacattttcagagaaaatcaggaaagtggagaattaataatggataacaacgatcttgaaagagaaagaggaattaccattttatcaaaaaatatttctgttacttataaagacgttaaaatcaacgttatcgatactcctggtcacgccgattttggtggtgaggtagagagagttttaaaaatggcagatggtgttatcttattggtagatgcattcgaaggacctatgcctcagactagattcgttttgcagaaagcattagaattaggtcttagaccattagttgtaatcaacaaagttgataagccaaactgtcgtccggatgaggttcacgatcaggtatttgatttgttcttcaatcttgaagctacagaagagcagttggatttcccaacgttctacggttcttcaaaacaaggatggttcaacacttcattagaacaaactgacaatattttcccattattagatggaatcttacaatatgttcctgagcctaaagttgaggaaggtaacttacaaatgcaaatcgtttcacttgatttctcttctttcttaggaagaatagcaatcggaaaagtgattagaggagaaattaaagaatctcaatggatcggtcttgcgcaagctgatggaaaagttttaaaaggaaaagttaaagaattatacatttttgaaggtcttggaaagaaaaaagtaactgaagtaaaagctggagatatctgtgctgtagtaggttttgatgctttccagattggagattctttcgtagatcttgaaaatcctgagccattgccaagaacttctattgatgagcctacgttgaatatgacgttctcaatcaacaattcacctttcttcggtaaagacggtaaatatgttacttcaaaccacctgaaagaaagattaactaaagaattagagaaaaacttagcattaagagttgagcaaactggtgatgcaaatactttcttagtattcggtagaggtattcttcacttgtcagttttaattgaaacaatgagaagagaagggtatgaaatgacaattggtcagccacaggttatcttgagagagatcgatggagaaaaatgtgagccttatgaatctttggttgttgacgttcctgaagaatatgcttctaaagttatcgacttagctactcagagaaaaggtgaccttcacattatggaaactaaaggtgaaatgcaacacatggaattcgaaattccttctagaggtttgatcggattgcgttctcaaatgttgacagctactgcaggtgaagctattatggcacaccgtttcacagaatacaagcctttcaaaggtgcgattcctggaagaagtaatggtgtattgatcagcaaaactcaaggtccggctacagaatattctattgctaaattacaggatagaggtaagttctatgttgatccgggtgaggagatctatgcaggtatggttatcggtgagcaaaacaagccgggtgatttagttgtaaacatcgttgaagcaaaacaattgaacaacatgcgtgcttctggaaaagataaagatacaggagttgctccaaaaatcttattctctcttgaagaatgtatggaatatatccaggctgatgaagcaatcgaggtaactccaaacttcatccgtatgagaaagaaaatcctttctgaagaagaaagaaaaagaatggaaagaggagcgaaagcataatcctaaattctcaaatatatttaaagcctcgatttttcggggctttttttgttttaactaaattttacagtaacatatttctcaaattatctttatatcattagttttgtgtttttaaccattcagaaatccttttttggaatcatatatgaaaatctctaaaataaaattagtctgcatattgggtatatttgcttctttcagtacttcgtgcgctgtaagagaaaatactccgaaagtaaaaaataaagtttcaaataataatactagaactccaaatcccaaattagttccgccaatcgcagcgattcctgtgaatgaggaatttagagtgaatcttcctgcaattaaaagagaattccgcggagtatggattgcgagtgttgccaatatcaactggccttcgagaaataatctttccgtagatcagcaaaaagctgaagcaatcagtatgttgaatatgcttcaggaaaataattttaatgcagtgatttttcaggcacgtccttctgcagatgctttatatacaagcgaattggaaccttggtcttattttttgaccggaaaaacaggcgaacctccatatcccaattatgatccgttgcaattttggattgaagaagcccataaaagagggatggagctgcatgtttggctgaatccttacagagcacatcattctaatgggggaacggtttctaaacaatcaatggctaataaactttcagatattaccattaaactgaaaaacggaatgtattggtttgatcctgccaacccgaaaactcagggacatgtttctaatgtggtaaaagatttggtaaaaagatatgatctggatgccatacattttgatgattatttttatccgtatgcaacctataatagaggtgcagattttccggatcatgaaagctggagagtctatcaaagttcaggcggaacactttcaagaccagattggagaagagatcaggtaaataaatttgtagaaagaatttataaagaaatccacgctgagaaaaattacgtaaaattcggaatcagtccgtttggaatctggaagcctggctatccggaaggagttgttggttcttcgcaatatgacgaattatttgctgatgctaaattatggttaaataaaggttgggttgattatttttctccacaactttattggccgatcgattcgaaagggcaagcgtttgcttctctattgaattggtggaaatctgaaaatacaatgaaccgtcatctttggccgggtttaaata

SEQ ID NO: 1204 - DNA, 24377 bp, synthetic construct
  source 1..24377: mol_type = other DNA
  misc_feature 1..24377: note = Synthetic
gactcactcgatgcagttagaatcacttctgaccacaaagcgattatgggtagtttcttagtggcggggaaataaaaccttgagcaatcaccacaaccaacctttgaaaaacttgaaattcttaggaatggctcaagtcgaaaaaatgatgagcctctgggttaaggtttgtcaaaggttaataccgagtgacagtccaactactttcccatcctgagcttgccgaaggatcagcccaacagaaaggatcatccaaaactctgaaaacaactaatcatcagcgtcctctaagagagacactgatggtgatgtagaagaacctttgacaaacttatatctccaaaacctccacagcaattgactttaaagcaatagcttactcaagtttgtcaaaggtagacactgcaccttcccatcctgagcttgccgaaggatctgcccaataaaaagtatgccccaatgagctaagaacaaataatcatcagtgtcctcacgagagacactgatggtgatgctgaagaacctttgacaaacttatatctccaaaacctccacagcaattgactttaaagcaatagcttactcaagtttgtcaaaggtagagcactgcacctttccatcctgagcttgccgaaggatctgcccattttcctaattgcccatttccccaattcaccagtttccctaattaaccaaaacccgaaactttaatcattcaccctcagttgtatttgcgttgtgaaatcctgacctttgtcgattctgcgtttgcagccagatctgatggaaaaattcaaagaaaatgtgaatatagaacctgctcctgtagatatttcagggcatgaaaacattgaagtttttggggctcgtgagcacaatcttaaaaacatcgatgttaccattcctagaaacaaactggtagtcatcaccggtatttcaggttcaggaaaatcatcattggctttcgataccatctatgctgaagggcagcgcaggtacatggagagtttctcggcttacgcccgctcttttattggcgatatggagcgtcccgatgtagacaaaattaacggcctcagcccggtaatttccattgagcaaaaaactacctccagaaacccaaggtctactgtcggtacactaaccgagatttacgatttcctcagactcttgtacgcacgagcaggaattgcctactcctacctgagtggcaaaccaatgattcgccaatcggaagatcagattatagatcacctgattaagaatttcgaagggaagaaactcatcattctagcccctgtggtgaaaggtagaaaagggcattaccgcgaactctttgtgcagattcgtaaaatgggctttactaaggttcgagtagatggagtagtgatggaaatggtgcctaaaatgcaggtagaccgttacaaaactcacgacattgaaatcgtaatcgatcggattattgcagatccaaacgatagattccgaattgctcaaagtattaaaactgcaatgaatcacggtaatggggtaatgatggttcgtgatgaagacaaccaaattcaccatttctctaagtttttgatggacccagaaactggtctttcatacgatgaacctgctccgaataacttctctttcaactcgccatacggtgcttgccagacctgtaacggactcggtcaaattgaagaaataagcaaagagagtgtaattccagatccgaatttgagcataagcagaggaggtattgcccctcttggagattatcgtgacatctggattttcaagaaactagaagcgattctaaaaaagaacaaggccaatttaactactcctatcaaggacttaccagatggagttttagacactcttctctatggagatgatgttcccgtggctgtcagttcaaagaaatacccaggaaccagctggaacaccaagttcgaaggaatcatcaaattcctagagaagcagatggaagaaggaacggagaaaactcgccagtggatttccgacttcatgaccgtaaaaacttgccctacctgtgatggagcaaggttgaaaaaagaatcacttcacttcttaattgccgataccaacatttctcaactagcagaaatggatattgagagtttgtctcaatggttcgttggcttggaagaaaggctaactgacaaacagaatcagattgcccctgaagttctgaaggaaattagaaaacgaattggctttttgctagatgttggcctcgattacctcactctaaacagacctttgaggacgctttctggtggagaagcacaaagaattaggttggctactcaaattggtacgcagctagtgggagtgctttatattatagatgagccaagtattggcctgcatcagagagataatgtgaagctgataagtgccctgaaaaacctgcgagatattggtaataccatcatcgtggtagagcacgataaagatatgatgctcgcttcagactttatcgtagatattggaccgggagcaggtagacacggtggaaatattgtagctgccagcgagccaaaaactttcctcgaagaaggaagcaccacagctcaatacctgaaaggagaaaagcagattgagattccgaaagaaagaagaaaaggttctggaaatagcttaaccttgaaaggtgcaagcggtaacaacctgaagaatgtaacactcgaaattcctttgggtaaaatggtgtgcattacgggagtttcaggaagtggaaagtctactttgattcacgacacccttttccctattctaaaccaccatttctttaggtctagaaaagcgccattggcttacaatgaaatcgatgggctgaaggaaatagataaggtgattgaagttgatcagtcaccaattggacgtacaccaagatcgaacccggctacatacactggtgtattctcagatatcagaaccttattcaccgagttgccagaagcaaaaattagaggctataaagccggccgattctccttcaacgtgaaaggtggccgctgcgaaacctgtgaaggggctggaatgaagctcattgaaatggactttttgccgaacgttcatgtgccttgcgaaacctgtaagggaaagcgttacaatcgcgaaacacttgaggttcgattcaaaggaaagtctatctcagacgtactagatatgacggtggagcaagccgttgaattctttgaaaatcagccaaagattgttaggaaaatcaagaccttgaatgatgttggcttaggctatatttcacttggtcagcatgccactaccctttctggtggagaagcccaaagggtaaaactggctactgagctttctaagaaagatacgggtaaaacactctatattctggatgagcctactaccggcctccactttcaggatattcagcatttgttagacgtactgaatcgcttagtcgacaaaggcaattctgttctgatcattgagcacaacctagatgtcatcaaagtagccgaccatattatagatcttggccctgaaggtggtgacaaaggcggtcagattgtggcacaaggaactccagaagaagtggctaaaagcaagaaaagctatactgctaagtttttgaaagatgagctgacctcccctaacccctcctaaatcaggaggaaaattttagtgcaatccgcatctccttttccattctgagcgaagccgaagaatctgccaaccaaagtcgtttggcagatctctccactacggtcgggatgggaaagaacccaagccacttttctttatgagtttggcgaagaatgaggggagtattaataaccgcaaagggcgcggagttcgcagagcactcgtaaaccaactgactcgtcctaaaaaaagtttacaggtttaacgtttagtactgtaatagatttacagttgtttgattgtcctgatctgggtttacaatatcaggctttttcttgtaatagttcttccatattctcttagggtttagactttgattgtgtactagttctggagtcaacatacctaagctcatgtgtggcctttcttcattatatagctttactatttctttgagtaaagcgctggcttccgtgaggttatctacctcataattatcgagatattcactttttataataccattgattctttcggctattgcattttcaagcggatctccatgctctgtcatacttatgttgatctggttgtcctgcaatagctttacatattctttacaacaatattgtattcctctgtctgagtgatgggtgagcggtaaatagctgtctggctctttctttaagccagagacagccattttgagcgctttcactgattctactgcctcaagggtatcagacatcctatatccgacaatcttctttgagtaagcatcggttacaaaagatatatagtagtttttaccttttgacttccagtaggttatgtcactcacccatacttggttctttctgtcaatacactggtcttttatcaggttcgggtacttcctcaaccaatgagatgattgtgtggtatagaccctgctacgtctctttttaaccaacagatggtttctgcccaacagctcataaagtgcgtctctgcccatcttaatctggtgttctagcataaatggctctaataattcatacagcttacctcccatacgtctgtgggtcttccttatctgatgtacttgctgtactatcaggtgctcttcaatgctcttttcttctcttacccataaatgctgataataggcctggcggttaacaccaagtaatcgacacaatcatatcaagcttaccgcatggtaggtgtctttcatctcatggatcacttggaatctgacttttttcaatctcaatcttgaacttcttctctgctattgcaatcattcgctggtaggcttccaacttaagctgagcgtcttctagttctttcttgagtgccttgagctgggcagaatctgatttctcgttcgctgacaatgtaatggcgctatgtggctttattcgattatctgcaatatagccgaaatctcggagccagttgacgatggctgactttcctccaataccgtatctgtattgcaactctactttggttacacctcccttttgatactctcggcataccttatgcttaaaacttgtctcataccttttgttcatttttacacttatttgtgtaaacctattttaggacaagacaaacgtgctagtccttggtgtcctcaccaagacaaccgctcagtgaatcggtggggacaccgattctggctaaaaactatactgcttacctttgaaagacgagctgaccacccctaccccccctaaaacaggaggggaattttagtgcaatccgagtctccttttacattctgagcgaagccgaagaatcaaccagacagagtcgtttggcagatccctccctacgttagggatgagaaaacagaaatagttatcttttccaagtaaaccgcaacagaccttgcccaagtttgaatcaagtctttatgaacctcccttttggaagaaaccgtcaaggagcactttagggctaatgatttttatacttgtgggtgccataggctatttaatcgccacttttcaggggcatcaagttaacgcgcttgtggcaattggcggattgggtgcaataggaagcttgtacttcgatatcggagaaaagcccatactgggtgattacattggggaaattgtcttaacagaaaaggacatcactcttaacggagaaaaaattaatattttagaggtaaacggtctgaacatctcatttaatacttatcagaatcaaaagatatttcatcggtatggctattattttctatcaggcacagaaaataaaattagcgtgaaaactggtggtaaagaatataactataattttctaatatataatcgaaatcatatctctgacatattaagcgttcttcacttttactataaagaagggctatttgttaatgagaacccaggaaatcgaacctaccttggaaaagacctctcttatgaagagattcaggatttcaaggccaaatataaactagagggaactggctatcgaaaactacattagtcggataggctaaataattttgaataagacaaaaaaatagtgctgccgcatacgcgaacagcaccatcttcaaccaaaacattaaaatcaacactttaatctaacacctcatcgtcaggctcgattgcccgacttcaatcatcgattttaattgcctttttctgtctctataacggaaggcccaatggcctattatagtgttctagctattatttgtctttttaacactttttgactcttcaatgttccatcaaatttgtttcattttaagaacccaaaatgaaaggctcatgttataaccacaaaccactaatatgagcccattcgaccatctccatctggagattccaacctctgataaacctagactggttattattggaggtggttttgctggcatccaactggtaaaatccctcaaaaactctaattatcaaatcgtccttttagacaggcataactaccatacctttcagccgttgctgtatcaggtagctaccgctggtttagagccagactctattgcgggagcgttgcgccagctttttgaaaaacacaaagacttctactttagaatggcgcgcgttacaggaattgatccagagaagaagtgtatcaaaaccttagtgggcgaactgagctatgatctcttagtaatagctaatgggtctaaaaccaactatttcggagatcagcaaatgtacgatcgtacttttccgatgaaacaggtgccacaggcgcttaacctcagaagtcatttgcttcagaacttcgaacaaacagttttagctaaagatgatgaagaaaaagaccgccttacaaactttgtgattgtaggcggtggcccaacgggagttgaagtagccggagcattaggagagctaaagaagcatgttctacctaaagactatcccgatattaacttcgatataatgaagctccatttagtagatgctggtccgcgtttattggctggaatgtcggaaaaatctagtcaaaaagccgaaaagtatttgaaagaattcgacatcgatgtgagggtaaagaccatgctcaagtcttacgatggaagagatgtagtgcttagcgatggcacccaaattccagccaaaacggtaatctgggcggctggggtaactggtaacattgttgacggacttccgaaagaaagcctgaaaggaggaagaatagccgtggacagcttcaataaagtggaaggtgttaaagacatttatgcgcttggcgatattgcgggaatgtacagtgaagcttttcctaaaggtcaccctatggtagctccggtagccattcagcaggccaccaatttggctaaaaacctaaagcgaaaaagtcaggctgactggaagcctttccagtataaagacaaaggctcaatggccacagtaggtagaaataaggcggtagtagatttacctaaattccattttgggggcctttttgcctggatggtatggatgtttgttcacctgatgtctatagttggtttccgaaacagactggttatactaaccaactggatatggaattacatgacttatgaccgtggcaccagattaatcatcagaacatttttaaggaataagaactataaaccaggagatactctctgatttccaaccatattagctcttaacctcttgtattattgcttttctacgaaaggctaagtttgcttatttttcaatttcgaaaatgagaaagagaagactttactggattttgcaattagtaggttgggggttgtacttctcggctaacttcatttctcaaggcttcgaccctcaaagcttaggcgagcaagtggtaagaaaccagcgcattgagcttaccattcattccattttctttttcctcctttctcattacttcattaggggcattaccataaaaagagggtggctacaaatcaacattaccaaggttattccaagaatactgggcgtaattctactagcttccatcatagggaacattctttcctttagcctatactttgttgtgggcaccagaactccgagcgatcagagtttgcaaaccgaaattccattgctatttggttcttcttttgtgctctttgttttgtggtctacagtgtattttctctaccattatttagagagtaacaatcgctcgttaaagtatgaggccgccatgaacgaaatgcacctcaaccaacttaaggctcaattgaatcctcactttatctttaacgcactcaatagcatgagggctttggtagatgaagaacctactaaggctaaaatagccattacacagctttctaacattcttagaaactcgctgattacggataaaaaacgagtggtaaacttcagaaatgagctaaatacagtaaaagattacttggcgttagagggcattcgttttgaagaacgattgaagataaagtataaaatagacccacggtctgaccattttgatataccacctatgatgatgcaaacgttagttgaaaacgccattaaacatggagtttctaacctaatggaaggtggcctcattgaaatacagtcgaatgtaaccgattctatgctcaccattaagatcagaaacagtggtcagctgagcggaatcaagaaaaaaccaaccaatagaacgggtgttgggttaataaatacgaaggaaaggcttaaattaatctatggcgacaccgccacgtttaatatttataacgaaaatgataagtttgttgtgactgaagtgaaaatacctcagcgcatataattaataatctatgagagcactaatagtagacgatgagagattggctcgtaaagagctaaccaaccttttgcaggagtttcaagagattgaaattgtgggagaagcggtgaatgctgaggatgcggaagaaaaaataaacagtctgaagccagacttgttattcttagacattcaaatgcctggtaaaactggttttgaactattggagtctctagattctgtgcctgatgtagtatttacaacagcttatgatgagtatgcgctgaaagccttcgactataacgcaatggattatttgctaaagccgattgagccagacagacttaaagaaactgtgagtaagttaattgctcgtcagtctaaaaaagaagaagaaaaaacagaaactgagccttctaaactaggtcctagcgaccgagtatttgttaaagatggagataagtgctggtttgttaagttggaaaacatccgcttattcgagtcagacggaaattatatcaaaatttacttcgataattttaagccaatgattcataaatcattgaatgcattagatgagaagttagacgacagatcttttttccgtgccagccgtaagcatattataaatcttacttgggtagaaagtattgagtcttggtttaacggaggcttaatggttgtactcagaggtggagacaaagtggaagtaagccgtaggcaagctgcccgatttaaagaaatgatgagtttataactcgttaaagaaaacctcgcgctcgcgaggttattgtgtgtgtttattggccctgacgttacgcgtcagggtttttttgtggtcaactcttttaatgaagctgtagcctaaaagcaacaactttcaataaccctaccaacctaaaattgattaaaccataaaaaaccacttgtaaataccaatttttataaagtacttctgtgcctgttctgaaagacacacctgaaagacctcacgtttattggaacaaaaaaagcgacccgtagaggccgctttaaatgttttcacaacggaataatccttattgtgactagttttcaaattgtatttcaatctaaaaagaactttttaaatataaaatagcacatcatgaaaaagattttagggcttgatctgggaaccaatagtattgggtgggcgcttattgaacaagactttgaaagtaaagcagggaaaattagtggggcgggtagtagaattatacctatgtcccaagacatattgggaacatttgaaacaggccagtcatattctcaaaccgctgaccgcacacattacaggtcaataagaaggttatatcagcgaactaagctaagaagagagagacttcatcgaagccttaatgtactgggatttttacctgaacactacaaaaacgagattgactttgaacaaaggaaaggtcaattctaccctaataaagagcccaaaatagcctattacccagaacaagtagccagtaaagtcaaataccaatttctatttaagagctctttcttagaaatggtcgaggactttaaaaggagaggctataatggagcaataccttatgattggaccatctactatttgagaaagaaagctctagaaaagaaaatagaaaaggaagaattagcttggttactattaaacttcaatcaaaaaagagggtactatcaattaagaggggaagaggaagatactaactccaataagaaagaagaattctatgaattaaaggtaagcagtgttgaacaaactcatgacacctcaccatcaggcacttggtataatgttcaccttcaaaatggctgggtttacagacggaaaagcaaagattctctaaaagactgggaaggtttaaacaaaaagttcatcgtcacaactcacctgaatgcagatggtagtgaaaaattggataaagatggaaatgtatctcggagctttcgcgctccaaaagaagatgattgggggcttgtgaaaaagcgcacagagtctgttttagaaaaatctgggcttcatgttggtgaatttatttatgaaagcttattagaaaaccccgaacagaaaattagaggtagccttataaagacaattgaaaggaaatattacaaaaaggaacttgaggctattcttgataaacaaacatcctttcatagagagcttaggaatgatgcgttatataaagaggctactctagaactataccctaaaaattcagctcacagatcaaacatcaagcaacgaggcttcaagtatttattcatagaggatatcattttttaccaaagacctcttaaaagccaaaaacacctaattgctcattgccaatacgaaaaacgaacctataaaaacaatggtggagaaaccattgaagtttcactacagggagcaccaaagtcccatcctagttttcaagaatttcgtatttggcaattcatttctaatctccggttttatgacaaagaagaaatcgttgaaggacaagaagttagtattaccgaaaagctattgaaatcagattctgattttgctgaactttatcattggttatctcaccagagagaggttgaccaaaataaaacactaaaatacttcacacagaaaaagctcattccaaagcaaaagaaggataatccaacaatccgatggaactttcccgaagataaaaaatatgaaatgggtgagtttaaagctcaattattatcaagactagaaaaagtacgcaactgccaacccgataaatttttaacccaaaagaatgagcttgacctatggcatataatttactcagttaccgataagaccgaatttgaaaaagcacttgtaacatttgcggaaaaaagagagcttgattcagagtcgtttgttgaaaacttcaaaaaatttcctccatttaaaaacgattatgcctcgtactcattaaaggcaatcaaaaagattctaccccttatgagaagaggtaaatactggaaagcagaaaacctaggacctcaaaccttacagagaattgaaaaaatcgttaatggcgaggcagatgataaaattagcattcgcgcgagaaaattggcgttgcacctaaacgacaccaaaagttttcaagggctacccacttctttagcctgctatgtggcttataatagacattctgaaaatgaggaaaatcagaagtggcagactccttctgacattgacaaatacttaaaagatttcaaacagcatagtttaagaaaccccattgtagaacagcttattacagaagccctgagagtggtaagagatatttggaaacattatgggcaagggcaaaaagatttttttgatgaaatccatgtagagcttggtagagaaatgaaaaaccctgccattaagcgtaaaaaactttctcaaaagattcaagaaaacgaaaacaccaattacagaattaaagaagttctaaggaacctaaaggagaacaatatagatgctaaaccctactctccaagccaccaagagatacttaaaatttatgaagaaggggtttaccaatcgatagaaaatgtcgaagatgagatagagaaaatccgcaaaaataatacacccagttctaaagatataaataggtataggctttggctagaacaaggctatatatctccttatacaggtgaagttattccattaagtcaacttttctcgaatcagtatgaaatagaacatattatcccaaggtcaaggtttttcgatgattccttagccaacaaggtaatttgtgaaagtagtgtaaatgcccttaaggataacaaaacagcactcgagtttataactaaccatgggaatgaaaaagtagaatttgctggaaaaacagtagaaatattaagctcagataagtatacggaacattgtaaaaggtatttcaagcggaaccgaacaaagctgaaaaacctattaagttatgatgtgccagaagggtttatcaatagacagttaaacgatagtagatttatcagtaagtatgtgagaaaccttcttagcaatattgttcgggaagaagaggagcgagaagccatttctaaacacatactaaccataccagggtcaatcaccagtcagttaaagcaagattgggggcttaatgaaaaatggaatgaggttgttactcataggtttgaaagactgaataatttaacgggcacaacagactttggcttttgggacaataaaatcaacgcatttagaataactgttccgaaagaactcagcaaagggttcaacaaaaaaagaatagaccataggcaccacacattggatgcattagttattgcagcatgtaccaaggatcatgtaaactacattacctctcttaacacagaaagaaataaccacagcctagtatccaaactaagaaacactaaaaaagtgctgatcaatggtaaagaaaggagaatagccaaggcctataagcttccttggtcttcttttcctcttgatgccaagcatcaattagaaactactgtcattagttttaaacaaaacttgagggttattaacaagagttctaacaaaacttggcaatggagaaatgttaatggagaacaaaagaaaaagcttataccacaaaccaaaggagatagttgggccataagaaaatccatgcataaagccacggtttcagccaaagttgaaagtgttggaaagggtaaaatcaaaactaccaaccgaaccccgctcggtgagatcaagggcgaaaaacatgttgaaaaaatttatgatgcaaggatacgtgaggtaatcattccaaaccatctaaataagtacttagatgaaaaaggtaagcctaattatgaagctgcatttagccagtcgggaataaagcaactcaatgagaatatagaagtactcaatgagggcaaaccacacgcccccatatacaaagtccctttgtttgaagttggtagtaagttccctgtttctgaggatgcaaaatcgcctaaaaaccaaaagtatgttgaggcagataaaggcaccaacctgttttttgccgtatattggaacgaagaaaagcaaaaaagaaattttgagactgtaccactccaccaagtaattgtacatcaaaaacaggttgcctctttgcctactgaacaacgaacctcagtaccgattaagccggaactaggtctcttcctgttttctctttctccaaatgacctagtttacgtacctacagaagaagagatagaaaacccacatttagtagaccttaaaaacctttctaaagatcaaaccaaccgtatctataaaatggtaagctcaacaggcaatgagtgtcatttcattccacatcatatttcgaggcttattatgaaatataatgctaagcaaaaagtcggtgaatttggaagtctgaataaggcagagaaagctataacgggtgaaacaattaaagagaaatgtttaaaaattcagataaactctctaggtaagcttaaaactgaaagaatcgcataattagaggacaactttaagctttccaagggtgtttaaaagagcctctaaagccataaaacagaagcacacatgcaaacagaaaagttatatcatatttataaccatgccaatggtagcgaaaacctttttcgggagacagagaattacctttacttcttacggcagtgggacaaatacattagcccaatagccgaaaccttagcttactgtttaatgcccaaccattttcattgtttggtgctaataaaaaaacaagaggagattgaagcaacttttggaaagttcgaaactttccaaaagctagagtacctcttgagcaaacagtttgctaattttttcagtagctacacacaagcttataataaaagatacaatcgaaaaggaagccttttcgcacctaacttcaaaaagaaggaaattacctctaatgattacatcaccaaggtaattgcctacatacacaccaatccaatccaccacaggtttacccaagatttaagaaagtggagctttaccagctattcgagcatgctctctactaactctacaaaattagctcggacaatggtactcgattggtttggtggtaagaagccattcgaggactttcaccaagcttatataaacacgattcccggtgaagaaatgaatatttaaaaaataagcttttcaaaagcttagagctgttggaaagttcaaacgaataagcctatgataaaacgtacactcttatttggtaacccggcccacctttctacaagaaaagagcaactagtagttaagtaccctgatgatgatcaaaagaaaaccatgcccattgaagatattggcgtagtgcttttggagcatccacaaattaccattacacacacgctaattagcaagctcttgggtaaccaagttgctataattacctgcgatgctcaacatttgcctcaaggtttaatgcttaacctgaatacccatcataagcaggtagctcaaatgcgacaccagctttcggcaactcaagtattaaaggataggctatggaaacaaacaattcaagctaaaataaagaatcaggcagcactgctaaaaatgaataacattgctgctgaaaatatggagagatgggccagcaaggtacagaatggcgaccctgaaaactttgaaggtcgcgcagcagcctattattggaaatgtctatttactgatcttattcaaaactttaaaagagggcgatatgaaggtgaacctaacaacttactcaattatggttatgccattctaaggggagccatagctaggtctttaatgatttctgggctactaccgaccatgggttatcaccatagcaatcaatacaatagttattgtttagccgatgatctaatggaaccttaccgtccatttgtagaccaattagttttagaattgataagaacagaagatagctataccgaactgacaccgtcactaaaacaagacttacttaaggttccagttctcgatgtaattataaacaatcaatccagcccgctaatgttagccgctcaacaaagcgcagctagcttagccaagtgctatagtaaagaagaaaaagcacttaaacttcctagcttttgagttttgacaggttcaatcaatacagagttatgtgggtaatggtattcttcgatttaccaaccgaaaccaaaacagatacaaagaactatcgcaagtttgtagatgtactggagaaagatggcttcactcgctttcagttttccatttttttgcgtcactgcccaagcatggaaaatgccaaagtccacattaagcgtataaaacaaaacttaccgcctaaagggcatgtaggaatcatgcatattaccgacaagcaattcggtatgatggaggtatatttttctaccaaaaaagaagaagtacctcaaccaattcaacagttagagttgttctaggattctgttggcttacactccattagcttctggaaagcttgaaactttccaaaagatccaaaaaaaccctgattatcgttaaaaacaaccagggttttacagccgtaatcaacaggttttcaattgtttacgacaagacatcttcttctaagatacaatttgaaagctagtcacaacctagcgtttgctgatgcggaactttaaagccttcttctaagatacaatttgaaagctagtcacaacaaggggaggatttacccctctgtccttcggcttcttctaagatacaatttgaaagctagtcacaactcccgaaacgggaaaaaagaacagcctaaacttcttctaagatacaatttgaaagctagtcacaacacaaggctattacaggagttgagaatgtctcttcttctaagatacaatttgaaagctagtcacaactggggaacaatcgccttcgaatggaaggagcttcttctaagatacaatttgaaagctagtcacaactagcagatctttacgtgggttgcccctccacttcttctaagatacaatttgaaagctagtcacaactctaaagcagggtttaaaataatctctcctcttcttctaagatacaatttgaaagctagtcacaactaccagtacagtagatgcagacaaatctatcttcttctaagatacaatttgaaagctagtcacaactaccctctgttgaataacgaggtaaacaaacttcttctaagatacaatttgaaagctagtcacaacaaacgccatccagctctggcagcacgtgaacttcttctaagatacaatttgaaagctagtcacaacggtcaatgacattgtaaggaaatcgtcaaacttcttctaagatacaatttgaaagctagtcacaacaggtaaggagtgcctaaggcttgcacggctcttcttctaagatacaatttgaaagctagtcacaaccagagcgctcaacctgattactgccgatcacttcttctaagatacaatttgaaagctagtcacaaccttagccatgctatttaaaacaacggacgacttcttctaagatacaatttgaaagctagtcacaaccataaagaagggcgtgaaatggtgtatgtacttcttctaagatacaatttgaaagctagtcacaactagctaaggaacacagttccagctatgcttcttcttctaagatacaatttgaaagctagtcacaactgaaaggctagaagttattgcagaatcagtcttcttctaagatacaatttgaaagctagtcacaacctattgacttatgtctcagtaggtggtgcccttcttctaagatacaatttgaaagctagtcacaactcttctgcctttgccctcattagttttctgcttcttctaagatacagtttgaaagacattaacactccaactatgacattacttttaaaattgaatcagagaatcaaatcaaacacatctccctctactctgttcatatctatatgtaaatgtgactttttagtctttgtgcgtctaatcttgatattgatattatctggctgcttaaaacattttatgcccgatacgctgtcaaatttatatattgaccttaaatgaaagctttactctttgctatagccatactttggcaatccgtactttctcctcttagcacagattctactgtggttcaacaagaagtacacctcttaatagaaaaaggaggtgttccggtagatgcagattcaaccatattcttatttaacggtattggcccttactctttaaagcagcgagtacaaaagttaagaactgagttagaaaacctaaaaagcaatcagcaagatttaagagagtttactgtaaagtatgaagaccttgtaaatgacattatagtacaagaaaaaattatactgagcattaacgatgctgatgctaaagctttaggtctaagtcgcagaggagccacagaatactacttagagctaattgaaaactctctaaagattgaagagcctgcattcagcaacattctcttcgtaaatatagccattgccatactgattatagttgcgtttatttttgggcttaagtactataataagctgttcaggctcatcagcataaaaatacaggcacaaaaaggagtaaaatttaaaggcttcagtgtaaaaggttacgagcttcttacccaagagaagcaagtagctattgctacttggggtcttactattgtaaaatatgccctactgctgtttttgatttacttattacttccggccatttttggcttattcccttggacaaggggcattgcacaaaaactaataggctatgtggtgcatccgcttaccaacttgggtattaacatcctcaactacatacctaacctcttattcattgttgtaattgttatcattctaaggtacttcttaagaatgctagccttctttacagaagagatttctaaaggtaggttggtaattaatgggttttattccgagtgggcaaaacctacttttaacatagtaagaggcattattattgcgctaggctttgtaggcatttggcctcttttaccaatgtctgactctaagatatttcagggagtatcaaccttttttggtctattggttgcccttggtggtgctggcgcattctctaatattattgccggtttagtaatcacttacatgcgttcgttcaaaattggcgatagggtaaaaatcggtgaagtaattggcgatgtaaaagaaaaagccttgttgaacaccaaggtcaaaaccatcaagaatgaaatcattaccattcctaactctcaaatgctgaatagccataccattaactataccacagcaaatgatgagcaaggacttattttacacactactgtgactatcggttatgatgtgccatggcgccaagtacaagaattgttggtaaatgcagcactggccacagaacatgtaaaaaagaaacctcttccttttgtactacaaacgagtcttgacgatttttacgtgagttatcagctgaacgctaggacgagagaaattcaaaaaatggccgttatctattctgaactgcataaaaacattcaggataagtttaatgaagctggagtagaaattatgtcgccacattatggtgcgcatagagacggaaaccaaagcaccattccgcagaagtatctgccagaagactatgaggtgccttggtttagaattaaaaacaaagaatgacgcttagaaaaaagctgtacataatcatcttcggtaccgataccccagcagggaaagcttttgatgttgccctactcgtggccatacttattagtgtacttgcggtaatgctagaaagtgtacctagcctaaacaaccggtttggatatgttttcaaatatgctgaatggatattcactgtagtatttagccttgagtacctcactagaatttacgtaactgaccatcgtaaaaagtacatctttagcttctacggtctaattgacctgctttcacttttacctacttatttgagcttcatttttacaggcactcaatacctattaatcattagagcattgagattattaagagttttcagaattctgaagctaggtaggtttgttggtgaaggagagcaattaggaagggcattaaaggccagtaggcataaaatcacggtctttatgggtaccgtggttatgctggtgattctacttggtaccgttatgtatttggtagaaggcagagacaatggttttaccagtattccgctgagtatctattgggctatagttacgctcactactgtgggctatggagatattgctccgcaaaccattttgggtcagagcatcgcctcatttgtgatgattctcggttacgcaattattgctgtgccaacgggtattgtcactgtcgagcttcaaaaagatagagagtaccagaaaaacaaagcttgcaaaagctgtaactcaaaaggccatgacactgaggccttatattgcaaattttgtggtgagaagttacccgagtgaaaaaagaagttaagctagatatttatactccagaagaagaattggccaatgctataactcatggtataggcattctcggagcattggtagcttttatttacgttttacttcagccaattgaaaacactgctgtgttttggagtacttccgttttctgcgctaccgcattcattctctattcttcctctaccctgtaccacagtgtaaaatctaaatcgaagaaatttctttttaagaaattagatcacatatctatctacctgcttattgcaggtacttttacccccttctgttggggtgttttaggaaacacatcgttaggaattaatctactaattgccgtctgggccattgccattgcaggtattgttttcaaaatattccttacgggaaagcttgagttcatctcactggcatcttacctcggtatgggctggttaggctttcttatgttcgatgaaattgccgaaatcctttctcaagaagtagtgaatatgatgctttacggtggagtctcctataccgttggtgtggcattctacctaatgcgtaaactaaaataccatcatgctatttggcacctgtttgttttaggtggaactggcttccatatgtatgccgtgctaaagtatgtggtggcttaactactcatactgaacataattctcccacttctccattaccgctgtaaagtcctctggcaattctgagttgaactgtataaacttcttagtttcaggatgaataaagcccaatgacttcgcatgaagtgcctggcgaggcatcaacttaaaagcattttcaacaaatgacttgtacttcgaaaactgagttcccttcaatacctgatttccaccataggtagcatcattgaacaaaggatgccccaaatgcttcatgtgtgcacgaatctgatgagttctaccagtttccagattacactgaataagcgatatgtatcgaaggtctttcaaaagcttatagtgagttatagcgttacgccctcttgagccatcttcgatagccacggttactcttctatctttttcacttctgcctaaatggacatctatagtgcccatttcctctttcggtacaccccaaactagggcgtagtaggttctttcaatactgtgatcgaagaattgcttggccagactactcatggctttttcggttttcgcaattaccagaaggccagaagtatctttatctattctgtgtaccaagcctggtctaccatcatttcccggcatggttggcaactgctgaaaatggtaagtcagtgcattcactaatgttcccgtccagttattatatgcagggtgcactaccattcccgcttccttattgacaactaaaatgtggtcatcttcaaagacaatgttgagtggaatattctcagggacaacatctgtatcgcgtggtggctccggaagctcaactataatttcatcgccagggtgcaccttgtagttaggctttacctcactaccatttactttcacaaagccatcttttatgccctgctgaaccttatttcttgtaacgttaggcaacctatccatcaagaatttatcgattctatacggttcctgccctgggtcgcacaccaaacggtgatgctcaaataactcgtcctgctcttccattagtttgcaaatttagatcaataattgggatttgtcgaaaggcgtaactcaacctaacttgcaccatggatttttcgcagatcaatgaacagcttccaatcgaaaggtttcagcaccctgttgccacggaaaaccaaattgacctgcgtattttaaggcttgacaaaactcacggagaaatttctggcaataaatggttcaagctcaaatacaatctgcttgaagccagaaatcgaggcatcaacaagctcctcactttcggtggagcctattccaatcacatttatgctgtggctgctgcagctaagctattcgggtttcaaagcgttggtattattcggggcgaagagcacattccgctaaaccctactttacagtttgcaacagatgctggaatgcatttacactacgtggatagggagagctatcgcaacaaaactgtggagcacttcataaatcaattaagagccgaattcggtgagttctatctcattcctgaaggtggaaccaacagattggctattcaaggagctgcagaaattcctagtttaattcctgaacctttcgattattattgccttgctgttggcacaggaggaaccattgctgggcttatttcaggaatgaaagggcaaggaaacattattgggttcagctctttgaaagggtcttttttacaagatgaagtagccaacttacttcaaagcttcgggcatgaaagccttcacaactggtcaatccaaaacgaatatcactttggtggttatgcaaagaccaaacccaacttaatagagtttatcaaggcaatggaagagcagtttgagctggaactagagcccatttatatgggaaaaatgctgtatggtatactagatatgattgaaaagggtcagtttgaaaagggaagtaaaattctggccgtccacactgggggtttacaaggaagagcagggttcggcctttagcccattaaatcttcaaacacttctttaagcttcgcgaaaggcttaaccgttacatttcttcctttaagatctagtcctttagtgttgaatttagaaatatagatttctgtgaaccctagtttttcggcctcagctattctgctttcaatacgattgacagccctaatttctccacctaatccgacctctgctgcaaaagccactttatctgagatagaaatatcatgatacgcactcaccagagatgcacaaacggctaaatctagtgctggttcatcaattctgattcctcctgccacattcagaaatacatcttgggctccaaaccgcaaacctccacgcttttctagtactgccaaaagcatgtttaatcgcttggcatcaaagcctgttgaacttctctgtggcgtgccgtaagttgcagaactcaccaacgactgaatttctatcagtagaggcctgttcccctcaatggttgcaccaatcgcaattcctgttaggtcatctgctttttgagaaatcagaatttctgaagggttcgatacttggcgaagaccttctgtttgcatttcgtaaatacccaattcagaggtagatccaaacctgttcttcaccgttctcaaaattcgatatgacaaatggcggtcgccttcgaattgcaagaccgtatctaccatatgctccaataccttcgggccagcaatgcttccttctttggtaatatgaccaatgaggaaaacaggagtttgtgtctccttagcgaacttcattagctcacctgtacactccctaacttgagaaacagaacctgcagcactttctattctttctgtgtgcaaagtctggatagaatcaactattagtaaatcaggctttacattttttatttgggcgaagatgttttgtgtattagtctctgaaagtacaaagcattgatcggtctgaattccgattctttcagcacgcatttttatctgctgctgactttcctctccactaacatatagcacttttttctttctggcagctaaagccaactgaagcattaatgtagactttccaatgcctggttcaccaccaattagtacgagcgaacccgcaacaattcctcctccaagtactcggtttaactccttatcgtaagtaactaatcgttcttcagagctattctctacttcgcgaatattgataggttttggtctaaccgcgggacctgattcttcgcgccagctgtcttcctctttcttgcctttagaaaccacctcttcagtataggtattccactcgttacaggatggacatttaccgatccacttggcggaagtagcaccacaattttgacagataaatactgatttggttttggccataaggcaaattagctaagtaattccg

SEQ ID NO: 1205 - DNA, 24377 bp, synthetic construct
  source 1..24377: mol_type = other DNA
  misc_feature 1..24377: note = Synthetic
taaacctcatgttactcctaatcaaattttagaagtaactccattaagtggattctatattgagccaattatctcaactaaaaatgattctgggaatcctagtaatgagcaaaagaactacttaccagtacaattagctcaaacaaatttgtgtatcggtgatgaaatcgaaatcacaaatccaaatgatgccttatcgatttcagtgattcaaaataacagaactcaactcatcaaaccaggtggaaaaagagttgttacagcgaatgttgaaggaacaattgaggttgtttcaggaaaaaacacacaaacaattgcagtcaatagaccaagtgataaattatacatcagcgctgatccaacggtgatttataacaatggtattccatccgtagaatttacaggttctggagcagaatcaaccattcactggactgttgaaaaatatcatggggaagttcaaaatggaaacttcatcgttcatccttatactggaaaggacattactgtaaaagcaacaagcaaagatttaaatggctgcacagtaactgaaactaaaacaatctctattaaagaagaatacaatttacaggctgtaaatgcaatcaacattaattctggtgactcacgtaacaatcgtttcatgccatatgctttgattgaacggaatatcgcatttgaattatacatttacgatgcaaaaacgggtcgtgttatctataaaacaaatgatacttcgaatggttgggatggtacggacatgaacactggttcactcgtgcaagctagttcagtacatctttggaaggtaattattaaaaatccattacctggagaaccaaaagaatacaaaggaaccattttagtcaataattaaacatattttaccagactactactggatattgggaaaggaaactttcccttttttgttttagctgatttcggtagtcttctgcctttttagattccggataaagcaatcgatgctcttccatttttcgaagtttgatgatttcctcgataagttcatttgttttctctgaaaaaagcgttggtttcaagaaatcccacacaaactccgttgcttgctcattgggatgtactccatccacttcgaaatagcagtaatcccgcaatacatcattaaccaattcgtaggatggaaaataatgaacagattcttgctggagtaatgaaactaatcgaactaattcagccttcgattgagaattttctagtaaaccatctcggacatagcgtacagggcttatcgtaaaaacaacttggattgttggattcagttctttcaatacacttagagcagatttccactcagagaacatttcctctgcgcgaatcaattccttatcgaacgttatttgtggctgttggtgacaatttgcaacgatacttccagattctttcaagcgatatccatgagcagaaccgagtgtaataaccaaaattcttgctttctctaaagaattctttaatgttcttaattgctgattgagtaattcatccaatcctttagaatccatcgaataaatggcgctactcgcatcataactcaaaaaaacatcttctttttggacgaaagagcttctttccactttactcaatgccattaaaatctgtttagccaatggaatcggatgaaaaacaactcccaaaggattatccaacacttgaaatccagccctgcggaaccacagactcatattcgtggaaaaacacgaacctagttgtacaatcgaatcaccgtgttgaatttttggaaaatttttcggaattaagctcgctgttgaaatactcattttaattgctctaatgtataatcaaacacttgtttccagcccttccactttcctgcttccgcaagcgtttcattgtgccaaataaagcagaaaacacctccataatctttcacttcttgaaccaattgtttcacaactacttggctttgagcaatacttaatttcttgtattccaacaaagttccatccatgtaagcaaagggtacaattcggtaatctggaaaagcttgattcgttagtaaatcgaaaaatgcatgttcatgagctgttccagcacggaaaccgtaatcatccgcgtatcccattgtgtaatccttctcaaatccctgttccatcattcggtgataggttttgggtaaattaagtttcaaaaaatgctggcgagattcatgagcagatttggaagtaattttcttgattcgatctatttccttggtcagtttatcatccgatgtattgcttgcataactaggatgtaaaccaatatatcccaattcattcaattcttgaattagtccttgatgtcgtgaatcattccaagatatgttggtatcgtattttgcataatctcccacgtgccaaaaaatacgtgtttgtggaaagttccgataaacttctcgaatatcatcaaaagaatcaaacggatcttttttctgaccactttgaacctgcttgcgctcctctattcgttctttgtttctcttcaaaaagtcttttccagcagaaagccaagttctccaaccttctttccatttgtgagcaaacgtattatcaatatcgaaagttggaattggttgaaacgttttttttgactgaagaatttctaagtaatttggcgcataaacctggaaaaatgattctatccaacgttctacaatttgaatatgtagccagtcaaacttactttgaatactctctttggcagtaaaacgaccatgttcatccgggaatttgacaaaatactcttcgtaacgagataagacataaaaaacagcagctaaaggatctgttattgaatcaattgtcaagcaatcaactccattccaatttcctttatctagttttttcaaaacacgcggccgctcttcaaaaagcaaagtcgcaggagctaaaaagggaatcttttcaaagtcaaaattggaataagataactttatcccttcgaatactacaaacctctttttatcgttggttagttgatattccaatccatgttccttgaacacaaaatccaaggtgtatatcaatcgaattgaaatttcatcaacgtaaatcagcatgatttaaagtaaattttgatctgcaaagctaaagtagccattatctgtgataatcaaatggtctatgacattcatttcaatgagcataccaaattgctggattcttttggttaatcttttatcttgatcacttggtatcaatattccacttggatgattgtgtgccaaaattattccgcaggcagataaatcgattccatgtttaaaaatgattttaggatctacaaatgttcctgttattcctccaattgaaagttgttttacttgtagtatttcgttcgaattattgagataaagaatgtaaaattcttcatgcgttaaatcggtaaaataacctttcaattcttcataagctttctgaacactgtcaattttaggctttttatcagctcgtaattcctttcgccttcttcccaactccaatgctgccaaaatacttattgctttcgaccgaccaattccctttacttcacacaactgcgaaagacgcaattttccaaattcatacaaacagccatcactcagtgataaaagttctctacctaaatctaccgctgatttatcgccacttcctgtaccgattagaatagcgattaattctgcatcagaaagaacacttttcccttttaaaatcattttttctcttgggcgatcatcctctgcccaattccgaattgagagttgtttttgtatcatatttactcatttcttatttaatttaagaaaaaagttcagctttaacactatgattcaatcacattttttaagcttttcatttctttttaacctgtacatttgctctatggattctttgacacaaattgtacttggagcagcagttggcgaagctgttgctggaagaaaaatcggagcaaaaggggcacttttaggagcaattggtggaacaattcctgatttagatgtctttttacgcttcttttacgatccattagacgcagctttagtccaccgaggtttttcacattcattactctttgcattacttgctggcccctctttagcttatttatctcacctgttaagcaaaaaaacgtacagctttaagatgtggttcttattgtggtttctttccatcgttactcatcccatgttggatatcttcacaaactacggaactcaattcttctggccattctcttggcgacttactttcaataccgtatttgttattgatcctttatacaccattccgtttatggttttgctgattggagctcttttgatgaaacgagaatcaaaaagaaggaaaatctggaattggacaggaatcatttactcttctctttatttgctttggggagtcattgtgaaatgttgtatttacagtaatacagacagctactttgctcaagcgaatataaaacctacgagaacaatggttactccaatgcctttaacttctttctactgggatattatagctgaagacgattccaattactacatcggatacaaatctctttttgccgattttaatccgaaagaaattgagattattccaaaaaatcatcaccttttaaaggccttaaaatggaatggagaatctcgaattccgcaaattgaacacatcaccaatgggttttacacaattgataagcatttggatagcttatttatctacgatttgcgatttggaacaatcacaaccatcactaatggtgaaagcagaaatccgcttatgggatatggtttcacaacaaaaggtcaaaaagctggttcggtgttttcttacagatccaaagatttcagcaaaatccaatttggtatttacatgcagaaagtcttcggaaaatagattcaactgtttgaattcctcattaaattcatattaagtgtgatttatctttatttcagacaatttgactatcagttatttgcgtgaattaatcgatttagtatacttttagtacaataattcattcaaattaatatgctatgaaaatatccttaactctttcaactttatttctagcttcatttgcctttactcaaaattattctcccattgctgtaacgggatttaattatgatgtaatcgcagaagcaaccccagcgatgtcgacgacaaacacttcaatcgacggaagcgattatgttttatacagtcaaaactacggtacacagctttcaacgggatcaggcctaccaaatactggtctgattacatctggaaatagcacttatcagctcgctccgtatacatctgacaatgttattttcctatcaactgggcaaacagattcattggaattcacaacacctagttcttactcttctttaagtttcttaggattttcatctgaagggcctggaactgtactattcgtcatcaaatttactgatggctcagcaatggttgtaaacaataataatttaccagattggtttgatggtagtaatgctgttttgagtggttttgaccgaacaggaagaacgggagacactccagatttaagtacttttgcaccatatctgtatcgaattaatgtaaatttatcttgtgccgatcaagcaaaattggttcaacgagtaatgattattaatacaacgtctttcccaactattaaaactgcaatatttgcagtatctggagctgcaactgtaaatgcaacaagtattttagatttccaagatttgaattgctttggagaaacagacgggtttattcaattaactccctcaggattaacaccaattacgtattcatggaatacaactccagttgtaacttctcaaaacttaaataatagaggtgcaggaacatatacttgtaccattactgatgcaacaggctgctctaaacaattaactcaaatccttacgcaacctgctgccattggaagtaatcaaactgctgctatttgtgctggtgaaagttttacagttggatcgtttacccatacaacttctggaacatacaatgacccattgccttcattttcgggatgcgacagtattgttacaacagttctaacggtgacagctattaatagtaatatcagtctatctggaaatcaatttagtgcagttacaaatggcgctcaataccaatggttaaactgtggaaatgggtatgcgattgtacctggagcaacttctcaaacattcattccaactgtgaatggagcttatgctgtatccattactgtgaataattgtactgatacctcttcctgtatcgtgatctctacgttgggtattgaagaagatcacaaatcaagtatctcttgttctccaaatccggtaaaagatgtattacaaattacaacggatgaagcaatacgttctattgaagtaatggatctatttggcaaaaaacaggctctttctttgaatgaaaattcacttcagatgaacgatttagcgaatggtgtttatttgattcatgtgattactctttcaggggattcaaaattattacgcgttataaaacaataaagacaatgaagtttagaatcgctaatctgcatgtcggattagcgattttttgttttagaaaattattttaaataaatttaatcgaccaaaaagataccattcacagctgaattgtttataactgaaaaagcaaaaagcaatcagaataaactttcgacttacatttgtacgaactatgataaaagtagaaatgaaacattggattacaatttgcgcttgttcggctttattgcttcaagcttgcggtcaaaatacagaaggagcgaaaaccgaacctcaaaaagaagaacgtaaaattcctgaattaccagcaattaagcatactttcaagttgacagattatttaactgataattctgatttagagaaagatgtcgatgcattattccaaactttggatgatacggcaattgtagcccaattgattatgcctgcagtgggaagattgggaaatacccaaacatctatcaattcgttgattggaagacgtgtaattggtggtgttttgatgttaaatggtacaaaaacagaatttacttcttggattacagaattcaataaattgaatgtcgctaatggaaatccaggatttttatacagcgctgatgctgagccgagtttgtttaatcgcaaaattggaggttcttcaatcgttaaaaaagcaaacgaaattatgtctcttgcagaagtaaatcaatgtgctgataccattgctgctactttgaaagctattggaatcaattacaacttcgcacctgttgttgatttagctaaaaacggaactgtcggctaccgcggtttcgcgaaagtggaagcaaataatgttccttggtcgaatgctttcatcgctcgtatgcaagagcaaggaattattgctacagcaaaacatttcccaggtcatggtttggtttctggtgatacacacaaatctcttcaagcaattgatggggaattgaaagaagtaaagacttatccaggtttaattgaaaaaggcgttttaagtattatgattggacatttggctgttgtcaataatccaaaatacaacacaaatggacttccagctacttgctcgaaagtgattattactgatttattacgcaaagaacttggcttcaaaggattagttgttacagatgcaatgaatatgggcggagttactgccgtaaaaggaaacagcgtgaaagctattgaagctggagttgatattttgttaatgcctttggattgtatgaaatcgcatggagaaattttagcaaaataccgttcagatgctgcgtttaagtccattgttgatgctgcagcaaaacgcgtacttcgtatgaaattatgtgctggagcaattaaataaaaaactgaaatttaacacggaaagaccgatttgttcgtcaactgcgaatgatcggtcttttttttgcccaattcaaaaatgagactacttttatagtgagacttacaaactttgaacgaacatgaaaacacttcttatccttcttctagtgactacaagccgattgattcatgggcaaattgttcaccaaacaatcaacgaagataagacatacgaatattggttttcgttagatcagtatcaaaaacccttgaattacgccattgaaattgcacatttagggggaaatgtgaataagctcgtaggcaaaatgaaagacaattccaaaaacggaaatatgactattcacgatacaaaaggcaagcttttatttgagaaaaaattgggttccgatttaagcttcgagtttgctacagaccagaaggaagttgttattgcatttactgttgatggatttgccacttacacgaaaaaaacgtctgtcgaaacgctttcagtacttgtaatgaaacttcaaccagaatcacaagatgaagtctatcaaatcaattctaaaaaagaattagcagaagctgaactagattcgattatgaaatgtgttcataattgcatgcaacacactgtcaataaggacatcaatacctgtgcaaaaaatggagaatacagcatttcactacaattgtaagaattcaataactcctttcacaattgcatctctttcaaaacaaaacgaattagtgtaacttcgcactccttcatcttgtttttaataaaaaatcatgcacgaatcaatccggttaaataaattcatcagcgatagtggctactgttcgcgcagagaagccgataagtatattgaacaaggatctgtattcattaacggtgttcgtgcaaaaataggtacacaagttactagaagagacaaagtggttgtaaatggccacacgcttcaacaaaaaagtcaagaagaagaaatatacattgcacttaacaaacctcctggcgttacaagtacaacggaaaaaggagtcgtcgataacattgtagattatgtaggtcatccacaacgaatcttcccaatcggtcgtttagacaaggattctcaaggattgatttttctcaccagtaacggagacattgtcaataaaattttgcgcgctggaaacgaacaccaaaaagagtatctcgtaacagtagacaaaccaattacccctgattttattgcgaaaatggcaactggagttcctattttgggagtggttactaaaaaatgtatcgttgagcaaatttcctcaaatgtcttcaaaatagtcctcattcaaggattaaaccgccaaattcgtagaatgtgtgagtatttccagtacaatgtgaccaaactggagcgaacacgcatcatgaacattgagctaaaaggcattcctttgggcgagtggcgtgaattgacagaatcagaaatgcgcatcctgaacgacatgctgaaggattccaaaagtgagactgaccgcgtgtcgcaaaaagcttcagcggtgggacaaaagccgaaaagtaaacccactccaccgaagaaaaaaccaattgttgcagctaaaaaaacaggaactcaaaaaccccgctcctttggaagtaaaccaggaactggcggtaaatcagccagttctagagggaaaaagtcaacttctcgcggtaggaggtgaaaataatcggaacaaatagacataaaaaacgctcctgatcttggacaagagcaagcatcgcctgcgatagtttcaagcccagcttgaaaaaacaattatactcaattagaattttgaacaaataaaaacgaggcagtctttcgatgccccgtagtaaatgttttcacaacggaataatccttattgtgattcgcttcaatttgtgatgccaaaataactacttcaaatcacaaatccaaagaaaaaaagatatttccaactaaatttcttgtacgtaaaaaccttacgatgttcagtttctatctttcaagggcaaaaaatgatcacaaaaaaaccaagctaggcttattggcattttttgctaattttagtacaacttaattgctatttacaatgacaaaaacaattctaggactggatttagggacgaactcgattggttgggcgttgattaatcaagattttgataacaaaaaaggtgaaattcttggaatgggaagtcgaattatcccgatgacacaagatattaaagatgaatttggaaaaggtaattcaatttctcaaactgcagaaagaacacgtttacgaggagtaagaagacttattcatcgaaccctattaagaagggaacgtttacaccgtgttttgaatattataggttttttgcctgaacattacgcaaatcaaatagattttgaaaaacgttttggaaagtttaaaccagaatctgaaccaaaaataagtttcgatggaaatgatgtttttctctttgaaaaatcttaccaagaaatgttggttgattttaaaattcatcagcctcaattggtttcaaatggaaagaaaatcccccatgattggacaatctattatttacgtaaaaaagcgttaagtaaaaaaattgaaaaggaagaattagcttggattcttctgaatttcaaccaaaaaagagggtattatcaattaagaggagaagaagaagaagaaactccgaataaattggttgaatttcattctttaaaaattgttgaagtaaacgcagatgaaccacaaaaaggcaaacctgaaatttggtattcgctcgttttagaaaatggttgggtttatcgaagagcgagcaaaacacctctgtttgattggaaagataaaataagagaatttattgtaacaacagaaataaacaatgatggaacagtaaaaacagataaagaaggtactgaaaaaagaagttttagagcgccaaaaccagaagattggactttgcaaaaaaagaaaacagaattcgaacttagcaaatcaggtaatgaagttggagcatttatttatgaatctatattacaaaaaccaaatcaaaagattagaggaaaattaatcagtacaattgaacgaaaattttataaagaagaattaaaaacaatcctaaaaacccaactcttctttcataaagagctaaaagatgaaaagctatataatgcttgtattgaagaactctacaaaaataatgaagctcatcgttctcttttgagtaataaaggatttgagcatttatttatcaatgacattttattttatcaacgacctttacgtagtaaaaaatctcaaattagtaattgtccattagaaaaacgaacatacaaaaaagagggcatagaaattacagaaggcataaaagtaatttcaaaatcaaacccgatttaccaagagttcagattatggcaatggatttctaatcttagtctttattgcattgaaccaacggaaacaaatgtcacatcaacttttttaaatagtattgaagactatgaaaacctgtttgaatttctaaataatagaaaagaaattgagcaaaaacacttgctgaaatatttattagagaatcaaggatttaaaggaaaactattgaccaacgaattagaaaagtttcgatggaattttgttgcagacaaaaaatatccctgcaatgaaacaggttcattattacacactcgtctttcaaaagtaaagaatatctcacctgattttttaacgaaagaaatagaacatcaattatggcatatcatctattctgtaactgataaaatagaatatgaacaagccttgaaaacatttgctcgaaaaaacaacttggatgttgattcgttttttgaacatttcaagaaaatccctccatttgaaagtacttatggagcatattctgaaaaagccattaagaaattgttacctcttattcgattagggaaatactggaattgggaagcaatagattctatatcgaaagatcgaatcagcaaaatattatctggtgagtatgatgaaaatatcaagaatagagtacgtgaaaaagctgttcatttaacatctgaaaataattttcaaggtctgcaagaatggttagcgaagtatatagtttatgatcgtcattcagaaggaaatgatttaggaaaatggacatctgtatcagatttagaaacgtacttgaaagaatttaaacaacattctttgcgtaatccaattgtcgagcaagttattactgaaactttacgtgtagtgaaggatatttggatcaaacacgggaaaggaactgaaaatttctttgatgaaatacatgttgaattgggtcgtgaaatgaaaaacaactcagaagatcgtaaacgattaacaaataccattacggaaaacgagaataccaatctacgaataaaggctctcctaatggaaatgatgaatgataatgacgttgagaatgttcgaccttattcaccttcacaacaagaaattctaaaaatctatgaagacggtgcgcttaattcaaatatagaactggacgatgaaatagtaaaaattagtaaaaaagcagaacctaccaaatctgagttgcagcgctataaattgtggttagaacagaaataccggtcaccatatactggacaagttattccactaaacaaactattcacgtctgaatatgaaatagaacacgttgtgccccaaagtcgtttctttgatgatagttttagcaataaagtcatttgtgaatccgctgtcaataagcgaaaagacaaccaacttggattacagttcataaaaaatcattctggtgaaaaggtagaacttggttttggaaaagtcgttcaagtttttactgaagaacaatacctcgattttgtcaaagaacattacagcaaaaacagaagtaaacacaataaattactactcgaagaaattccagaaaaaatgatagaacgccaattaaatgacacgcgttatatcagtaaattcgttagctcaattttatcaaacattgttcgaagtgagaaggatgatgatggcttaaattccaaaaatatccttccgggtaacggaaaaataactactgaactaaaaagagattggggattaaatgatgtttggaacgatttaattttgcctcgttttgaaagaatgaacactattacaaatagtgatttattcacaacttacaacgataaatatcaaaaacacttacctaccgttccttttgaatacagcaaaggatttcagaaaaaaagaatagatcatcgtcatcatgcaatggacgccttggtaattgcttgcgctacaagagatcatttaaatctgatgaacaatcaatctgccaaatcagaattgaaaagatatgatttgcaaaataaacttagaaaaaaagagccctattttaatcagaaagagaacaaacagaaagaagcattcaaagattttataaaaccttggggaacattcactgaagattctaaaaatgctttagaaaaaataattatcagtttcaaacaaaacctgagagtgataaataaagcaacaaattcatacgaaagttataaagacgaagatggcaatttgcgtattggtaaagatggaaaacctgaaaaggggctaatcaaacaaaaaggtttgaattgggccattagaaagccattgcacaaagacactgtttctggacagatcaatttatcacgaattaaactcccgaatggaaaaatattgactgctactcgaaaaaatctggacacatctttcgacttaaaaacaatcgaaaattcaattactgatacaggaattcagaaaatacttaaaaattatcttttgagtaaggaaagtccggaattagctttctcgccagaaggcctagaagaaatgaataatgagattgaaaagtacaacaatggtaaatttcatcatccaattaataaagcacgaatttatgaacttggcagcaagtttaatgtaggccaaactggaaaccgaagagataaatttgtagaagcagcaaagggaactaacttgttttttgctatttatcaagatgaaaacaaaaaccgtagttatgaaacgattccattaaatgaagtaatagaacaccaaaaatggcgtgcaagtttaccgaaagaagaacaagaaaagatacctctggttcctgttaacaagttaaaaggaacatttattttcagtctttctccaaatgatttggtttatgtacctagcaatgatgagttagaacgttcagcatcaattgactttagtaaactaaaaaaagaacagataaatagattatataaaatggttagttcatcaggtagtcaatgttttttcgtgaaaagcgaggttgcaacctcagtagtaaataaaatggaatattcttctctaaataaaatggaaaaatcaatagacaacctcatggttaaagaaatatgtattaaactcaaaatagatcgattaggcaacatttcaaaagcataaacaaaatggcacacaaattaataatagagctaaaacacactgaaccaaaaatttccagaacagtcctagttccagagcaatttaccttccatgaattacatgttgtaatacaactgattatgaattgggaaaacgcacacctctatcagttcaacacaggcgctccttatgcgagtgattccattaaaataattgatgaagaggaagaagatttttttgattttggttctcagtttgaagaatatgatgctacagacacctttattgctgattatttcaacagacaaaaaaagaaaataaactatatctatgatttcggtgacgactggattcatgagattagactattgaaaaaaccaaccgaagaagttttgtttcctcaatgtatcaaaggagaaaatgcagctcctgtagaagattgtgggggaatcccaggattttaccacttactagacatactaaataatcaagggaaatcgaaagaaaagaaagaactaattggatggctcggattgtcttcggataaaagttatgaagatgaatttggatttgatattgatgtagttaatcaaagattgttggagacttttgaccaacaccagtaaaatgaaatgagcgaaataattctatatcagaacgaaagcaatcaaacacaaatcgaagtaaccttcgatggcgatactatttggttaacacaaaatcagatggtagacctattttcttcaagtaaagccaatattagcgagcatatttcaactatttttaaatcaggtgaattagacggagattcaactgttcggaaattccgaacagttcgaaaagaaggaagcagactagtttccagagaacttgaacattacaacttagatatgattatctcggttggttatagagtaaatacaaaaagaggtgttttatttcgtcaatgggctacccaacgtctaaaagaacatcttgttaaaggctattccatcaaccaaaaacgtctggacgaattacaacaaacaataaagctcgttcaaaaatctatcagtcaagagacaaatctatcagaagcaaaagggctgcttcaaatcattcagcaatacactcaaagttttatcttgttgaatcaatttgacagtgattcactcatttcagtcaatttaaacgaagagattacctacgaagtcaattatctggaagcgcgagctgctattcatgaattgaaacagatacttattgaaaagaaagaagctactcaattattcggcaatgaaaaagatcaaagttttaaagggattttaggaaatattattcagagtttcgatggacaatatgtttattcatccattgaagaacaagctgcacacctcctctacttcatcattaagaatcatccatttagtgatggtaataaacgtattggagctttcttatttatttggttcttagagaagaataaacaccgattcaaacaaagtggcgaactcaaaatcaacgataatgcattggttgctcttgcgcttttagttgctcaaagtaatcctacagaaaaagagttaatggtcaagctaattgtccaactcatcaaaaatcaataacaatcaaactgtaaccttctgagaacaaatcagtaaaaggagcttgttaaccataaactccttttttagatggtaaagcgcactattcatttcggtaatccggcacatctcagtactcggaaccaacaattggttgtagaactcaaagatgaagctcgaaccaccaaaacaattcccattgaagatttgggagttattattttagaacatccccaaatcaccctcacttcgaacgtactcgaattactcatggatcaacaagtggctgttattacgtgcaatagccgattcatgccttctggaatgtttttacccttagaaggaaatagtgagcaaacagaacgtattcgcacccaactggaatccagtcttccgctaaaaaaacaattgtggcagcaaacagttcgttctaaaatcatgaatcaagcaatggttctagagcgtttcggagttcccaatcaacgtctattgcatttacaaaacgatgttttgagtggggacacgacgaattgtgaggctcaagcagcatctcattattggggaaagatttatggcggaaactttgtgcgttcacgtgacccagaaacacccaatgcgcagttaaattatggctatgctattttaagatctgttgtagctcgagcactaacagcttcaggtatgttgccatcgattggaattcatcaccgaaacaaatacaatgcattttgcttggcagatgatatcatggaaccttatcgcccttatgttgattggttagttctcaatcttccaggactcgatgaagccacggaaggattaacaaaagaacataaaattgaattgctcaagttacctcaaatcgatgtatatatcggagaaataaagcgtcctcttttccatgcagtaagtatgaccactgcaagcctatacaagtgttttgaaggaacacagcgtaagatttcctatcctgagttttaaccaattttgaagatctatgtactcttctcgttttaatgcatatcgaaatatgtgggtaatggttttatttgatttaccgacggaaaccaagaaggaacgtcgtgatgctgctcttttccgcaaaaaactgattgatgatggattcatcatgtttcaattttccatttacatgcgcttttgtcaaagtgttgaaaatgcagaagtacatacgaaacgtgcaaaaaatgcgcttcctgaaaaaggcaaagtagggatttttgccattaccgataaacagttcggtaaaatggaaattttccatggagcaaaaaaagctccagaacgagaactacctcaacaattagaactcttttagctgtggataacttattgaaactgttgaaaaaaaagaagcctattctcttcaaattgatccaaaaaatgactctgaatttcagataaaccatttcttcagaataaaaaaaaaggaacgcttcaaaagaaattgttgaaaactggtttggttttttaattctaaaaaacactctaaacccctactgtacttagaagatagcccacctagttgtgtgctatcgttctaaaaatacaaattgaaagcgaatcacaacaaggtaatcaaaaacgaaaaagatgaaaacgttgtgtgctatcgttctaaaaatacaaattgaaagcgaatcacaactagttagcgaacattccgccaccaaaagaagttgtgtgctatcgttctaaaaatacaaattgaaagcgaatcacaacaatctcttcaggcataccattctttccaatgttgtgtgctatcgttctaaaaatacaaattgaaagcgaatcacaacgctttttcagcatcatgtccgcacatctcagttgtgtgctatcgttctaaaaatacaaattgaaagcgaatcacaacgagcctacatctattattgatgtaggctctgttgtgtgctatcgttctaaaaatacaaattgaaagcgaatcacaacagaatcaactgctgtgtttgtgtgagtttagttgtgtgctatcgttctaaaaatacaaattgaaagcgaatcacaacaattgtccagaaataacaattccgaaatgcgttgtgtgctatcgttctaaaaatacaaattgaaagcgaatcacaacttctattcccttttgcgtttcccttccgaagttgtgtgctatcgttctaaaaatacaaattgaaagcgaatcacaacgaccagcactttgtcctgcggttaaattctgttgtgtgctatcgttctaaaaatacaaattgaaagcgaatcacaacttctatccccttttgcgtttcccttccgaagttgtgtgctatcgttctaaaaatacaaattgaaagcgaatcacaacttcccattacaataaacaaccccagttaaagttgtgtgctatcgttctaaaaatacaaattgaaagcgaatcacaaccccattacgcttttgcggtttgtgcctctagttgtgtgctatcgttctaaaaatacaaattgaaagcgaatcacaactgtttattgtttgaattgttttatgttatgttgtgtgctatcgttctaaaaatacaaattgaaagcgaatcacaactgtaacattataaaataactatctttggttgttgtgtgctatcgttctaaaaatacaaattgaaagcgaatcacaactgttgttggtttgattgatgttggttgtttgttgtgtgctatcgttctaaaaatacaaattgaaagcgaatcacaactaattctttgggatatcattagatggtgtggttgtgtgctatcgttctaaaaatacaaattgaaagcgaatcacaactccgattgattcaagatatgttattagttcgttgtgtgctatcgttctaaaaatacaaattgaaagcgaatcacaactgtaaatgatagaaagttgtgttgattgagttgtgtgctatcgttctaaaaatacaaattgaaagcgaatcacaacgtgatcaaacctacggttcgacaggaagtagttgtgtgctatcgttctaaaaatacaaattgaaagcgaatcacaactgtttttgtcatcgtcagaaacatatattcgttgtgtgctatcgttctaaaaatacaaattgaaagcgaatcacaaccttacaaagtgtagtcgattctttctatttgttgtgtgctatcgttctaaaaatacaaattgaaagcgaatcacaactgtaacgcataccaaccgaatgatttaaaagttgtgtgctatcgttctaaaaatacaaattgaaagcgaatcacaactgaagaatcttttaaacatagattcactaagttgtgtgctatcgttctaaaaatacaaattgaaagcgaatcacaaccaaagacttcgccttgaccgccctttacaagttgtgtgctatcgttctaaaaatacaaattgaaagcgaatcacaacacttattctaaaacttccatttgcattattgttgtgtgctatcgttctaaaaatacaaattgaaagcgaatcacaacttggacatgagatctttcaattttcatcttgttgtgtgctatcgttctaaaaatacaaattgaaagcgaatcacaaccagctgactgagctgtcttcaaatctgcttgttgtgtgctatcgttctaaaaatacaaattgaaagcgaatcacaacgcctttagttcgtctctttttttacgcgctgttgtgtgctatcgttctaaaaatacaaattgaaagcgaatcacaacaatgcgcttaacgttttcgcccaactgtgggttgtgtgctatcgttctaaaaatacaaattgaaagcgaatcacaacgtctgattactcatatctctttcctaaaagttgtgtgctatcgttctaaaaatacaaattgaaagcgaatcacaacaatttgctctaacttatcaacaagttcgtcgttgtgtgctatcgttctaaaaatacaaattgaaagcgaatcacaacgtcgaggtctcgaatatctccatagctaggttgtgtgctatcgttctaaaaatacaaattgaaagcgaatcacaactgagatgtcggttggttgttttatgtatgtgttgtgtgctatcgttctaaaaatacaaattgaaagcgaatcacaacgtgggctgattgtgatgtatctgcaaatctgttgtgtgctatcgttctaaaaatacaaattgaaagcgaatcacaacacaagatagctatacataccgatttgatctgttgtgtgctatcgttctaaaaatacaaattgaaagcgaatcacaactatgacatttttcggctgtccctgcctatcgttgtgtgctatcgttctaaaaatacaaattgaaagcgaatcacaacaaagaatctgcatcgcgtatgttccacatgttgtgtgctatcgttctaaaaatacaaattgaaagcgaatcacaacacgtacagtcaccacggaacagatccaacagttgtgtgctatcgttctaaaaatacaaattgaaagcgaatcacaacaatttcgaagtaggctttaaaaagagtactgttgtgtgctatcgttctaaaaatacaaattgaaagcgaatcacaaccgtaatgctcacctaactgtttatcgtttcgttgtgtgctatcgttctaaaaatacaaattgaaagcgaatcacaacattataggacccactccacacataactgaagttgtgtgctatcgttctaaaaatacaaattgaaagcgaatcacaacggaaacctctacagccaaacagtcaaaaaagttgtgtgctatcgttctaaaaatacaaattgaaagcgaatcacaacagctacatcaaatgaaataactctacaggagttgtgtgctatcgttctaaaaatacaaattgaaagcgaatcacaacctgaaggatcttcagattcgaaaagtgaaagttgtgtgctatcgttctaaaaatacaaattgaaagcgaatcacaacgccaacaatacagcaaatcaatgatccttggttgtgtgctatcgttctaaaaatacaaattgaaagcgaatcacaacagaagattttgtgcgccaatgtttaagaggtgttgtgtgctatcgttctaaaaatacaaattgaaagcgaatcacaacgtgtttttgatgctgatgttgatgtttgatgttgtgtgctatcgttctaaaaatacaaattgaaagcgaatcacaacgaaatcacggtgatttcttgatttgattttgttgtgtgctatcgttctaaaaatacaaattgaaagcgaatcacaacgttatcaagattgtttatcgttgtttttaggttgtgtgctatcgttctaaaaatacaaattgaaagcgaatcacaactgtaggtcggtaaagatgctggttgctgtcgttgtgtgctatcgttctaaaaatacaaattgaaagcgaatcacaacataagatgtcgatgatgtaaatgagattttgttgtgtgctatcgttctaaaaatacaaattgaaagcgaatcacaacgaaagcggttcgtcgaaaccaattcagttcgttgtgtgctatcgttctaaaaatacaaattgaaagcgaatcacaacttgtttagcactctgtttatgctgatttttgttgtgtgctatcgttctaaaaatacaaattgaaagcgaatcacaacttgatttctattctcattaaacttatccacgttgtgtgctatcgttctaaaaatacaaattgaaagcgaatcacaactgctgtacctgtagcaatccacgttcttaagttgtgtgctatcgttctaaaaatacaaattgaaagcgaatcacaacaagtgaagtcattatagcgaagcgaacgtcgttgtgtgctatcgttctaaaaatacaaattgaaagcgaatcacaacaattagcggtagatagaaaattgtgaagcagttgtgtgctatcgttctaaaaatacaaattgaaagcgaatcacaacttgctggtctaaatcaaaagcattaagaaagttgtgtgctatcgttctaaaaatacaaattgaaagcgaatcacaaccgtaaagcaacgaattgacttgttcttcagttgtgtgctatcgttctaaaaatacaaattgaaagcgaatcacaacacaaacacagaaaccaatgagagttaaattgttgtgtgctatcgttctaaaaatacaaattgaaagcgaatcacaacgtatattatgtaaatccttaactataattggttgtgtgctatcgttctaaaaatacaaattgaaagcgaatcacaacggacatgagtagtatgtatgttctgttgttgttgtgtgctatcgttctaaaaatacaaattgaaagcgaatcacaactagttccgagtactgttcttttgtttttgtgttgtgtgctatcgttctaaaaatacaaattgaaagcgaatcacaacacaagtaatacaaagttctataatttgagggttgtgtgctatcgttctaaaaatacaaattgaaagcgaatcacaacaagtaaagtcatcatagcgaagcgaacgtcgttgtgtgctatcgttctaaaaatacaaattgaaagcgaatcacaacctgtggtatgtgctgcaatttttactggagttgtgtgctatcgttctaaaaatacaaattgaaagcgaatcacaacgtgtctgataaaacagcctctttattggtagttgtgtgctatcgttctaaaaatacaaattgaaagcgaatcacaacacctaacggaccagttgaccgattgtttatgttgtgtgctatcgttctaaaaatacaaattgaaagcgaatcacaacagtatcaatcagatgcctacctagaggctagttgtgtgctatcgttctaaaaatacaaattgaaagcgaatcacaacatagattaagttgtctatttctttttttgggttgtgtgctatcgttctaaaaatacaaattgaaagcgaacaaatctattacaaaatagtttcaacgaaaaagaggcaaactttcgaatgcctcgttcaattatttttcaattattccttaaatcgcccgcaaccaataatcgaatttggcatttgctgttccaattggagttagtttgaatgatggtctttcgtataaactcattgtcattgtcaattccatcactaattcatcacgtgcgattagtaatttacacgtttctccttcgccaataccagcaatataactttccaatgctgcattgtcaacacgttgattatcggcagctagaacttcatctccaacgcttaacccagcagattcagctgaacttccagcacgaatagatttcacgatgcaatttcctccttcctgcgaaagtgatgctccaaatgatgttaccgatttccctgtgtatgttacatccaaaccaattttagcaaaaacctcctggtagttaggaatctctgtaccatttacatacttatcgaagaaataatccatgtcttgacccaggaatttctccaatgcatcttgaaattcttgctccgtaaatccacgattctttttgatgtaaaattcctcgtataaatactgcataaaatgatccaagcacttcgaaccattgaatttatcgataattgtcgcatccaaatatgcagctaaaattccacctcttgaataataagtcatagttgtatttgcactgttttcattcggacgataccctttaatccaagcgtcataactagaatgtgcaacaggctgaacccttgatccaacagagccctccacataattcaaagtaccttgtagttttctcaaatattcttctttggtataatatccagctctcacaagcaataattcatcgtaatacgacgtgaaaccttccattacccataacaaggaggtataattttcttcgtcgtaattaaatggtcctaattgaattggacgaatccgttttacattccataagtgaaaatattcatgtgcaactaatgaaagaaaatccttgtacccatttccataagtccagcggtttacactcaaaacacacgaattcaaatgctctaatcctccttgtccattcaccacattgtgaacgatgaatgtataatttttattcgggtttttcccagcaaaaacatcattttcagcggtgataatacgagacatacctactttcaactcatcaatatcgtaatttcccccaccatataaagccacacggtgattcgtttcgcctactttaaaggaaaaaacttcttgatttccaatttcaaaaggagagtcaactagaatatcgtaattcgggaactgaaatgtttgtgccccttctccatctttttgcacctccgctttttccaaaggagtcgttattactttaaaatctttataaggctgtacagttattgttcctggtttatctttgtatccatctaaataacaaaacacacctgaactag

SEQ ID NO: 1206 - DNA, 24372 bp, synthetic construct
  misc_feature 1..24372: note = Synthetic
  source 1..24372: mol_type = other DNA
aaaggaacaataaccgaagtaacaaattatagttttattgataagggacttgctgtcggaagttattcctacagattgaaacaaattgatctggatggaacatttgaatattctcctgttatagaggttgatgtaagcacacccgatcattatacgctttatcaaaattatccaaatccattcaatccggttacaacaattgaatattcactgcccgaaaaagctgatgtaacaatttctatttacaatacgcttggtgaattggtcactacgcttgttaacggaacaatggaagctggttatcagaaagcaagcttcaatgcttcagcatttacatccggtacgtatatttatcagatgaaagcagttggagaaggcaaaacctttaccgataccaagaagatggttctgatcaagtaactctgacgagtgattattttaaaaggcgattcaaaacagaatcgcctttttttgttatttcttaactctcatttcactaattttgcactcaataatccaaaccataaaacataaaacggataaaagatgactgaacaacaagctaaaaaatctgtattcaaatcattctcgctcaattactggatagtaatagtaatggaattttttgaacgcggttcatattacggaatgatgagcattctctctgtttatatgaccgatcaattagaatatacaaaagaaagtgttggagtaattaaaagtgttattcagccaatgctttatatccttccaattctttcaggagcaatcggagacaggtttggttataaacgggttttaacatttgcatttatctttttaggattggggtattttcttaccagccagactacagaatatgcaatggtttttggaagcttgattattatggctatcggtgcaggtgcttttaaaccaatgatatccggaactattgcacgcgaaactaatgaaagcaacagcacacttggttttgggatcttttactggtcaataaatcttggcgcatttttattcccgctgattcttgttccttatattaaaaatgcttttggctggcaatatgtaatggttgcatctgctattggaaccgccgcaatgcttattcccacattttttatatacaaagaacccaaaagaccggaaagcgcaaaaacacttgctgaggttttaaaaggagctgctttagttctaaccgatttcagatttatcggattgattgttatttactcaggtttctggatcctttacttccagatgtttgattccgttttgtggtacgttcaaaaatatgttgatgctacatcactgaacaattttgttaacggattatttaacggaattggagttagcctaaactggaaatttgatgttgaacatgttacggtaattaatgccggaacaattattttacttcagattattgtttcaaatatagtaaaacatacaaaagccttacccacaatgattgccggaattgcaatgggcactgctggtatggctatactcgctattaataccaatatctggatttttatgctcggcattacaattttttcaatcggcgaaatgactgctcatccaaagtttattagttatgtcggattgatcgcacccgaagataaaaaggctctatacctgggctactcatttttgtatggagttttaggaagctttatcggcggaatacttggtgcaaatctttatgtgcattttgttgataaacttaatcagccggcaaccttatggatagtttttagtatgattggtgttgttacaattatcggactgctgctttataataaatttgtaagtcagcataaaccggcacaaagctcataaagtattttatccatttataagtttgcaggatgataatatttgagctgaaaaaagctgtttcttttttacaaagagaaaacattgcaggtgtgagttgaatttattagaatccgctattaatacaaaaactcatccattaacaattccggttcagaagaatggctgaagattactggagctggcagcccggcaaagtggatatgtccaatcgttacttcgagcttaagtatggttatatatacagacctgttgcaaggattgggatcagtaatcataagacctttattgttgagtttttactaaactttgatgatgatgttgatttattaaagaagatttttacagatgttctttatgaaattgaattttatttgattaaaaatcacgaaccggacccgattgagtttatgattaatcattccaaaaaatgttcaaatgcttatggaaaaataagatggtattattttccgaaaggcgcaaataaatatattttcctgaacaaaaactctctgttatataagaaagcaatttcaattaaaaaatatttttcaaaatcctgagcgttgatttaacccttgtgttcagacttctctccgcagttttggcatattgctaagtctataaatttttaagtaagatttaaataattacagagacttttcagttttctttgcagatgaatagtttgccagatcgtaatttatctgtgtatcgggcatatccatttttacaatttcaaccccggcatccgaataaaattgagtagcaagagtatcgtggaaatccgaaaacacaacaacacgttttattccggcagctattaatgctttagcgcaggttgtacaggacatatttgtaatataagcagttgcaccgaaaacattaactccctgtcttgttgcctgaaccagtgcatttatttcagcatgatttgtccgcacacaatggttatcaactattaagcatcctacatcttcacagtgcggttgaccgggcagagagccgttgtagccggttgcaagaacaaacctatctttaacaagcacgcatccgcagtgcattctcggacaggttgctctttcagatgcaagcattgctaattttaaaaagtattcatcccaggagggtcttttattctttgtcattaaacatgttccggaagtagtgataaaaattaatactaaaatttaatgttgtccgggacaaatataggaaggtaaattaaaaaacagaaaattatatggcgttatcttgttttgtaagcccaccgctgtttgcttctgctttttttagcagcccgctgatgtttatagcttttataaacctttaaacttccgcagaatctgcatgcttttgatttatcttctgcactccactcatttttacaattttgacaaatgtaaataagtctctgagtcatcggttatctccaatttttttagttcggttagaatttttgattttatatccgtcttttcagatagatagctgatcatttttccacggttaaaaattattgaatataaattagctccgagtagttttgcttcttctaatttggaagaataagttaaaacgtttgacaagtcgcttgcaaaaaaatcatgttttgcagcacaatcccccaccgcataaatatttttatcagatgttctaaagtattcatcaataagaattcctctgtctttatcgtaaataattccaagcttttcagctatatcaacatttggtcttgagccggcacagatcattagaaaatcacaatccactacctcatctgagcttaacttaacacctgtaacagcatcaagaccaataacctgtctgatcttggaatcaagtataacacgaccgccaagattttcaattactttttttatttcaaaacttatctcagcatcaaaagaagacggcattaacctcgttgatttttcgatgatagtaacacgcttacctaacctaagcaattcatcgcaaagctctacaccgatatagccgccgccataaacaacaatattctcagcacaaacagcttccttttttgtctttcttatcagttcaacgtctttgtttatcagaattactccatccttttttattccttcaatcggcggttcaattgcacgtgatccgctggcgagaacaagtttttcaaattcaataatcctgccgttggttaaaataattttattttgctctctggcgatgatatcatcataaatgatattgaacgtattgttaaaagcaccggtaaccggggttagtatttcctcaatgattgtatttcttctatccggtttaataattgcaatacttttatcgctataagtatttctggctgataaagcgcaaactaaagcaggctcgccattgccagctattactatgtgatatttttccatcgaaactcctgttcaaaatcgataactaaaaatacttgttcactgtaatcgcaaattagttttgatcacagtttaagtaataataaaactatactgctaaacacctgagaaaaaaactttaagctcaacaaacttagagcactcaggatttgtttttaaatttattagaaatttgatttgataataagataatctttttcagagcaatagcaagtttttaattaaccgcttgttaaagcacacatctttaagcactaaaaccattttttatgtttgaaaaagaaagtcataccgattataattagtactgtaaaagcccaaaaaccccagggatacatccattcaaaaccaagctccggaaaattcttaaaattcataccaaaaacacccgcaataaaagtaagagggataaacattgtagaaataaccgtaagcactttcattacttcatttaatttgttgctggtgcttgaaagataagtatcaagcatgcctacgatcatatcgcggtaagattctattgtatcaataacctgaattgtatgatcataaacatcacgcagataaattcttattttctcatcgaaaaaatcaacttcatttctttgcagagatgatatcacctctcttaatggccagatagctcgccgaagcaataacatttctcttcttaacagatgaatagtctgaatatcatttttgcttggatttaaaacgatattatcttcaagcgtctcgacttcttcgccaagtttttccagaatatgaaaatagctgtcaacaatagcatcaattaaagcataagaaagataaccagttccgcttttccgcattattgttcctgctttttttattctttctctaacaggatcaaatacatctcccggactttcaagaaatgtaataagacaattttttgtaagcatcaaacttacctgttcattttttaacgacttatctttttcatccagaaaaaacattcttaaaactatatacaaataatttggatactcatctacctttggtctttgatttgtatttaaaatatcctcaagggttaacggatgaatgttgaaattttttccgatcatttcaagaataccgatattatgcacaccgtcaacatttatccaattagtagcatcagattctttaaggttaaacaattcatcagcccgcgaaattttttgctcagtaaatttatcgtcattataagaaatgagagtaattgtaaccggctgtttttccttatcaccaacataaaccagcgaaccaggcgcaagcccgatgttttttggtttgtttttaataagtctgcttacttttcttaactgcttttttgtccggtgttttattttcttgcccgtgttatcaagcataatatactcatcggtttgttaaaacttgtttgtggattatgtgcaaaaataagattaagtttaataagaatttatatagaaaatttaatcagttgattataagccatataaaaaccggaccggttgtattcttaattctgtccgcttttgtatcatgctcagtcttagatgatgattgtatatgttcaacggagtttcgttattgtatagtaactgttgtagattcgcttgggattccggcagattctttaatagtaaccattaaagacattgatggagatgagcttgatgttcagcaagaccagtattttactgatgaaggtaaatataccgtgctaaacgattcctttactcacataatgtgtgcttgtggtacccagcaaaaaatctatttttctgcaacggatggaattagaacagcaaatggcgagtttatgtttaatactgatagatgcagatgtcacattaataaagtatccggacctgatactttagtactgagataattattattaacccgcaatgtcattccggtgaaaaccggaatctaaaccacaaacaatagattcccgcttgcgtgggaatgacttacaaccaagctttttctaatttctgccaaacagttcagtaaggtttagtgtcggagttttggatttgcttgcaagcgaaacataagttaaagcaagctcttcttttcccgcaccaagaacagtgcttaccaatcctaaagctttgccgagattttcgggtgcaatgtttttagtaacacggttccatatctctacttctaaaacattaaatgctgtgtgtacttcgtgcaagccaaatcccgcattaaatctttctcttgcaatttgtgctgaatattctttcatgggcagaagatttctttcacttacacattgctgagttaatgtaagaagatttaacagtcttgttctgttttcactttgtgaagatttactgtaagattttaaataagcacagtttaaagactgatgagcgctttccagaatttctgaactttgtgttttaagcaggtcaattaaattcattttcacaaccagttattaaattacatttcaaaattaaagaataattatcaaagctttataatacttcagagttttaatgttttagcatttaaaatttttctaaatcaatttaatccagcttaccaatctgtctttaacaaaccctaattgctcaacaagattaattgccttttgatttttttcctcaatctgtgcaaaagaaattctgccaagttttctgttttgatgaataagcgaaagaagaatttctctaccataacccttttttctataatcgtcaagaacatgcagagagccgagagcaccatcgtcatgagttaaaccccaggctacaagtttattcttcttcattatagcagcacttatagatttgtttattctttcttcaacataagcagcggttaaaaactgtctgtagttcgattgagaaattataaaacctatatgatctgttgttaaaggtattacatcttttttatttaccggaatctccacatcatccggcagaaagtagcgcatcgtagtaagtatccactcagcttttctttttccggtaataaaaggtatcatccagctttctactgatgcaaagtaagtgctgttacctgctttctctaacaaagctttaagttctgcttcgttattgcagacaatataaacccaatcaacatcgcttgagcctttaatcagaaatgagttgtttaattcgatgatctctgtaatcgggttgttttcaataaaaccgattgtgctgatatttgaaataacatcctgtttaagataattgataatattaatcagttccgttttcatttgaaggattcttttctttaataaaaaacattaatactgctgtaatcataccaaaaaataatgcagagttccataaaaaagcagagccaaaattttcataaacaacagtgcccagccagggaccggcagaaaatgcaaaactaaaagtcatttgataataccccatatattcaccgcgtctttccggcggtgtaatttcagaagtatatgcggctgtagttgggaaaaaaatcatttctccgaatgtaaaaatgattatggcaattataagcggtaatgtagatccagcaatcgcaaatccgccaaaacccaagcccgcaagtgatgccccgatcattaaagattttctgtatggtgtattgctcatcatattattaagcggaacttctgcgatgattattaatacagtatttatcgaaccgaacaatccaaatgctgctgtggaataattaagatcattaactatgtaaagcggtagtgcaccgagatgttgaaagaaaacaagatttgccggaatgatagcaaacaaaaaaaacaaaaaatgtttatcatttaatatcccaaactttatcttcggtttttctttaacaatatctgcttctgccggtgataatgaagaccatctgacagaattaaaataaactcccgctgcaattgaagcgaaagcatttgcataaaaaagataatgataatcaataagggttaaaaaacctccgataaccggaccaatactcattcctgcattaatagccagacgatttaatgcaaaagccattctgcgctgcggcggagttactatctcggtaattaaagagagatttgccggacgaaatgcctcgttgacagcggcaagcacaaaggttgcggcaagtatcagtttataatcagatataaatgagtatataaaaaaaagcaaacccgaaccgtataatgaaaactgcattattttaatcgagccgattttatcagaaagttttcctgttaatggtgctgcaataaaagcggcggctccgtaaacaagtaatgcagttcccgcttctgttggtgttacaccgattttttttgtaagataaagtgcaagaaaagggattaccattgtgccagaacgattaatgagcgaagtaaaaaacagcgcccacatatcatgcggtaaatcttttaatcctttccagggattcataaaaaagaaattttaaaattatttttgaaagggaaatttaagaaaagaacagttaactatactccaatcaatctcataaataaaaatattaacaaaccaaaggtagctccaagataaagtaagcggatatatttacgcccttcttcattttttgatttgatgagtttatatgttgaaataccgataaagaaatccattacagctattggtaaaagatatatcagcttaaaccactgtaataaaaaaggtattaaacttaataatattacagatgtaaaaattaatccgcttaatcttaatgctttttctttaccatatttgattgctatcgagttcgagtcaataagcagatcacccttaacatccattgaatcagcagcaatttcttctccgagatcaacaagtgcggcaataagtgcaaagaacagaacgattttattaaatggtaatccaacagataatccgccaaaaataaaagtcatacctacagaaaaactaaccataagatttccggttaaaccattaggtttaaattttctgttgtataataaaccgattacaattaaaccgattgaaaataataaagcctcaatgctgatcgtatagcttaatattattccggttattaataaaaaagatgcaagcagcagtgcttcattggaagtaacagcattagatggtatgggtctgtgtggtgcatttattctatctgtttcaacatcaaagtaatcgtttgaaacgagtatagacgccgagataagaaaaacggatattgcagccgaaagagttaaatgcagcggtgcaaattttccaagagcaaaaagctgaccaagcattacacaaattgctgctgcaagcggtaactcaaatcttattagtctgataagaccttttaattttttcataccataaaattactaatgaatttgctaaaggaggaaaaaaattattactcgttaaacggtaataacaaattgcaaataaggatcaggtacataaaaagttattgatctgaatttactcagaattgttgcctttgtttctcttacttgttaagttagcagaggaagtatgtttatcaaagtaatatataagatatcattcccttctttcctcaatccttttacgcatttaggggatgctgatttggcgggtaatattatgcactcaataatcaagcggtgtttggttctttaatttaaaacaataatcccggcttaaaaccgggactattgtaaatgttttcacaacggaataatccttattgtgatttgcttcaattagctaaacgaaacttaataaaaatttttttaattagaaaggatagaaatgaaaaatatacttggacttgacctaggcactaactcaattggttgggctttagttgataaagaaaatgacaaaattattggaatgggtagtagaattataccgatgagtcaagatattttaggagaatttgggcaaggaaactcaatatcacaaactgcagagaggacaaactttagaagcataagaagactacgtgaacgttatctgcttagaagagagcgtttacacagagtgttaaatataatagggtttttaccacaacattattctaatcaaattgattttgaaacaagactaggtaagttcaaggaagaggcagaaccaaaaatagcttataattccattattaatggaacaaatggtaaaatccaatttgattttcttttcaagaaatcatttacagaaatgttagatgattttcgacaatatcagcccgacattgtagcaaatggaaataaaatcccgtacgactggacattatattttcttcgtaaaaaagcattaactaagaaaattgaaaaagaagaattagcctggattttattaaactttaatcagaaacgtgggtattatcaagtccgtgaagataatgatgaaaatataaataaaaaggaatatgtgatttcattaaaagtaacacagattataaaaggtgaaaaagataaaaagagtaaaaataaaaattggtatagtattattttagaaaatggatgggtatataatgcaacatttgctttagagcctcaatggttaaacaatgaaaaagaatttcttataagcgaagaattagatgaaaacggacaaattaagattgttaaagataaaaaatctgataaaggaggtaaagaaaatcggcgaataattcctcttccaacttttgatgagattgatttaatgagtaaaggggaacaagacaagatttataaaaaaattaagacaaaaactgaaacagcaatcgaaaatagcggtaatactgtaggagtatatatatatgagaaccttcttaaaagtccattccaaaaaattaggggtaagttgatacgtacaatagatcgcaaattctatagagaagaattaaaaaaaatcctccagaaacaaaaagaatttcattcagaacttagaagtgaaaatttatataatgattgtgttagagaattatataaaaacaataaagatcatatatttttattaagcaaaagggattttgttcatctattttcagatgatattattttttatcagcgcccattaaagagccaaaaatcctcaatcagtaattgctcttttgagttcaaaaaatatagtgtagataatgaagaaaggattgaatacttaaaagctatacccaaatctcatcctttatatcaggaatttagactttggcaatggatttataatctgcgaatctacagtagaaatgatgattgcgatgttactattaattatttgaacgataatgaaagatatgctgatctatttgagtttttaagtaaaagaaaagaaatcgaacaaaaagccttattgaaatattttaaattaaaagattctacgcatcggtggaattttgtggaaaataaaaaatatccttgttatgaaacaagatcccttatttctacaagacttgaaaaggttgaaaatgtaccgatgaactttttaaacgataaaacagaacaatatctttggcatattatatattccgtaaaggataagaatgagtatgaaaaagctctaataacttttgcaaagaagaatagacttgatatagaatcttttgtagagaactttaagaaattcccaacgtttaaaaatgaatatggaagttattccgctaaagctcttaagaagttgataccacttatgagaatcggcaggtattggaatctggataagattgatgaacaaactaaatcaagaatagataaaatagttacaggagaatttgatgaagaaattaaaaataaagttcgcgaaaaatcgattagcttaactaataataatcactttcaagggttacaactctggctggctagttatattgtttacgatcgtcattcagaggcagcgacaataaataaatgggagacaatacaacagctaggcgagtacattgataattttaagcaacactctttacgcaatcctattgtagagcaaataataattgaaactttacgtgtagtaaaagatatctggcatcattttggcaaagataaaaacaatttctttgaagaaatccacattgaattaggtagagaaatgaaaaataatgctgatgaacgcaaaagaattacaaatcaaatgattgataatgagaataccaatatccgcattaaatctttactctcagaattaaaaaatgattcgagcatccaaaatgttcgtcctaattcagctgttcaacaggaactattaaagatttatgaagagggtgtattaaattctgatatagaaatcccagaagatattttcaaaataagcaaaacagctcaaccatcaaacccagatttgcagcgttacaaattgtggttagaacaaaaatacagatcaccatatactggacagataattcctctttccagattatttaccacagagtatgaaattgaacatataatacccccaaagtcgttacttcgacgatagctttaataacaaagttatctgtgaatcgtcagtgaacaagttaaaagataatcaaatgggattagaatttattaagaatcatcacggagaaattgtgcaaactggatttgaaaatagtgtaaaaatatttgaagagagcgaatatcaggattttgtgaaaacacattatataaagaaccgttctaaaaggaataagctattgatggaagaaattcctgaaaaaatgatcgaaagacaaattaacgatacaaggtatattgctaagtttattagtacattactttctaacctagtacgttctgcaagtaatgatgatggtgtaaattctaaaaatttgatccaggtaaatggtaaaattacttctttacttaaacaagactggggtatcaatgacgtatggaatgatttaatcttacctcgcttttatagaatgaacaaaataacaaatagtgattcattcacaagatatagtgagaagtatcagaaatatttgccaacagtcccaattgaattttcaaaaaattatcaagcaaaacgaattgatcacaggcatcatgctcttgacgcattgattattgcttgtgcaaccagagaccatgttaacttattaaacaataagtacgctaaatcaaaagagagattcgatcttaatagaaaacttcgcaaatttgaaagaacagcatataatcatccacaaagtggtgaaagaatagagagagaggttccaaaagaatttctaaagccatggaataattttacagttgatttaaaaaatttccttgaaaaaatagttgtaagttttaaacaaaatatcagagttataaataagacatcaaatatttataagaaatgggttgaggttaacaaaggaaaggtaaaaaaagaagtcaaacaatcaggtgtaaactgggctatacgtaaaccattgcataaaaagacttttgctggtaaagttgaattaggaaaagtaaaagttcctaatggaaagattttaacagcaacacgaaagaatcttgatgcttcatttgatttaaaaactatagattcaataacagatacaggtattcaaaagatccttaagaattatttattatctaaaggaagcaattcgtcgattgcttttgctccagagggtattgaggagatgaataaaaatattaaactgtacaatgatggaaagcctcataaaccaatttataaagttaggatttttgagcttggcagtaaatttatattaggtttgactggaaataaaaagttaaaatatgttgaagctgctaaaggtacaaacttattctttgctgtttatcagaacgaagatgaaaaaaggaatttcgaaacaattccactaaacatagttattgaaaggcaaaaacaaggtctaagctctgttccagaaaacaataagaaggggcataaattattattttatctttccccaaatgatcttgtttatgttcctgatgaagatgagagagaaaacaattcaattattgatttttataatcttacaacaaagcaaattaataatatttataaaacagtaagcttttcaggtagtcaatgcttttttataaaacatgatgtggctaattctattgtggataaatcagaatattcaaaatcaaacaaaatggagaaaagtattgatggaattatgataaaggaacattgcataaaactcaaagttgatagattgggaaatattcttaaaacgtacagatgattaaaagaacattatattttggcaaccccgcatatctttcaaaaaagaacgatcagcttttgattagattgcctgaagaaaagagcgaaacagataataaaatggagttaaaactcaatcaaaaatatctggaacgcggcaatgttaattcaatccctattgaagatattggaattgtaattctggatcatcagcaaattacaatatcacaaggcttactctcttcgcttctggagaacaatactgcagtagtatcttgtaacttttctcatcatccgatcggtttattccttcctctggaaagcaatcttgttcagagcgaaagatttcaatctcagatagaagcttcggaaccgcttaaaaaacaactatggcagcagacaatttcagcaaagatttacaatcaggcggctgttctaagtaatcataaaaaatctaacgataatatgaagcgatgggcaaaagatgtaagatccggtgatgttgataatctagaaggaagggcagcttcatattattggaaaactatatttccacctggactagaatttaagcgagacagatacggacagccccctaataatttgcttaattatggttatgcgattttaagagcagtagtagctcgcggtttagttgcttccggtttgctgcctacacttggcatccatcatcacaacaaatacaatgcttactgccttgcagatgatattatggagccttacagaccgtatgttgatgagattgttattacatttgttgaagatggagaggactttactgagcttacacattcgattaagaagcaactattaacaattccagcagtggatatttttatcgatggagagaaaagtccattgatggtagggatgcaaaaaaccacctcttctttagtgaaatgtttcagcggagaggctaaaaaaattatttatccaactatgtttcattaaatgtatattgatttgttaacacaagtttaatctttcagaaaaaaggttagtcttgttttattaagcagttaataatcattatcggaataaaaaagcatacatttgttcaaaatatttagaaacaaaatagtttatattaaaaatgttgtatccattatcttttgattaatgggtttgtggtgatttaataagagaaatgaataatcgtttaaaccaatatcgcattatgtgggtactagtcttttttgatctaccaacagaaacaaaaaaagatcgtaaaacctatgctcgtttcagaaaagaacttataaaagatggtttttcaatgttccagttctcaatatacgtgcgtcattgtgctagtaaagaaaataaaaatgtgcatgtaaaaagaataaaaaatattctacctgaaaaaggacatgtaggaattctatcaatcaccgataaacaatttggtatgatggaaattttttatggtaagaaaaaagaagaatctggattcatagaagctcatcaactcgaacttttctgaactgactgattgtcacccttaatttttctaagggtgacaaagtcatcagtcatttttctgatattaaaaacggtctgttaaatttacagttggatttttttaatcctgtaattgctgtaagtgcttgtatatcaatgaggtaaaacacaatgagttgtttttaatatcctcaaagaactaattgaaagcaaatcacaacccatatactatcctgcccattagcaccaggttgtttttaatatcctcaaagaactaattgaaagcaaatcacaacacctttacggatgttaccaatgcaacaaggttgtttttaatatcctcaaagaactaattgaaagcaaatcacaacaagccttacatatcactatgatgacccgagttgtttttaatatcctcaaagaactaattgaaagcaaatcacaacaaaagttcttgctgagattgaggagaacgagttgtttttaatatcctcaaagaactaattgaaagcaaatcacaacggtgcaggtttcattaatgaaaacgaaaaagttgtttttaatatcctcaaagaactaattgaaagcaaatcacaacgtacctaaacggtactccaactcactaagttgtttttaatatcctcaaagaactaattgaaagcaaatcacaaccttgcactatccggcatcggctggtgcggggttgtttttaatatcctcaaagaactaattgaaagcaaatcacaacgagtcaagtcggaacatcaaaaaacggcaggttgtttttaatatcctcaaagaactaattgaaagcaaatcacaactacctaagtggcgcattatttttttttacgttgtttttaatatcctcaaagaactaattgaaagcaaatcacaactaagcttcttctattgtgtttgcctgtgccgttgtttttaatatcctcaaagaactaattgaaagcaaatcacaactgcaaccaaactaaagagcaataacttaaagttgtttttaatatcctcaaagaactaattgaaagcaaatcacaacatgaaaggaacgagcagaaactttatcaagttgtttttaatatcctcaaagaactaattgaaagcaaatcacaacaacttgatgatttattcgattgggggtttagttgtttttaatatcctcaaagaactaattgaaagcaaatcacaacttctcagtgaatttattctcaagtctttgtgttgtttttaatatcctcaaagaactaattgaaagcaaatcacaacacggcaaaggagatagaccttcatacttcggttgtttttaatatcctcaaagaactaattgaaagcaaatcacaacatgaaaggaacgagcagaaactttatcaagttgtttttaatatcctcaaagaactaattgaaagcaaatcacaactaaccaataataatacaattaatactacagttgtttttaatatcctcaaagaactaattgaaagcaaatcacaactcctgtaataaaattcaaagccaacaatagttgtttttaatatcctcaaagaactaattgaaagcaaatcacaactcctgtaataaaattcaaagccaacaatagttgtttttaatatcctcaaagaactaattgaaagcaaatcacaactaccattgcattattcattttattatttcgttgtttttaatatcctcaaagaactaattgaaagcaaatcacaacttcgattaaacagctcttattgtttcgttgttgtttttaatatcctcaaagaactaattgaaagcaaatcacaactgccgttaattgcttcttccattgcatcttgttgtttttaatatcctcaaagaactaattgaaagcaaatcacaactcctcgataatatatcaggcactcagacaagttgtttttaatatcctcaaagaactaattgaaagcaaatcacaacaggctctcaaaagccttttggaatttctcggttgtttttaatatcctcaaagaactaattgaaagcaaatcacaactttccatatctgttaaatcaatttgtaaaagttgtttttaatatcctcaaagaactaattgaaagcaaatcacaaccgccccacgtatttccttctattaatgcttgttgtttttaatatcctcaaagaactaattgaaagcaaatcacaactaaaataaatttggatcgtgaatataattagttgtttttaatatcctcaaagaactaattgaaagcaaatcacaacaattgttaccaatgccaaaattaatacttgttgtttttaatatcctcaaagaactaattgaaagcaaatcacaacttatcccaacctaaaaaattactgtcgtttgttgtttttaatatcctcaaagaactaattgaaagcaaatcacaacgtcctttccaattgttctatattcatctatgttgtttttaatatcctcaaagaactaattgaaagcaaatcacaactgagttcgcttcggcattaggtcttaagacgttgtttttaatatcctcaaagaactaattgaaagcaaatcacaactatctcttttccattttatttctccatctcgttgtttttaatatcctcaaagaactaattgaaagcaaaccacaactatgaaagcgtaacaaattgtaacgctttgttgtttttaatatcctcaaagaactaattgaaatcaaataacatctgattattccaaacctgccgatgtattacagcagcatcaggtatccttaaagaatttatagcaaacaaaataacccgcgctgtttagccgccgtaaatattgcttaaaaattcaaacagtgtttttccctttgagataccttgcagctttatatttaaattgttcattatctcattaaatacatccgaaaccctgtcatcatcacaatttgaaaataacacaaccagaaaatttttttcaggattgtgataaacaatattatgaaatcctgtactttcacccgaatgaaaataaacattgcttccatctgcttcatttgctataaaccatccgtagccgtaactgagaccttttttaataattgcgcgcggctttaacggattaagtaaatcattatcaaattgcttatcccataacgattgaatccacttttgatattcattcaaagaagtgtaaaccgagccgtcgcccattgtagcgctggttatactttggtcggcaaaaacccatttgttatcttttaaatgataaccgtaagcccgtttgaaaatattcttatccttttcgtaaataactgtatgcttcatatcaagcggagtgaaaatattttcccggataaattcaggataagaaagtccggatactttttctactatttgtgtaagcagacaaaaagctgtgttgctgtatttaaattttgaatctggtttaaaatataaactgtctgatccgctgataagctgtaaaacatcagcatccgaaatttgttctttctgatcttttgatattaacaattcataatctgcaattccggatgtatgggtaagcagttgtttgatggttatatcctcagccaatttcggcaaggagggaagataatttataaccgcatcattgatgttaagtttattctgattttgaagaatcagaatacacatagcagtaaattgtttgcttacagatgccattctgaaatgagtatctgatgaaataatttctttgctgttaatatctgccagtccatatcctttattgattataacctgattatcccgaacaacaagtaaggcagcacccggaatatctgcaggatatatttttttcatcaggctatcaagccttccgaagcttatttgattctggctttgcacggtgaccattaaaaataaaagataaataaaaatcattattacgaatcttgtaaagatattttttctgttaatgataaacacactcctttttctgattaaataacctgaaaaaatccggctggctgaaaataaaaatcagtatccaattataaaagccgttataatttaaatgtaattattaaacttaatccataaattgattttcgtaaaatcagtttttagtatagctgcaaaaataaatgttttataaaagtcagaaagatttatgaacaatacaattacaattttcgggagcgcagtccctgttgaaaatgatgcccaatataaatttgcttatgagcttggtgctgctttaaccaaagccggatttaatatttgcagcggcggtaataaaggcataatggaagcggtttcaaaaggagcttttgataatgatggaaagatttacggggttactgttgatctttgggatgttaaaccaaatccttacataactgttgaagtaaaagaaaaaaaactatttgacagaatcgcaaaacttattgagcttggagatgcttatgttattcttcaaggcggaacaggaaccttgctggagtttgccgctgtttgggaatatgcaaataaaaatcttcagaagcagaagccgattgtttgtcattctaagatgtggaaaacagtttcggatgtaataaacgaacagctgaaatcagaaaaccgtaatacagatttggttaaatactgcagctccgttacagaaattgttgagtatttaataaagacagtttaatcttttctcagaacaaatgtggtcttatcccgtgtagcaaaaagaaccgcctttatcttatcataaaatcttttagacttaatttcttttaaccaggtttttaaataaccggattctttataatataaaacagacaacctgtgatatgaaaaagattttttcagttcagatttagaaaatgaaaacggatgccctttgtcaatcttaagtaactcaataacacttctgataaactttccccaagcgtgataagtattctgccggaaataaattataccgccgggtttagttacccgctgtatttgagtaaacacttttccggggtcttcgcaatggtccagcacattatccataataatcaggtcaaaaaaattgttctcaaaagtaatttcttcagctttgatgttgaaatatttaacctgcttatctctgatttgtgtaaacttttctattgatgaatagatattttcaagagggtcaattgcaaaacgataactgcttttcaaataagttattattccggcagcaccgcttccgatttcgagtatgtgtgtatccgattcaattttcagataaggctgtaagattgcaagcatatcctttgcaaatctttcataaaactccagatcaagctcgctggcttttgaaatccaccagtttttttcgtaatgctgggcaagatcccatctgtctttagttttcatttataaactcagttactttatttaataccaattcaacagtcagttcttttatgcatttaaattttacatcagttctggaacaagtaagcggttttggcgaataaaaaaaacaaggcgaacattccagatataacgaagctattttatactcggttttccagggatgaatataatattggttggttggaccaataatagcaacgacttttaaaccaagtgcggcagcaatgtgcatcaaagccgagtcgttggtaacaaatatattacagcgtttcattattgcgatgctttgtaaaaatttttctgtctttgctgtaaaagatttttctgagctgattgttttattgattgattttttaagatcatcttcttcgggtcctccgaataaaagtactttggcgcctttatcgcggattaatcttttgccaagctctgcaaacttttccggttcccatcttcgcttgatatgattttttaatgttgcacagccgggatgaaatccaacaacaaaatcatcgtcagcaatattattttctttaagatagttttgtgcatacagggtatcagcttcagaaagaaaaatctgcaatgccggttcttcgcccgtttttttatctaatagtttttcaatcagtctgatatttgtctgtacgttatgagtttgatcattttccaaaacagttacattgttcagccatccaagatcctgaaagttcatccgcaaatatttgaccccggctctttgcttagccccaagcaataaatttataatgttatattcttttctgttagaaggataaacatttatagccgtatcatatttttttcttaacgaaaaaataaactttaatgatttaagcagcccctctttcagaaaatcaaaatgaattacattattaagtgcaggattgttttgatagatttctttggttcccttaaacattacaagtgcatcaatctgtgccgaagggagttccgagcggagcagttttaatgcaggtgtaaacattaatgcgtccccaattcctgataatgccagaattaaaattttcatagccgaataatatttttaaaactgtccgcaaaacatatatttgcttgtgtaagatttagcattacgaagatagatttttaattatctgtcacactcagacaggctaagtgtgacattttggttttcagaacagtttatacaaaaaatatttttattgtgtcgttttacttgtatctggttttccctgaacaaggtttctgtatttttctatatttgcccgcacattctgatcctagggatatttagtgccgagcatttgccagatttccagaagtttatcgtttttaccttgtgtttcgtaaatatcaagcagtatccgatacggattataatatgattgaacatcatctggattagaattaagttttgcaaccgcttgtttctccacatcagaagcaaataaattatatttatccattgcgcctgcacgcaaatacagattgctgatttcgtataacaatccaaaatccatcggaataagtttgttaggaagtttttcatccattgtattaagggtatttactgcaagttcgttttgtccttttccaagataatatagtgttaatcttaaaaaagcattccgataattctgaaccatccgtttatggttatcatcaaggaaaatattcgggtcatttaatccccggaatttaaatcccggctgataatctttactgtatcctactgcttctgttaaatttgcttttaaaatgtttggttcgataaactcatcgttagcagaccgtttttccggtactaaccgaaaagccattccttccattcttaaatagttgcccaagccaattttactgtcttctgaacaggtaactgcaaaataaattggtctttcccagttattagactccacaatttctttaaccatcaggtcctgcacacgtactgctttaacggtaccgtaatttaaagtcggattcatcgtccagctaagcgcaccctgatttaataccgaagtatcctttaaaccaaattgttgaactatatccgcaaaagaagtttcagaagacgattttggcggttgaatagtcagatttctgggctcccaccgaattggactaagttgatttatctgtgcatcggttaaacgcattttaaccgttcctactttatagggatcattattcttaagctgcttgatataccactcagtatttaacaggctaagatttgcaattttaacatctcttctcacaccttcaacatcctgcaaataccacaatggaaaagtatcattatcgccattagtaaacagaaccgagttaggtgcgcagctttgtaataagttatatgaataatcccatagcacccagttatttgatctatcgtgagtaaaataatttgcctgaagcattttaaccggtacaaaaataattcctaaagcaagcacaccataagcagcagcatttcttattgaagcttttttaattctttcgttaatcagatcaattaatccgcggataccgatagcaatccagattccgtacacaaagaaagctccgacataaaaataatctctttctcttggctgcggctgctgctggttttgatagaatgcagttaaatgccccatcagtataaacataatcagaaagacgcttgccattttccagtctttacggaaatgaaaatatattccgattaaaccaagcagaaaaggaataccaaataatgaatcttttgtttcacctccaaagtgaacatcaaaaatctttccgaagatatttccaatagaattaaatggtgcgatattagcgccttgatcttgttcccagccctctctgccggcaaaattccataacaaatatcttgtcatcatgtgttccatctgataagtataaaagaaatctaaatcagatgaatagtttgtgtaaacaatctgctgatgtggttcggttgcaaatcttcttttaaatgtcggaaagtctccatattgttcacggtcaagatatgtttttaacttagtaaaagtattcggattgttttcattcattggcggctgttgatttgatcttattattaccattgcaaaggttgtaaatccaatcagaatgaaaattgcagacataaatacaaggtgcaatgttggcttggattttctttttg

SEQ ID NO: 1207 - DNA, 24371 bp, synthetic construct
  misc_feature 1..24371: note = Synthetic
  source 1..24371: mol_type = other DNA
aaggaacaataaccgaagtaacaaattatagttttattgataagggacttgctgtcggaagttattcctacagattgaaacaaattgatctggatggaacatttgaatattctcctgttatagaggttgatgtaagcacacccgatcattatacgctttatcaaaattatccaaatccattcaatccggttacaacaattgaatattcactgcccgaaaaagctgatgtaacaatttctatttacaatacgcttggtgaattggtcactacgcttgttaacggaacaatggaagctggttatcagaaagcaagcttcaatgcttcagcatttacatccggtacgtatatttatcagatgaaagcagttggagaaggcaaaacctttaccgataccaagaagatggttctgatcaagtaactctgacgagtgattattttaaaaggcgattcaaaacagaatcgcctttttttgttatttcttaactctcatttcactaattttgcactcaataatccaaaccataaaacataaaacggataaaagatgactgaacaacaagctaaaaaatctgtattcaaatcattctcgctcaattactggatagtaatagtaatggaattttttgaacgcggttcatattacggaatgatgagcattctctctgtttatatgaccgatcaattagaatatacaaaagaaagtgttggagtaattaaaagtgttattcagccaatgctttatatccttccaattctttcaggagcaatcggagacaggtttggttataaacgggttttaacatttgcatttatctttttaggattggggtattttcttaccagccagactacagaatatgcaatggtttttggaagcttgattattatggctatcggtgcaggtgcttttaaaccaatgatatccggaactattgcacgcgaaactaatgaaagcaacagcacacttggttttgggatcttttactggtcaataaatcttggcgcatttttattcccgctgattcttgttccttatattaaaaatgcttttggctggcaatatgtaatggttgcatctgctattggaaccgccgcaatgcttattcccacattttttatatacaaagaacccaaaagaccggaaagcgcaaaaacacttgctgaggttttaaaaggagctgctttagttctaaccgatttcagatttatcggattgattgttatttactcaggtttctggatcctttacttccagatgtttgattccgttttgtggtacgttcaaaaatatgttgatgctacatcactgaacaattttgttaacggattatttaacggaattggagttagcctaaactggaaatttgatgttgaacatgttacggtaattaatgccggaacaattattttacttcagattattgtttcaaatatagtaaaacatacaaaagccttacccacaatgattgccggaattgcaatgggcactgctggtatggctatactcgctattaataccaatatctggatttttatgctcggcattacaattttttcaatcggcgaaatgactgctcatccaaagtttattagttatgtcggattgatcgcacccgaagataaaaaggctctatacctgggctactcatttttgtatggagttttaggaagctttatcggcggaatacttggtgcaaatctttatgtgcattttgttgataaacttaatcagccggcaaccttatggatagtttttagtatgattggtgttgttacaattatcggactgctgctttataataaatttgtaagtcagcataaaccggcacaaagctcataaagtattttatccatttataagtttgcaggatgataatatttgagctgaaaaaagctgtttcttttttacaaagagaaaacattgcaggtgtgagttgaatttattagaatccgctattaatacaaaaactcatccattaacaattccggttcagaagaatggctgaagattactggagctggcagcccggcaaagtggatatgtccaatcgttacttcgagcttaagtatggttatatatacagacctgttgcaaggattgggatcagtaatcataagacctttattgttgagtttttactaaactttgatgatgatgttgatttattaaagaagatttttacagatgttctttatgaaattgaattttatttgattaaaaatcacgaaccggacccgattgagtttatgattaatcattccaaaaaatgttcaaatgcttatggaaaaataagatggtattattttccgaaaggcgcaaataaatatattttcctgaacaaaaactctctgttatataagaaagcaatttcaattaaaaaatatttttcaaaatcctgagcgttgatttaacccttgtgttcagacttctctccgcagttttggcatattgctaagtctataaatttttaagtaagatttaaataattacagagacttttcagttttctttgcagatgaatagtttgccagatcgtaatttatctgtgtatcgggcatatccatttttacaatttcaaccccggcatccgaataaaattgagtagcaagagtatcgtggaaatccgaaaacacaacaacacgttttattccggcagctattaatgctttagcgcaggttgtacaggacatatttgtaatataagcagttgcaccgaaaacattaactccctgtcttgttgcctgaaccagtgcatttatttcagcatgatttgtccgcacacaatggttatcaactattaagcatcctacatcttcacagtgcggttgaccgggcagagagccgttgtagccggttgcaagaacaaacctatctttaacaagcacgcatccgcagtgcattctcggacaggttgctctttcagatgcaagcattgctaattttaaaaagtattcatcccaggagggtcttttattctttgtcattaaacatgttccggaagtagtgataaaaattaatactaaaatttaatgttgtccgggacaaatataggaaggtaaattaaaaaacagaaaattatatggcgttatcttgttttgtaagcccaccgctgtttgcttctgctttttttagcagcccgctgatgtttatagcttttataaacctttaaacttccgcagaatctgcatgcttttgatttatcttctgcactccactcatttttacaattttgacaaatgtaaataagtctctgagtcatcggttatctccaatttttttagttcggttagaatttttgattttatatccgtcttttcagatagatagctgatcatttttccacggttaaaaattattgaatataaattagctccgagtagttttgcttcttctaatttggaagaataagttaaaacgtttgacaagtcgcttgcaaaaaaatcatgttttgcagcacaatcccccaccgcataaatatttttatcagatgttctaaagtattcatcaataagaattcctctgtctttatcgtaaataattccaagcttttcagctatatcaacatttggtcttgagccggcacagatcattagaaaatcacaatccactacctcatctgagcttaacttaacacctgtaacagcatcaagaccaataacctgtctgatcttggaatcaagtataacacgaccgccaagattttcaattactttttttatttcaaaacttatctcagcatcaaaagaagacggcattaacctcgttgatttttcgatgatagtaacacgcttacctaacctaagcaattcatcgcaaagctctacaccgatatagccgccgccataaacaacaatattctcagcacaaacagcttccttttttgtctttcttatcagttcaacgtctttgtttatcagaattactccatccttttttattccttcaatcggcggttcaattgcacgtgatccgctggcgagaacaagtttttcaaattcaataatcctgccgttggttaaaataattttattttgctctctggcgatgatatcatcataaatgatattgaacgtattgttaaaagcaccggtaaccggggttagtatttcctcaatgattgtatttcttctatccggtttaataattgcaatacttttatcgctataagtatttctggctgataaagcgcaaactaaagcaggctcgccattgccagctattactatgtgatatttttccatcgaaactcctgttcaaaatcgataactaaaaatacttgttcactgtaatcgcaaattagttttgatcacagtttaagtaataataaaactatactgctaaacacctgagaaaaaaactttaagctcaacaaacttagagcactcaggatttgtttttaaatttattagaaatttgatttgataataagataatctttttcagagcaatagcaagtttttaattaaccgcttgttaaagcacacatctttaagcactaaaaccattttttatgtttgaaaaagaaagtcataccgattataattagtactgtaaaagcccaaaaaccccagggatacatccattcaaaaccaagctccggaaaattcttaaaattcataccaaaaacacccgcaataaaagtaagagggataaacattgtagaaataaccgtaagcactttcattacttcatttaatttgttgctggtgcttgaaagataagtatcaagcatgcctacgatcatatcgcggtaagattctattgtatcaataacctgaattgtatgatcataaacatcacgcagataaattcttattttctcatcgaaaaaatcaacttcatttctttgcagagatgatatcacctctcttaatggccagatagctcgccgaagcaataacatttctcttcttaacagatgaatagtctgaatatcatttttgcttggatttaaaacgatattatcttcaagcgtctcgacttcttcgccaagtttttccagaatatgaaaatagctgtcaacaatagcatcaattaaagcataagaaagataaccagttccgcttttccgcattattgttcctgctttttttattctttctctaacaggatcaaatacatctcccggactttcaagaaatgtaataagacaattttttgtaagcatcaaacttacctgttcattttttaacgacttatctttttcatccagaaaaaacattcttaaaactatatacaaataatttggatactcatctacctttggtctttgatttgtatttaaaatatcctcaagggttaacggatgaatgttgaaattttttccgatcatttcaagaataccgatattatgcacaccgtcaacatttatccaattagtagcatcagattctttaaggttaaacaattcatcagcccgcgaaattttttgctcagtaaatttatcgtcattataagaaatgagagtaattgtaaccggctgtttttccttatcaccaacataaaccagcgaaccaggcgcaagcccgatgttttttggtttgtttttaataagtctgcttacttttcttaactgcttttttgtccggtgttttattttcttgcccgtgttatcaagcataatatactcatcggtttgttaaaacttgtttgtggattatgtgcaaaaataagattaagtttaataagaatttatatagaaaatttaatcagttgattataagccatataaaaaccggaccggttgtattcttaattctgtccgcttttgtatcatgctcagtcttagatgatgattgtatatgttcaacggagtttcgttattgtatagtaactgttgtagattcgcttgggattccggcagattctttaatagtaaccattaaagacattgatggagatgagcttgatgttcagcaagaccagtattttactgatgaaggtaaatataccgtgctaaacgattcctttactcacataatgtgtgcttgtggtacccagcaaaaaatctatttttctgcaacggatggaattagaacagcaaatggcgagtttatgtttaatactgatagatgcagatgtcacattaataaagtatccggacctgatactttagtactgagataattattattaacccgcaatgtcattccggtgaaaaccggaatctaaaccacaaacaatagattcccgcttgcgtgggaatgacttacaaccaagctttttctaatttctgccaaacagttcagtaaggtttagtgtcggagttttggatttgcttgcaagcgaaacataagttaaagcaagctcttcttttcccgcaccaagaacagtgcttaccaatcctaaagctttgccgagattttcgggtgcaatgtttttagtaacacggttccatatctctacttctaaaacattaaatgctgtgtgtacttcgtgcaagccaaatcccgcattaaatctttctcttgcaatttgtgctgaatattctttcatgggcagaagatttctttcacttacacattgctgagttaatgtaagaagatttaacagtcttgttctgttttcactttgtgaagatttactgtaagattttaaataagcacagtttaaagactgatgagcgctttccagaatttctgaactttgtgttttaagcaggtcaattaaattcattttcacaaccagttattaaattacatttcaaaattaaagaataattttcaaagctttataatacttcagagttttaatgttttagcatttaaaatttttctaaatcaatttaatccagcttaccaatctgtctttaacaaaccctaattgctcaacaagattaattgccttttgatttttttcctcaatctgtgcaaaagaaattctgccaagttttctgttttgatgaataagcgaaagaagaatttctctaccataacccttttttctataatcgtcaagaacatgcagagagccgagagcaccatcgtcatgagttaaaccccaggctacaagtttattcttcttcattatagcagcacttatagatttgtttattctttcttcaacataagcagcggttaaaaactgtctgtagttcgattgagaaattataaaacctatatgatctgttgttaaaggtattacatcttttttatttaccggaatctccacatcatccggcagaaagtagcgcatcgtagtaagtatccactcagcttttctttttccggtaataaaaggtatcatccagctttctactgatgcaaagtaagtgctgttacctgctttctctaacaaagctttaagttctgcttcgttattgcagacaatataaacccaatcaacatcgcttgagcctttaatcagaaatgagttgtttaattcgatgatctctgtaatcgggttgttttcaataaaaccgattgtgctgatatttgaaataacatcctgtttaagataattgataatattaatcagttccgttttcatttgaaggattcttttctttaataaaaaacattaatactgctgtaatcataccaaaaaataatgcagagttccataaaaaagcagagccaaaattttcataaacaacagtgcccagccagggaccggcagaaaatgcaaaactaaaagtcatttgataataccccatatattcaccgcgtctttccggcggtgtaatttcagaagtatatgcggctgtagttgggaaaaaaatcatttctccgaatgtaaaaatgattatggcaattataagcggtaatgtagatccagcaatcgcaaatccgccaaaacccaagcccgcaagtgatgccccgatcattaaagattttctgtatggtgtattgctcatcatattattaagcggaacttctgcgatgattattaatacagtatttatcgaaccgaacaatccaaatgctgctgtggaataattaagatcattaactatgtaaagcggtagtgcgccgagatgttgaaagaaaacaagatttgccggaatgatagcaaacaaaaaaaacaaaaaatgtttatcatttaatatcccaaactttatcttcggtttttctttaacaatatctgcttctgccggtgataatgaagaccatctgacagaattaaaataaactcccgctgcaattgaagcgaaagcatttgcataaaaaagataatgataatcaataagggttaaaaaacctccgataaccggaccaatactcattcctgcattaatagccagacgatttaatgcaaaagccattctgcgctgcggcggagttactatctcggtaattaaagagagatttgccggacgaaatgcctcgttgacagcggcaagcacaaaggttgcggcaagtatcagtttataatcagatataaatgagtatataaaaaaaagcaaacccgaaccgtataatgaaaactgcattattttaatcgagccgattttatcagaaagttttcctgttaatggtgctgcaataaaagcggcggctccgtaaacaagtaatgcagttcccgcttctgttggtgttacaccgattttttttgtaagataaagtgcaagaaaagggattaccattgtgccagaacgattaatgagcgaagtaaaaaacagcgcccacatatcatgcggtaaatcttttaatcctttccagggattcataaaaaagaaattttaaaattatttttgaaagggaaatttaagaaaagaacagttaactatactccaatcaatctcataaataaaaatattaacaaaccaaaggtagctccaagataaagtaagcggatatatttacgcccttcttcattttttgatttgatgagtttatatgttgaaataccgataaagaaatccattacagctattggtaaaagatatatcagcttaaaccactgtaataaaaaaggtattaaacttaataatattacagatgtaaaaattaatccgcttaatcttaatgctttttctttaccatatttgattgctatcgagttcgagtcaataagcagatcacccttaacatccattgaatcagcagcaatttcttctccgagatcaacaagtgcggcaataagtgcaaagaacagaacgattttgttaaatggtaatccaacagataatccgccaaaaataaaagtcatacctacagaaaaactaaccataagatttccggttaaaccattaggtttaaattttctgttgtataataaaccgattacaattaaaccgattgaaaataataaagcctcaatgctgatcgtatagcttaatattattccggttattaataaaaaagatgcaagcagcagtgcttcattggaagtaacagcattagatggtatgggtctgtgtggtgcatttattctatctgtttcaacatcaaagtaatcgtttgaaacgagtatagacgccgagataagaaaaacggatattgcagccgaaagagttaaatgcagcggtgcaaattttccaagagcaaaaagctgaccaagcattacacaaattgctgctgcaagcggtaactcaaatcttattagtctgataagaccttttaattttttcataccataaaattactaatgaatttgctaaaggaggaaaaaaattattactcgttaaccggcaataacaaattgcaaataaggatcgggtgcataaaaagttattgatctgaatttgtaccagaattgttgcctttgtttctcttacttgttaagttagcagaggaagtatgtttatcaaagtaatatataagatatcattcccttctttcctcaatccttttacgcatttaggggatgctgatttggcgggtaatattatgcactcaataatcaagcggtgtttggttctttaatttaaaacaataatcccggcttaaaaccgggactattgtaaatgttttcacaacggaataatccttattgtgatttgcttcaattagctaaacgaaacttaataaaaatttttttaattagaaaggatagaaatgaaaaatatacttggacttgacctaggcactaactcaattggttgggctttagttgataaagaaaatgacaaaattattggaatgggtagtagaattataccgatgagtcaagatattttaggagaatttgggcaaggaaactcaatatcacaaactgcagagaggacaaactttagaagcataagaagactacgtgaacgttatctgcttagaagagagcgtttacacagagtgttaaatataatagggtttttaccacaacattattctaatcaaattgattttgaaacaagactaggtaagttcaaggaagaggcagaaccaaaaatagcttataattccattattaatggaacaaatggtaaaatccaatttgattttcttttcaagaaatcatttacagaaatgttagatgattttcgacaatatcagcccgacattgtagcaaatggaaataaaatcccgtacgactggacattatattttcttcgtaaaaaagcattaactaagaaaattgaaaaagaagaattagcctggattttattaaactttaatcagaaacgtgggtattatcaagtccgtgaagataatgatgaaaatataaataaaaaggaatatgtgatttcattaaaagtaacacagattataaaaggtgaaaaagataaaaagagtaaaaataaaaattggtatagtattattttagaaaatggatgggtatataatgcaacatttgctttagagcctcaatggttaaacaatgaaaaagaatttcttataagcgaagaattagatgaaaacggacaaattaagattgttaaagataaaaaatctgataaaggaggtaaagaaaatcggcgaataattcctcttccaacttttgatgagattgatttaatgagtaaaggggaacaagacaagatttataaaaaaattaagacaaaaactgaaacagcaatcgaaaatagcggtaatactgtaggagtatatatatatgagaaccttcttaaaagtccattccaaaaaattaggggtaagttgatacgtacaatagatcgcaaattctatagagaagaattaaaaaaaatcctccagaaacaaaaagaatttcattcagaacttagaagtgaaaatttatataatgattgtgttagagaattatataaaaacaataaagatcatatatttttattaagcaaaagggattttgttcatctattttcagatgatattattttttatcagcgcccattaaagagccaaaaatcctcaatcagtaattgctcttttgagttcaaaaaatatagtgtagataatgaagaaaggattgaatacttaaaagctatacccaaatctcatcctttatatcaggaatttagactttggcaatggatttataatctgcgaatctacagtagaaatgatgattgcgatgttactattaattatttgaacgataatgaaagatatgctgatctatttgagtttttaagtaaaagaaaagaaatcgaacaaaaagccttattgaaatattttaaattaaaagattctacgcatcggtggaattttgtggaaaataaaaaatatccttgttatgaaacaagatcccttatttctacaagacttgaaaaggttgaaaatgtaccgatgaactttttaaacgataaaacagaacaatatctttggcatattatatattccgtaaaggataagaatgagtatgaaaaagctctaataacttttgcaaagaagaatagacttgatatagaatcttttgtagagaactttaagaaattcccaacgtttaaaaatgaatatggaagttattccgctaaagctcttaagaagttgataccacttatgagaatcggcaggtattggaatctggataagattgatgaacaaactaaatcaagaatagataaaatagttacaggagaatttgatgaagaaattaaaaataaagttcgcgaaaaatcgattagcttaactaataataatcactttcaagggttacaactctggctggctagttatattgtttacgatcgtcattcagaggcagcgacaataaataaatgggagacaatacaacagctaggcgagtacattgataattttaagcaacactctttacgcaatcctattgtagagcaaataataattgaaactttacgtgtagtaaaagatatctggcatcattttggcaaagataaaaacaatttctttgaagaaatccacattgaattaggtagagaaatgaaaaataatgctgatgaacgcaaaagaattacaaatcaaatgattgataatgagaataccaatatccgcattaaatctttactctcagaattaaaaaatgattcgagcatccaaaatgttcgtcctaattcagctgttcaacaggaactattaaagatttatgaagagggtgtattaaattctgatatagaaatcccagaagatattttcaaaataagcaaaacagctcaaccatcaaacccagatttgcagcgttacaaattgtggttagaacaaaaatacagatcaccatatactggacagataattcctctttccagattatttaccacagagtatgaaattgaacatataataccccaaagtcgttacttcgacgatagctttaataacaaagttatctgtgaatcgtcagtgaacaagttaaaagataatcaaatgggattagaatttattaagaatcatcacggagaaattgtgcaaactggatttgaaaatagtgtaaaaatatttgaagagagcgaatatcaggattttgtgaaaacacattatataaagaaccgttctaaaaggaataagctattgatggaagaaattcctgaaaaaatgatcgaaagacaaattaacgatacaaggtatattgctaagtttattagtacattactttctaacctagtacgttctgcaagtaatgatgatggtgtaaattctaaaaatttgatccaggtaaatggtaaaattacttctttacttaaacaagactggggtatcaatgacgtatggaatgatttaatcttacctcgcttttatagaatgaacaaaataacaaatagtgattcattcacaagatatagtgagaagtatcagaaatatttgccaacagtcccaattgaattttcaaaaaattatcaagcaaaacgaattgatcacaggcatcatgctcttgacgcattgattattgcttgtgcaaccagagaccatgttaacttattaaacaataagtacgctaaatcaaaagagagattcgatcttaatagaaaacttcgcaaatttgaaagaacagcatataatcatccacaaagtggtgaaagaatagagagagaggttccaaaagaatttctaaagccatggaataattttacagttgatttaaaaaatttccttgaaaaaatagttgtaagttttaaacaaaatatcagagttataaataagacatcaaatatttataagaaatgggttgaggttaacaaaggaaaggtaaaaaaagaagtcaaacaatcaggtgtaaactgggctatacgtaaaccattgcataaaaagacttttgctggtaaagttgaattaggaaaagtaaaagttcctaatggaaagattttaacagcaacacgaaagaatcttgatgcttcatttgatttaaaaactatagattcaataacagatacaggtattcaaaagatccttaagaattatttattatctaaaggaagcaattcgtcgattgcttttgctccagagggtattgaggagatgaataaaaatattaaactgtacaatgatggaaagcctcataaaccaatttataaagttaggatttttgagcttggcagtaaatttatattaggtttgactggaaataaaaagttaaaatatgttgaagctgctaaaggtacaaacttattctttgctgtttatcagaacgaagatgaaaaaaggaatttcgaaacaattccactaaacatagttattgaaaggcaaaaacaaggtctaagctctgttccagaaaacaataagaaggggcataaattattattttatctttccccaaatgatcttgtttatgttcctgatgaagatgagagagaaaacaattcaattattgatttttataatcttacaacaaagcaaattaataatatttataaaacagtaagcttttcaggtagtcaatgcttttttataaaacatgatgtggctaattctattgtggataaatcagaatattcaaaatcaaacaaaatggagaaaagtattgatggaattatgataaaggaacattgcataaaactcaaagttgatagattgggaaatattcttaaaacgtacagatgattaaaagaacattatattttggcaaccccgcatatctttcaaaaaagaacgatcagcttttgattagattgcctgaagaaaagagcgaaacagataataaaatggagttaaaactcaatcaaaaatatctggaacgcggcaatgttaattcaatccctattgaagatattggaattgtaattctggatcatcagcaaattacaatatcacaaggcttactctcttcgcttctggagaacaatactgcagtagtatcttgtaacttttctcatcatccgatcggtttattccttcctctggaaagcaatcttgttcagagcgaaagatttcaatctcagatagaagcttcggaaccgcttaaaaaacaactatggcagcagacaatttcagcaaagatttacaatcaggcggctgttctaagtaatcataaaaaatctaacgataatatgaagcgatgggcaaaagatgtaagatccggtgatgttgataatctagaaggaagggcagcttcatattattggaaaactatatttccacctggactagaatttaagcgagacagatacggacagccccctaataatttgcttaattatggttatgcgattttaagagcagtagtagctcgcggtttagttgcttccggtttgctgcctacacttggcatccatcatcacaacaaatacaatgcttactgccttgcagatgatattatggagccttacagaccgtatgttgatgagattgttattacatttgttgaagatggagaggactttactgagcttacacattcgattaagaagcaactattaacaattccagcagtggatatttttatcgatggagagaaaagtccattgatggtagggatgcaaaaaaccacctcttctttagtgaaatgtttcagcggagaggctaaaaaaattatttatccaactatgtttcattaaatgtatattgatttgttaacacaagtttaatctttcagaaaaaaggttagtcttgttttattaagcagttaataatcattatcggaataaaaaagcatacatttgttcaaaatatttagaaacaaaatagtttatattaaaaatgttgtatccattatcttttgattaatgggtttgtggtgatttaataagagaaatgaataatcgtttaaaccaatatcgcattatgtgggtactagtcttttttgatctaccaacagaaacaaaaaaagatcgtaaaacctatgctcgtttcagaaaagaacttataaaagatggtttttcaatgttccagttctcaatatacgtgcgtcattgtgctagtaaagaaaataaaaatgtgcatgtaaaaagaataaaaaatattctacctgaaaaaggacatgtaggaattctatcaatcaccgataaacaatttggtatgatggaaattttttatggtaagaaaaaagaagaatctggattcatagaagctcatcaactcgaacttttctgaactgactgattgtcacccttaatttttctaagggtgacaaagtcatcagtcatttttctgatattaaaaacggtctgttaaatttacagttggatttttttaatcctgtaattgctgtaagtgcttgtatatcaatgaggtaaaacacaatgagttgtttttaatatcctcaaagaactaattgaaagcaaatcacaactagatcctgaagattgctgttttaccatggttgtttttaatatcctcaaagaactaattgaaagcaaatcacaacacctttacggatgttaccaatgcaacaaggttgtttttaatatcctcaaagaactaattgaaagcaaatcacaacaagccttacatatcactatgatgacccgagttgtttttaatatcctcaaagaactaattgaaagcaaatcacaacaaaagttcttgctgagattgaggagaacgagttgtttttaatatcctcaaagaactaattgaaagcaaatcacaacggtgcaggtttcattaatgaaaacgaaaaagttgtttttaatatcctcaaagaactaattgaaagcaaatcacaacgtacctaaacggtactccaactcactaagttgtttttaatatcctcaaagaactaattgaaagcaaatcacaaccttgcactatccggcatcggctggtgcggggttgtttttaatatcctcaaagaactaattgaaagcaaatcacaacgagtcaagtcggaacatcaaaaaacggcaggttgtttttaatatcctcaaagaactaattgaaagcaaatcacaactacctaagtggcgcattatttttttttacgttgtttttaatatcctcaaagaactaattgaaagcaaatcacaactaagcttcttctattgtgtttgcctgtgccgttgtttttaatatcctcaaagaactaattgaaagcaaatcacaactgcaaccaaactaaagagcaataacttaaagttgtttttaatatcctcaaagaactaattgaaagcaaatcacaacatgaaaggaacgagcagaaactttatcaagttgtttttaatatcctcaaagaactaattgaaagcaaatcacaacaacttgatgatttattcgattgggggtttagttgtttttaatatcctcaaagaactaattgaaagcaaatcacaacttctcagtgaatttattctcaagtctttgtgttgtttttaatatcctcaaagaactaattgaaagcaaatcacaacacggcaaaggagatagaccttcatacttcggttgtttttaatatcctcaaagaactaattgaaagcaaatcacaacatgaaaggaacgagcagaaactttatcaagttgtttttaatatcctcaaagaactaattgaaagcaaatcacaactaaccaataataatacaattaatactacagttgtttttaatatcctcaaagaactaattgaaagcaaatcacaactcctgtaataaaattcaaagccaacaatagttgtttttaatatcctcaaagaactaattgaaagcaaatcacaactcctgtaataaaattcaaagccaacaatagttgtttttaatatcctcaaagaactaattgaaagcaaatcacaactcctgtaataaaattcaaagccaacaatagttgtttttaatatcctcaaagaactaattgaaagcaaatcacaactaccattgcattattcattttattatttcgttgtttttaatatcctcaaagaactaattgaaagcaaatcacaacttcgattaaacagctcttattgtttcgttgttgtttttaatatcctcaaagaactaattgaaagcaaatcacaactgccgttaattgcttcttccattgcatcttgttgtttttaatatcctcaaagaactaattgaaagcaaatcacaactcctcgataatatatcaggcactcagacaagttgtttttaatatcctcaaagaactaattgaaagcaaatcacaacaggctctcaaaagccttttggaatttctcggttgtttttaatatcctcaaagaactaattgaaagcaaatcacaactttccatatctgttaaatcaatttgtaaaagttgtttttaatatcctcaaagaactaattgaaagcaaatcacaaccgccccacgtatttccttctattaatgcttgttgtttttaatatcctcaaagaactaattgaaagcaaatcacaactaaaataaatttggatcgtgaatataattagttgtttttaatatcctcaaagaactaattgaaagcaaatcacaacaattgttaccaatgccaaaattaatacttgttgtttttaatatcctcaaagaactaattgaaagcaaatcacaacttatcccaacctaaaaaattactgtcgtttgttgtttttaatatcctcaaagaactaattgaaagcaaatcacaacgtcctttccaattgttctatattcatctatgttgtttttaatatcctcaaagaactaattgaaagcaaatcacaactgagttcgcttcggcattaggtcttaagacgttgtttttaatatcctcaaagaactaattgaaagcaaatcacaactatctcttttccattttatttctccatctcgttgtttttaatatcctcaaagaactaattgaaagcaaaccacaactatgaaagcgtaacaaattgtaacgctttgttgtttttaatatcctcaaagaactaattgaaatcaaataacatctgattattccaaacctgccgatgtattacagcagcatcaggtatccttaaagaatttatagcaaacaaaataacccgcgctgtttagccgccgtaaatattgcttaaaaattcaaacagtgtttttccctttgagataccttgcagctttatatttaaattgttcattatctcattaaatacatccgaaaccctgtcatcatcacaatttgaaaataacacaaccagaaaatttttttcaggattgtgataaacaatattatgaaatcctgtactttcacccgaatgaaaataaacattgcttccatctgcttcatttgctataaaccatccgtagccgtaactgagaccttttttaataattgcgcgcggctttaacggattaagtaaatcattatcaaattgcttatcccataacgattgaatccacttttgatattcattcaaagaagtgtaaaccgagccgtcgcccattgtagcgctggttatactttggtcggcaaaaacccatttgttatcttttaaatgataaccgtaagcccgtttgaaaatattcttatccttttcgtaaataactgtatgcttcatatcaagcggagtgaaaatattttcccggataaattcaggataagaaagtccggatactttttctactatttgtgtaagcagacaaaaagctgtgttgctgtatttaaattttgaatctggtttaaaatataaactgtctgatccgctgataagctgtaaaacatcagcatccgaaatttgttctttctgatcttttgatattaacaattcataatctgcaattccggatgtatgggtaagcagttgtttgatggttatatcctcagcaaatttcggcaaggagggaagatactttataaccgcatcattgatgttaagtttattctgattttgaagaatcagaatacacatagcagtaaattgtttgcttacagatgccattctgaaatgagtatctgatgaaataatttctttgctgttaatatctgccagtccatatcctttattgattataacctgattatcccgaacaacaagtaaggcagcacccggaatatctgcaggatatatttttttcatcaggctatcaagccttccgaagcttatttgattctggctttgcacggtgaccattaaaaataaaagataaataaaaatcattattacgaatcttgtaaagatattttttctgttaatgataaacacactcctttttctgattaaataacctgaaaaaatccggctggctgaaaataaaaatcagtatccaattataaaagccgttataatttaaatgtaattattaaacttaatccataaattgattttcgtaaaatcagtttttagtatagctgcaaaaataaatgttttataaaagtcagaaagatttatgaacaatacaattacaattttcgggagcgcagtccctgttgaaaatgatgcccaatataaatttgcttatgagcttggtgctgctttaaccaaagccggatttaatatttgcagcggcggtaataaaggcataatggaagcggtttcaaaaggagcttttgataatgatggaaagatttacggggttactgttgatctttgggatgttaaaccaaatccttacataactgttgaagtaaaagaaaaaaaactatttgacagaatcgcaaaacttattgagcttggagatgcttatgttattcttcaaggcggaacaggaaccttgctggagtttgccgctgtttgggaatatgcaaataaaaatcttcagaagcagaagccgattgtttgtcattctaagatgtggaaaacagtttcggatgtaataaacgaacagctgaaatcagaaaaccgtaatacagatttggttaaatactgcagctccgttacagaaattgttgagtatttaataaagacagtttaatcttttctcagaacaaatgtggtcttatcccgtgtagcaaaaagaaccgcctttatcttatcataaaatcttttagacttaatttcttttaaccaggtttttaaataaccggattctttataatataaaacagacaacctgtgatatgaaaaagattttttcagttcagatttagaaaatgaaaacggatgccctttgtcaatcttaagtaactcaatagcacttctgataaactttccccaagcgtgataagtattctgccggaaataaattataccgccgggtttagttacccgctgtatttgagtaaacacttttccggggtcttcgcaatggtccagcacattatccataataatcaggtcaaaaaaattgttctcaaaagtaatttcttcagctttgatgttgaaatatttaacctgcttatctctgatttgtgtaaacttttctattgatgaatagatattttcaagagggtcaattgcaaaacgataactgcttttcaaataagttattattccggcagcaccgcttccgatttcgagtatgtgtgtatccgattcaattttcagataaggctgtaagattgcaagcatatcctttgcaaatctttcataaaactccagatcaagctcgctggcttttgaaatccaccagtttttttcgtaatgctgggcaagatcccatctgtctttagttttcatttataaactcagttactttatttaataccaattcaacagtcagttcttttatgcatttaaattttacatcagttctggaacaagtaagcggttttggcgaataaaaaaaacaaggcgaacattccagatataacgaagctattttatactcggttttccagggatgaatataatattggttggttggaccaataatagcaacgacttttaaaccaagtgcggcagcaatgtgcatcaaagccgagtcgttggtaacaaatatattacagcgtttcattattgcgatgctttgtaaaaatttttctgtctttgctgtaaaagatttttctgagctgattgttttattgattgattttttaagatcatcttcttcgggtcctccgaataaaagtactttggcgcctttatcgcggattaatcttttgccaagctctgcaaacttttccggttcccatcttcgcttgatatgattttttaatgttgcacagccgggatgaaatccaacaacaaaatcatcgtcagcaatattattttctttaagatagttttgtgcatacagggtatcagcttcagaaagaaaaatctgcaatgccggttcttcgcccgtttttttatctaatagtttttcaatcagtctgatatttgtctgtacgttatgagtttgatcattttccaaaacagttacattgttcagccatccaagatcctgaaagttcatccgcaaatatttgaccccggctctttgcttagccccaagcaataaatttataatgttatattcttttctgttagaaggataaacatttatagccgtatcatatttttttcttaacgaaaaaataaactttaatgatttaagcagcccctctttcagaaaatcaaaatgaattacattattaagtgcaggattgttttgatagatttctttggttcccttaaacattacaagtgcatcaatctgtgccgaagggagttccgagcggagcagttttaatgcaggtgtaaacattaatgcgtccccaattcctgataatgccagaattaaaattttcatagccgaataatatttttaaaactgtccgcaaaacatatatttgcttgtgtaagatttagcattacgaagatagatttttaattatctgtcacactcagacaggctaagtgtgacattttggttttcagaacagtttatacaaaaaatatttttattgtgtcgttttacttgtatctggttttccctgaacaaggtttctgtatttttctatatttgcccgcacattctgatcctggggatatttagtgccgagcatttgccagatttccagaagtttatcgtttttaccttgtgtttcgtaaatatcaagcagtatccgatacggattataatatgattgaacatcatctggattagaattaagttttgcaaccgcttgtttctccacatcagaagcaaataaattatatttatccattgcgcctgcacgcaaatacagattgctgatttcgtataacaatccaaaatccatcggaataagtttgttaggaagtttttcatccattgtattaagggtatttactgcaagttcgttttgtccttttccaagataatatagtgttaatcttaaaaaagcattccgataattctgaaccatccgtttatggttatcatcaaggaaaatattcgggtcatttaatccccggaatttaaatcccggctgataatctttactgtatcctactgcttctgttaaatttgcttttaaaatgtttggttcgataaactcatcgttagcagaccgtttttccggtactaaccgaaaagccattccttccattcttaaatagttgcccaagccaattttactgtcttctgaacaggtaactgcaaaataaattggtctttcccagttattagactccacaatttctttaaccatcaggtcctgcacacgtactgctttaacggtaccgtaatttaaagtcggattcatcgtccagctaagcgcaccctgatttaataccgaagtatcctttaaaccaaattgttgaactatatccgcaaaagaagtttcagaagacgattttggcggttgaatagtcagatttctgggctcccaccgaattggactaagttgatttatctgtgcatcggttaaacgcattttaaccgttcctactttatagggatcattattcttaagctgcttgatataccactcagtatttaacaggctaagatttgcaattttaacatctcttctcacaccttcaacatcctgcaaataccacaatggaaaagtatcattatcgccattagtaaacagaaccgagttaggtgcgcagctttgtaataagttatatgaataatcccatggcacccagttatttgatctatcgtgagtaaaataatttgcctgaagcattttaaccggtacaaaaataattcctaaagcaagcacaccataagcagcagcatttcttattgaagcttttttaattctttcgttaatcagatcaattaatccgcggataccgatagcaatccagattccgtacacaaagaaagctccgacataaaaataatctctttctcttggctgcggctgctgctggttttgatagaatgcagttaaatgccccatcagtataaacataatcagaaagacgcttgccattttccagtctttacggaaatgaaaatatattccgattaaaccaagcagaaaaggaataccaaataatgaatcttttgtttcacctccaaagtgaacatcaaaaatctttccgaagatatttccaatagaattaaatggtgcgatattagcgccttgatcttgttcccagccctctctgccggcaaaattccataacaaatatcttgtcatcatgtgttccatctgataagtataaaagaaatctaaatcagatgaatagtttgtgtaaacaatctgctgatgtggttcggttgcaaatcttcttttaaatgtcggaaagtctccatattgttcacggtcaagatatgtttttaacttagtaaaagtattcggattgttttcattcattggcggctgttgatttgatcttattattaccattgcaa

SEQ ID NO: 1208 - DNA, 24368 bp, synthetic construct
  source 1..24368: mol_type = other DNA
  misc_feature 1..24368: note = Synthetic
gaaaataacaacggaaaatttaccgatgtaagtgaaaaagcaggcatttatggaggtataaatggttatggattaagtgcaagtttagcagacttcaacaatgatggttggacagatatctatgtttgtaacgattttcacgaagatgactattattatataaacaaccaggatggcacttttaccgaaaccttaaattctgcattttcggcaataagcagattttctatggggagtgatgccgccgatattactggcaacgggtatcaggatctaattactttggatatgcttccaaaagaagaaaaagtaattaaagaaagtgaaggcgatgatgcgatgtataatatgcagaaacggctaaaaaaattaggctaccgcgatcaatatgcccgaaatatgcttcaaattaataatggaggttctaattttcaggaaatggccctttacaatgaaattgctgcaacagattggagttgggcaccattattagccgatttcaataacgacgggcatcaggatctctttatctccaatggaattcttcgtagaccaaatgacctcgattttaaaaatattgtctctactgcatttaaaaacagaagcccaaatgaaggaatgaaatggctttacaactctaaagatgagatgcccgaaggaaaggtttctaatgaaatctttatgggcaattcaaataaatttgaaagcaagactggtgaatggttagaagataaagccagcttttctaatggcgccatttatgtagatttagatctggatggggacctggatcttgtggttaataatttaaatgaaaaagccggaatttatgagaacactaccaatgcttcaggaaactatatttctctggaatttgaatatcccaaaaacataaatggtttaggaacaaaagccatactcttttcaaaagaaaaaaagcaacttaagcaattatttaattcaagaggatttctatcttcagtagaaaacaaactccattttgggcttaaaaccgaagagaaaatcgattcaatttatattatttggccaaataatacctatcaaaaaattcagcagccagaaaaaaatcaacatttaaaaatagtttatttagaagaggctaagaattatgattatgataaagataaacagcaaaaaaaatattttaaacctacaaaagcattaagccacgctcataaagaagatgaatatgatgactttcatcaggaaaaattgataccttatattgtttctatgcaggggcctgcagttagtattggcgacatagacaataatggatttgatgacatctatattggtggggcttccggccaacctgctaaactctaccttaataatggacaaagcctggaagaaagcagtaatgatgtgtttacaagacacgcagaatttgaggataatgacgcggtattttttgatgctgataatgatggagacctcgatttgtatgtcgcttccggaataaattccaaccgaatacagttttttgagaaagacagactttacacaaatatcaatggggaatttaaagaatctactgccactataccgaataataacctgaacacctcttcagtagtaagcctggattacaatcaggatggatttgatgatctttttatagggaatctgtctgaaccaggcaattttggaaaacaagtgtcttcttatctgcttaaaaacgaccaaaaaggcaacttcctaaaagatccagatttttcattaaatgctatggtaaccgctgttaaatcagaagatataaataataatggatacccagacttaataataaccgccgagtgggacacccctaaaatttatttaaatgaaaaggggagttttaaagccgcaaaattaccggaaaatctctcaggattatggcaaagcattgctttctatgatattaataaggatggaaataaagacatcctcctgggaaattggggattaaataccaggtttgaagcaaaagaaggtgctcccataagaatgtattacgctgattttaataaggatggaaaatttgaaacgattactgcgtacaataaagatggaaaatattacccattaaactccaggaatgaattggcttcccaaatgagttctataagcaaaaaattccccacacatcaggagttttctttaaaaaccatggaggaaatctttactgctgaagcattgtcctcagcaaaaatttatgaggttaatacgctagcttctggttatctcaaaaacaataatggtgaattcactgaatttattgaattcccaaaagcatttcaaaccgcacccatcaactcatttcaggtgctcaatatagatggagaagaacaattattggtaagtgggaattcttacaaggtaaacacttatcacggaggctattcttctctaaaaggtttgctcgtgaaaagcatctcagattacaaagaagtctccaacttaggaatcaaagccttcgatcaacaaataaaaagaacagtctcgatcccaatggctaacgaaaacctacttcttgttgttcctaacaatgacagcatcactacttattcttacggaaagtaatctccaatattgggatatttttttcagttcgaatttataattatattgattttcaatagattttttttcgaaaacgagtattacttaagaaaagtcgaaaaaacctaacgtttaaatcaaatgattaacaaggctttaagtactcgggacggtagtgtttccttaaaattttaagttcatttcctatatctacaaaaaccagtataagcttagtaaaatcaacagcttccggcaatatgttgtccctggataattagatatggattgcgttaaactcttttatattcttgctcgtgcgtacattttgcgtacaacaaaaatgaatatgtcttatctttatatttattcaatttatccttatggctacaatatattttctttaccgttccaagaggcaatatgctccacttacagtgcgcctacaagataaggataaaaatcacaaaaagtttcaatttgaagctaaaacagagttggaggttccacaagaatattggaaaactacaaggcataaaaggcggggtttagatgcagttgacaaaagaaaaatagccgaagttaattcaaaactgtccgaattagaagactttgttctttctaagtataagaagcaaaaacccaaacctgaacagaaaagttggcttaaagaaattcttattaatttttacaatccagaggaagatgaacacgaagatgatgaaattaaaagtgatttaataacagattgtattcaagaattaatagacaacgctcatacccgagaaaacgctagaggaggcctgggaatctctttaagtagggttaaatcctataagaaccttttgaacgttttcaaaaagtaccaagggagtaaaaagtatcgagttaaagatgtaaatatcaaatttggtagaaaatttttggattggctgctcagttcacagaattattctgaaggttatgccagaaaaaaaattgatgatctcaagtcagtctgtgcagatgctgaaataaatggtttagaagttagtcatcaacttaagaaggttaaaggagggaaaacaaaaaatgacttcatcatttatttaactccggatgaacttcatagaattgaaaaggcagaattagaatctgatagccttaagaatgttagaaaatggcttttattgggttgcaatattggtcaaaggggaggtgatctcctccgcctatcgaaagataattttattacaagaaacagcttggacctaattgaactgaaacaacagaagacaggcaaaaatgttactatacctgtgcttcctactaccaaagaaattttaaaagaaggactaccctatccattagcccttcaaaattttaataacgatttaaaaattctatgtaaaacggttggaataaattcacttacagaaggagctaaaatagttatgcttgatgaaaatggtgaaatacttgaaaaagatgaaaaaggcaggtataaaaagaaaggcactaaaaggaaaataaccggcacttttcccaaacacgaattgattacttctcacgtatgtcgaaggacttttgcaactaaccaatacggtataattcccacaccattattaatgagaatcaccgcacatagtacggaaaaaatgttcttaggatatataggaaaatctgctatggatagtgcccagcaaatagcagatttatacgaaaaactggcggctaaaagttgattttaattaaatggaaattaatgtggatcatatcaatctaaaaatatgaagccgaaaaatattgaatataatcagttacagctaccaattttaaagttatgctccttaaaggaatttctggaaatcgatatcaattccgcattttatgatttttattttaagaaagcccacggaagatattttaaggttgatatggaaatctttatgagggatctgtattacgatattctaattttcatcaataattataaagttctaccctaccaggtcaaggcctattttaatactacttataaaagacctcttttctataaaggagtaccattacaaacaaaagaaaaataccacttcctattatttgaagctattgttcagcaaataacaggagttttagctgtagataaaaatttacctagcttaccaatacaaagtcaacctaaccttcttcctgaatatgattttattcaagcttttcataataaactggctgaatttcatattccggagaaggataatattatcaccgactttttcaccttccataattcgttaccacaatattcccaacaagagacatcagatttcaaaaaatctattcttagccttgataaacattctaaagtaaatagtattctacatgaccgggaattgaaaggaatccaacaggaaaatcatattaagtggctgggtactcctctcgaactggccgagttgattaaagcacttatccaggctaaaaaaattaatggtggatctgaaaaggaagtgtttgactttttccagcaactattagatttaccttttgacaagcgtgaaaaacttcaatctataagaaaacgttccacagatttaacacccctaattcacgagctggaattccatttgaaacaatggatcaaccgatcttaagttaagaaaaagttaaagttacaacgtactaacgacatagtatgccaatggtatgccattagattttattgatttgcattgtaaaccaaaaaaacacaatgtaatgaaaaaagttatccaacttcaccagactactcctgaagaattagtaaacgttattctacttggagtgaagaaagaaattgaaatccttaaaaaagaatttcgcccaaaggaaccggaagaatacctcacaagaactgaagtttctaaaatgcttaaaattgacctttcaactgtacaccactggaccaaacggggcaaactgaaaccatatggattgggacgacgtgtgtattataagcgaagcgaaattgaacaggcacttatagatttaagcccgatccattaaaatggatttttcaatccactcataaattttattcctatgaacggatacgaattttcaagggcgtggtttgatttcagttttaatcatcccaacaaagttaaacccttacataccgctatttacttttttgctatagaacgctgcaataggttaggttggaaagaaaactttggttttccaaccgacctggcaatggaagctttgggaattaggaattataaaacttatatccgcgcgcttgaagacctggttgactgggaatttattaaatgggtccagaaaagcaaaaaccaatatacctccaacattattgctttggtaaaaaataccaatgcaccgcctaaagcattggacagagcattgcacacagcagtgtctgagcaatgctcaaagcaagtccgaagcattgcgagtatagataaacaattaaaccttaaactaaaaaaccttaaagctttaaataaaaaagaatttctaaaagttgataaatctgaaattccagaaaactatctgggctatttcaactgggcatttaaatttcagcaactctttttaaaaaatttaaaaaataaaggcgccccaacaaaaaaattagatcaggcgggattcgaggattgtttgaaaccaattcggttgatgctggaaaaagatggtgtttcagaagaacaacttcaggttgcttatgagttgctaaatggttctgaagaattctggaaaggaataatcctaagcacccacaaactcagggagaaaattgggcagttaattgctcaaggaaataagccgatgagacttaaaacaatggacttacaggttcagcataaaattcagagttatgactagcacccagtttccagatataatatcaaagtcagttgtaaaaaataggcaacctgactttaaacgaactctggttagcaaacaagtgttttggaatttatttcgtactcagtatcccgaattccaaataacggaggaaaaccaacacgtaattttcagcattttccggtatttcttacaacagcaagattttaatgagtttggtatcataaaaaataaaccaggacttgacaaaggattgttggtgtacggaggttacggcgtaggaaaatccacgctttttgatgcccttcatcatattggaagaataattctagagcaaacccgaagtacacaactttggttcccccagatttcgacagttcatttactgacccgttattacgaatcgcaacagaataaaaacagcaattttaaactggaagattattatcgcggaaaactttacctggatgatgtaggtaaagaaaacaaggcttataaccgggaagagatcatcggaaaattgctttatgaaagacaccggcgaagattaaaaacttttgtgaccaccaatgaaaatccatcagctatatccgcccggtatggacatcatattggagaccggttgccggaaatgttcaatatcattaaatgggaaggtagaagttggcgagaatgattagtattaagaagtcctcaccacattttccacgccttcgtaaaagctacagcttaggaaaaagaggttcgtccagaaataggattcggaagtaagccaaaaatagaaaatatgatcgattggaattcagaaatagtaatcaaaaatgaattctaaaaccaaccctaaaagaatattttggcttacctcctctacatcttttgaacttaaattttcaaataaagtaaatcattttaatgatacagggattttttatgtggcttatagtgttcaataaaagtttgatttttaaaattaagacaactcataaaaagctgtttaaattctagtagcgtagcgaaaggaatttgaatagcaagagggtaacctgctagcgcaaggttatatttttcaaattcctgttattcaattgtttaaaaattaaaaagacacaaaaatatccaccccagtggatatacccctctggaaggctctttaaaatcgagatggctgtagccagtaagtattgaaatagtatccattatgacaaaatcaaggcttcaagtaaaagcaagtacagcaaaaagatttcgggagttttccaaaaagaataattgtaaccagtccgaaactttagacttgattctcgacttttttgagaaaaataatctctccccttttgagaccttagttccttcaaaagtgagccttgaacaacttattaaaaaaagaataaatgcagtaatcgcccttttgaaggatatggaaaagaataaaataaacccaactttagccattttacaatccctaatagaagctgcagatcccaaaaataattacgagaatcggaaaagggattacgaggaagacgatacacatcctgatttttataaataagaacaatgattcttagtttgcggctaatgctgttaaatagattaaataaaagaaccacaatactatgcgccctatgctgtttttacttaacgcttaacttcccggacactataaaaacagcataggatccggcgcaaggttatggtagatatgggggcaaaggacagattaaacttaattactgtatttattataatacacatattagcatttttagctatatttgtttattataacatacatcatgctaaagctagttactataaaacaaactaaagaagaacttggaaaatggtgcaaatttcaacgggatcgttttgaattaacccaggaggaattagctgtggcattaggaatatcacgctataccattcaaaagtttgaaagtgggaaaaattcaacaattgacaccgttttaaaaattgccaatcatttcgatgatcttgataagttttataatagtttgaaatcctacaatgatcaaaataccagtcggtctttatactaactaattatggctaaaaatactattctaaatgtaaagctttttgatagggagattggaaagttaggttacgatttggatcagcggaaaagtttctttcagtataatccagagtttttagaaacaaatcaattacaaaacattttcccgtatatcattaaacgaataaaacctgttcaggtattctccgaatatgaaggaaatacttttaaaggattacctccggccatagcagattcccttccagatatgtttggaaatattattttcaaggaatggtttgaagctaataacaaagataaggcaaaactcaccccactggagcagttaacctatgtagccaatcgtggaatgggtgctctggaatatgaacctgcccaagatattcccaaaacttcagcaattgaccttgaagaaatagttaatgtactcaaacaggtaattgatcaaaaagagcaaacttcagaaaggaagtttgataatctcgcgttgctcaatatttttaaaatgggcacctctgccggtggagccagaccgaaacttttaatttcagaaaacattgaaacaggagagataagtccgggggatattgtttcctctaaagattacaagcattacctggtaaagctttctttaaacgaaggtaattataataaagaagttatagaatatgcttactacaagatggctagcgctgcaggaataacaatgatgccttctaaacttatcaacgataaacatttcaccacgctgagatatgataggcaaaatggaacaaaacaacacgttttaaccgcaagcggtttgaccggatgggactttcaaaaaccagacaactcatcttatgaaaatcttttcaaattagcactggacttaaaagtaccatacaatgagattcaggaactttataagcgattggttttcaatttggtctttgctaatattgatgatcacttaaaaaatcattcttttatttatgataaaaattctgacaaatggaacctggctccagcttatgatctcacttaccccttaaacgtagatttcaattatcataaaatcagccgtgcgttgtctattaataataaacgtgataatatccagctaaaggatctacttgggttggcagaagaattttcgattaaaaatccgaaaggtattatagagaaagtccaggagcagatttctgaatggcagcaaatatcagaagagcttaatattcctgcatacgtcgtggagaaaatttcaaaagaattcaaaaattttatttaactacgggttttcccttattttttgtaggaaatcataattatttttagtaattatgttaatataaatgacttaccctaccgttccaaaaagtgaaagcgacccgttaaggccgctttaaatgttttcacaacggaataatccttattgtgaattgcttcaaaattgtagaacaagtataaaacaaatatttgaattgtacaatgtggatttccgtaaagggataaaacttgtattacttaacttaccgaaaatcatagtatatgaaacgaatattaggactggatttgggaacaaattcgattggatggtcacttatagagcaggattttaataaaaaagaagggcaaattctgggcatggggactcgaataattcctatgagtcaggatattcttggtaaatttgatagtggtaactctatttcacaaacagcggagagaactagttatcgtggaatgcgaagactaaatgaacgatatttattacgtcggcaacgattacatcgtgttttaaatattttaggcttccttccagatcactatgcagcatccattgattttcataacaaattaggtcagttccttcctggaaaagaagtgaagcttaattatatattaaatggcggttcaaaacatcattttatatttcagaattcttttgatgagatggcaaaggattttaaaataaaacatcctgacctgaaaattccttatgattggactctatattatttgcgcaaaaaagcattaaaagataaaatatcaaaagaagagcttgcttggttaattttaaattttaatcaaaaacgtggctattatcagttgcgtggagaggaagaagaaattgaaaaaaaccaggaatatgtttctttaacggtgaaagaattaattaatactggtgaagctgtaaaaggaaagccactttacaaagttatttttaaaaacgggtgggagtatgatcgcgaaattaccaaaatagaagactgggagaagcaggagcgggaatttattgttactactaaaactaataaagatggtagtcttaagcgtacatttaaaaaagtagattctgaacaagactggattgccatcaaaaagaaaacagaacaaaacatagatgaaactaacaaaaccgtaggtgaattcatttatgagactctgctcaaaaaacccagtcagaaaatacgaggtaatttggtaaaaaccattgaccgaaaatactataaaaatgaacttataaaaatcttagaagttcaaaaggaatttcatcctgaattagaaaataaagatttatataagaaatgcctgaacgagttatatccgcgaaatgaagcacatcaatcaaatattaaggaaaaggatttcacctatttattcgtagaggatattattttctatcaacgccccttaaaaaccaaaaaatctaccatttcaaattgcgcctatgagaaaaggtatttccaaaaagacggagaaattcaagaacaaccattaaagggaattcctaaatctaatccattttatcaagaatttcgattatggcagtttattcaaaacctcagaatttataagaaaattgctttagataagcaaaaggcaaagattgacgaagacatcacaaaccacttattacccgataccaaatctatagttgagttatttgattttttgaacaatagaaaagaaatagaccaaaaccaattactgaaatatttttcagatttaaagttaatccctaaacaaaagaaagatgccccctcctaccgatggaattatgtggaggacaaaaaatatccctgcaatacgacgcgagccgaatttttgacaagattaaaaaaacttaaaggcatacaagaaaacttctttgataaaaaaactgaaaatgatttatggcatattgtttactcggtaaaagacaaaaaagatttcgaaaaagctttaggcacttttgctagaaaaaagcgaatttcagaatcgaaatttgtcgaaaatttcaagaaaatagctccttattcaaatgattacggagcttattcagaaaaagctattaaaaaacttttaccgctaatgcggatgggaaaatattggaatgaggaatctctaaaacctgaaattaaaaatcggatagaggatattcaggagcgattgagagctattaattttaataaagatgaaattgagacagttgcagatgatgcctataaaaaacaagtactaaaaagctttctcaagtctgaaaataaaaaaaatccttttgaaggtttaaatacttatcaagcctgttatgctgtttacgagcggcattcagaagtttctgaaataatcaattggcaatcaccatcagacatcgaattttatttaaacgaaacctttaagcaacatcaacttaaaaatccaattgttgagcaagttgttactgaaactttaagggttgttagggatatttggaaatattacggtaatagtaaagctgattttttctctgaaatccatgtcgaattaggtcgagaaatgaaaaattcagctgaaaaaaggcaacgattaagcaatcaaaataacgaacgggagaatacaaacctgcgtataaaagcggttctagaagaactacaagatgaaggtgttgaagaagtaaaaccttattcccccaaccaacaagaaattctaaaattatatgaagaaggtgtttattttaacgccaaatacgatcaggtaagtgaagatgaaattgaagcgataaggaaaaagaactcgccaaccaagaaagatattttacgctataaattatggttagaacaggggtatcgttcaccatatacgggaaatataattccaatgagtaaactattcactacagattatcaaattgaacatataattccgcaatcacgtttctttgatgattcttttaataataaagttatttgtgaaagtgctattaacccctatccttataaagataatcagaccgcatatgagtttataaataacagccgaggatgtgttgtgccggaattaggaataaacggcaaagaatgtacaattttcacagtagaagaatatgaagcccattgtaaaagctattatagcaaaaatcgaacaaagttaaagtacctgttgagcgaggatattccagaaggttttattaatcggcaactaaatgatagccgatatataagcaaatttataaaaggtttattaagcaatattctaagagaacccaacgaaagagaagctacagtaaagaacctagtaccggtaaatggagctataaccagtcaacttaaacaagattgggggctaaacgataaatggaatgaaattatcgctccgcgctttaaacgtatgaacgaaattacaaaatctaacgactacggctattgggataataaaattaatgcttttagaacacaagttcctaaggatattgaaacaggcttcagcaaaaaacgcatagatcaccgtcaccacgccttagatgctttagtaattgcctgcacaacgaaagatcatattaattatatcacctcaattaacaccgaacgtaaaaaccacagtttagtgaaaaaattacgcaaaactaaagatatagaattaggtggtaaaaaacggaccgttgcaaaatcttacaaacagccctgggaaggctttacaatagatgccaaaaatgctctggaagaaattgtcataagctttaaaaagaatatccgggtaataaatcgaaccaacaacaaaacctggcattgggaaaagaaaaatggacagtggaaaaaagctttaaaatttcaaaagggaaataattttgctattagaaaaccacttcacaaagaaactgtttccggattaattgatatccccactcccaaaggaaaagtggctactgccacacggacgaatatttcagatataaaaaaccacaaacatatagataaaattactgataagagcatacaaaaaattctaaggaaccatgtcaaaaactatctagatcaaaatgggaaggaagatttcgcagaagcattcagtcctaaaggaattactgatttgaatcaaaatataaaagaattaaacagcggtaaaaatcaccagcccatttataaggtaagacaatatgaagtaggtaataaatttagtgtaggggaacgaggtaataaaacagataagtatgtagaagctgcaaaaggaacaaatcttttctttgcggtttattgggacgataagaagaaaaagcgaaactttgaaaccatccctttaaacgaggttttagagcatcaaaaacaaatggctcacatcccgatgaaggacaaagaaccaatacctatagatcatacaaaaggcaaatttttattcttcctatcgccgaatgatctggtttatattcctgatagagaggatatagattcagacgtcatccctgagaatctaaaaaaagagaaaatctataaaatggtaagcagtactggaattcaatgtttttttattaaacatcaagtttctactgtaattcaaaataaagtggagtattccgcattaaacaagatggaaaaagatattgaagataatatgattaaaaatatctgctggaaactcgaaattgatcgtttggggaatattaaaaagatcgtcaaatgatcaaacgcagcctctttttcgccaatccagcttacttaagcacaaaaaatgaacagttagtggtttctttccctgaagaaggaaaagaagataaaacagtacctattgaagatattgggatggtgattttagaaaacccgcagattactctaaccaacggactaataaccaaacttattcagaacaaggctgcggtagtaaattgcgataaacagcacttaccctgctctattttgcaacccctcgtggggcatacggaacaaacagaacgcttttcggcgcaactcagtgctagtttacctttaaagaaaaatctatggcagcaaaccattagtgctaaaattaataaccaggggcaacacctttttaaaagaaataaaaaccataaaaaactggtgcgttgggctggagaagtaaaaagcggcgataccgaaaatcatgaagccgttgcagctgctcattattggcaaaatctttttgatatagaaggatttaccagatatcggcacggagaccctcctaacaatttacttaactatgggtatgcgattctacgagcaattactgcaagagcgctaattagttccggattattgccaggtgtgggaatctttcatcataataaatacaatgcctttgccctggccgatgatattatggaaccttatcgcatttatgtagatgacctggtttatgaaatggtggttacggaaaagaatattgacgaattgactacagacttgaaatcccaacttctaaaaattcctgctttagatgtttttattgatggaaaatggagtccgctaatggtagcacttagtaggacgactaattcactttacgagtgttttgctaatctaagccgaaggattctttatccagtttaccaataatgatatgcggtttggataaaattgaaaattcaatagtaactatatggatgaaaaattttcacgtttaaaccagtatcgaagtatgtgggtattagtattttttgatcttccaacggaaaccagggtagaacgaaaagcagcgaaccgttttagaaaagaccttcttgatgacggttttggaatgttccagttttcaatttataccaggttttgcgccagcagagaaaatgcagatgtacacaccaaacggaccaagaaaaaccttccaaaaaaagggaaagtatgtattatgcaaataaccgataagcagtttgggatgattgaactttttcacggaagaaaggaaaccgccccagaggctcctacccaacaacttgaacttttctaggattacaaatctcccattgaatgtagtcaagacatctcaaaagcttcttgttttttaattctaagagacaccttaaaaaacaggataccagcattttatagcgggtatcctgtgaatcctgattaaaaatacaattctgaaagcaattcacaacgcatagctctttgacgttttataagcttttcctgtgaatcctgattaaaaatacaattctgaaagcaattcacaacaacccgtttgagctattcaaacgggttttcctgtgaatcctgattaaaaatacaattctgaaagcaattcacaacaaagttcattggtgaaattctctattccttcctgtgaatcctgattaaaaatacaattctgaaagcaattcacaactaaccaggtggaatcaaatatgattatagacctgtgaatcctgattaaaaatacaattctgaaagcaattcacaacataccgctggtgggggacagcctcacgaaacctgtgaatcctgattaaaaatacaattctgaaagcaattcacaacaaatgacaggcgacaccgtctttacccaaacctgtgaatcctgattaaaaatacaattctgaaagcaattcacaactgtgccaactgctttggtaactcgtattctcctgtgaatcctgattaaaaatacaattctgaaagcaattcacaactcagaaaacgggtattactcgcggtgtattcctgtgaatcctgattaaaaatacaattctgaaagcaattcacaactgtatacatttgtttaataccactaaacaacctgtgaatcctgattaaaaatacaattctgaaagcaattcacaacacacgtttaaaatctgttttctctacttttcctgtgaatcctgattaaaaatacaattctgaaagcaattcacaacgatttgcttgtgcattgtctactgtgttagcctgtgaatcctgattaaaaatacaattctgaaagcaattcacaacggactttgaaagtaaaatttcagcacttagcctgtgaatcctgattaaaaatacaattctgaaagcaattcacaactaccgctgcacgatgatctaagaaggtctcctgtgaatcctgattaaaaatacaattctgaaagcaattcacaacctattaaaggcgttcaaaatgccagctctgcctgtgaatcctgattaaaaatacaattctgaaagcaattcacaacggagttatcgttattatccagagcgttgcacctgtgaatcctgattaaaaatacaattctgaaagcaattcacaacgagttcgacttgaaaatgcaagaattgcttcctgtgaatcctgattaaaaatacaattctgaaagcaattcacaacggcatcgctatagatctatcggcgtttcccctgtgaatcctgattaaaaatacaattctgaaagcaattcacaacaacttctgggcagtcccattcatttaaatacctgtgaatcctgattaaaaatacaattctgaaagcaattcacaactccatttatagcgggcgaccgagtaatggtcctgtgaatcctgattaaaaatacaattctgaaagcaattcacaacagaatattaataagcagctgaatgacttcccctgtgaatcctgattaaaaatacaattctgaaagcaattcacaacaaaaggctacgccttcgtcttcttcttaatcctgtgaatcctgattaaaaatacaattctgaaagcaattcacaacgttggcttacaagatggtgtatggactttacctgtgaatcctgattaaaaatacaattctgaaagcaattcacaaccgtaccattcgatacatatcaaagttcaaacctgtgaatcctgattaaaaatacaattctgaaagcaattcacaactaccgcctggtacaaagtcattattgaaaacctgtgaatcctgattaaaaatacaattctgaaagcaattcacaacaaggtcattgataagcgatcggtaagtacccctgtgaatcctgattaaaaatacaattctgaaagcaattcacaacgctatgtatcggttaatcgcgatgcaatgacctgtgaatcctgattaaaaatacaattctgaaagcaattcacaaccattagacggtaacaaagtttggttttatacctgtgaatcctgattaaaaatacaattctgaaagcaattcacaaccggtgcagctccagatacaaactaccaggtcctgtgaatcctgattaaaaatacaattctgaaagcaattcacaacatttgactgtaaagagctttcagatcttcccctgtgaatcctgattaaaaatacaattctgaaagcaattcacaacaaaatgttcttgctataagtcattacgcagcctgtgaatcctgattaaaaatacaattctgaaagcaattcacaacaaaatggagaattaaaaaaaggaactggaacctgtgaatcctgattaaaaatacaattctgaaagcaattcacaactacgctttacaacgtagcaaaattggttgtcctgtgaatcctgattaaaaatacaattctgaaagcaattcacaactgccggtgggaagctactttgcggttgtagcctgtgaatcctgattaaaaatacaattctgaaagcaattcacaacatgggtgtcgaaaaacaacaacttaaaaaacctgtgaatcctgattaaaaatacaattctgaaagcaattcacaacacggtaaaacatctaaaaaacgaaggcgggcctgtgaatcctgattaaaaatacaattctgaaagcaattcacaactgcagccgtaagaaaatcaggcggtaagacctgtgaatcctgattaaaaatacaattctgaaagcaattcacaacggattgtggtaaatgcttccataaacacgtcctgtgaatcctgattaaaaatacaattctgaaagcaattcacaacacgaacttcatagatttgattgtaaaaatttctgtgaatctaattaaaaaatacagaatcatagcgatatttatagttctatttcccttatatacgtcttctaagctcagatatagctctttctcgctctcgctcttcctacacgaattgcgtctactaatgctaataattcgtgcagaatactatcttttaaagcagcatccggagctgaagaatataaaggtattatactttgccctctcaacattcctttaccagaaggccaaacataattttcactactttttatttgatcctttaaaggggcggctgaatgagaagttggaataccacgtactaccggccccggtttttgtggaaaaacatattttaatccgaattgcaaaaaatcaatgaaagctagtttcattactttttttcctttaggatctaatagacctgaatatttagaacgggctaccgattcactcacttcagattgactcatccctaaagcttcggctacatatttttgtttccaggtgacatcatcaagactaataagctttagcagcaatagtatatcttgaggtttcatatgaatatttaatcctttcataacgcatattgtatattgcgatatgcaatataaagattaaaaagtaataatatcatcattttaaaattgctattatcgatcgcaatactcgaaaaaatataagtattttaaaatttagcctttataaaatagattcccgagaaattatattatttgatgttattcttcactatttgtggtaatacgatgttgaactaaacctaaaggtagcttcaagagatcgctaaatcactattcactacctttaggtattgtgtaattaattcattgaaagttatgaaaaaaaagtagtaccctcattgaaagggcctgtaattctgtacccgagtttgatcagctgtaccgtaaattaaagcgttccgtagcactcgccggcaaaagccaaagtacccttaccaactatgcccgctgccttgcgcatatgtccctccattttaaatgtagtcccctggacctcgatgaagaacaggttttggactacttgcaccttctaaaatcccagcacaaaacaccatcggacagtttctttaagcatacggtctatggtcttcgctatgcctatcgaatctccgggatgaaagcgatgcgggtcatgctaccttccattgaacggccccacaaactcccggtggtgttaagccgtagcgagattaaacaactgcttaaaactcccaaacttctcaaacaccggttggtactggcaatgctttatggctgcggccttcgctgcttcgaacttcgtggcttgcaactcaaagatctggattttgatcgtaagatgcttcacatccgccagggcaaaggcagaaaagaccgctatgttcctttatcccagatgcaaatccgtggcctaaaaaaatatatcgctgcagaccatcctaccacctggtgttttaatggcaacgacaggaaaggtgatccagcccagttatctgccatgggggtgcaatggatcgttcgggaagcccgtaaacacagcgggatccagaaagatatcactacccatagccttcggcacagttatgccacccaccttttggagatgggattggatattatcagtgtcaaagatttactgggacacgcagatatccaaaccacgctcaccctaccttcacgtggcacaactcggtaggcagaagccgttcagtccgcttgatcggctctacaaggagtagtcgtgaaacctgctgctcacgaggtggcccaggtactggaaaggaacacggaatctttatccaaatactgttacaacagctggcaggcaagaaccctgcacgccttgcgtaaatgccgcactgctgccctgggtggccatatcgaccgctgtaacaacccttcctgccataggctccatcttagttataatagttgccggaaccgccattgtcccaagtgccagggacataaaaaggaggaatggatccgggcacgggaagaagaactcctaaacgtgccttacttccacgtggtcttcacattgccatcagcgctcaaccgcctatgcctgtacgaacctaaaaaaatgtatggcctactcttcaaattagcctggcaggtggttcagggtttttcatcgaaccataaattcctgggtgccaaaccggggatgatcgccatcctgcacacctgggggcaaaacctttctttacacccacacctgcactgtattgttcccgggggtggtattgctcaaagcggtcaatggaaatctgcaaaaagcaaaggtaaatacctgttcccggttaaggctatgagcaccgtttttagggctcgttttgtggcttcccttcgcaaggaactggaaccgcaatccaaagacttctacgaaagcctttttaaaaatgattgggtagtttattgcaaacgcccatttttaggtgccgcccaggtggtggaatacctcggccgctatacccacaagatcgccatcagtaaccacagaattaaaaacctggataatgaaagcgttatatttgctgtaaaggactaccgccacgggggaagaaaatccttgttgcgtttatccgatgcagaattcatcaggcggttcgcgcttcacatacttcccaaaggatttgttcgcatacggcattatggaatcttgagttcctatcataaaaaaatcacccttacccagctacagaaaagcctgggacgagtacaactcacagagcgtaaaccacttcaacaccgcctgtgcccggtatgcaagaaaggaaaattggtgacccttactacctttaccccgcgaggcccaccaggatactggatggaaaaactaagaaaacaatcaaataaataagtatgaaaaacgatccttccgggcgtaacaggaaacctatggctcaaaacgatcaaaattgtattaaatcctataagtaccagggaaaaaccatagtaaaaagcagcttgaccttaggtcaatagccaaaagccgatatcttgcatagaggctaggtttactatccgacaaatactacctcctaaaaacagactaatccccatatatggctgaccggcaaagaaccggtttagtcaacagggcgttcatgttcggccgttccggccacacgaacgcttagttattatttaatgttatttatgagtttttgtgagtagaaaaattaaaacaaattatgttggactgatttaataataatatcagaaaaatcttacaggagaaagttaaaatagtgaatctggtattttttaacattttgcgtacaatttagcgtacaaatacaatgttcaaaaacaaaaaagccttgaaaatcagatgattaacaaggctttaagtactcgggacgggaatagaaaccctcatatcttatcattttcacaacacctataaaatctcaactcatacccataaaccaactattaataagggtttataaagggtttcgataaatgcctttaattgtataaaatcgtatacggtatggaaaatgtttggaagatgtttggaaactgatttttttaaattactttagtactgttcaaatgttcaacttcaaattatggcaacaattaagtaccgtatacgcggaaaaggaaataacaacgtaacaatttacatttacctatctactggccgcggtaacttcatagagacctccagcggatttacaattaaacctaaagactggagcaagaccaccaataaacccaaacagaatactacagaaaacaaagttactttcattcagttaaacaagttggagagttatatttatgatgaggtaaataaagctaattcaaaaggacagctgattgacataaactgggtgaaggaaaaaattaaccaatgttttgaccgggtaaaaaaaacagacaacagccttttagtaaatcacattcaatatattattgataatgctaacactcggaaaataaaaggtaaagataaagtaggactatcaaaccgcagggtattaggttataaatcatttaaaagcctaatgcagacttacgaaaagaagattaagaaaaaaattcacttccaggatattaataaacctttcgtaaataagtttactacctggttaatgaataccgaaaactattctgtgaactattccggtaaacagctagataatctaaaaacagtttgtttggatgccgaggaacaggaaattaaaataaatccctattgccataaaatagaagggttcaaagaacgtaatgaagataggtttatagttactctttcttttaaagaattagaacaaatacgaacggccacccttgaaacgaaagcacaggaaaacgcacgtaaatggcttttaattggttgtgaaataggacagagagccggagatttattaaagatcacccctgaccatttgagatttaaaaaaggccggatttatatagatattgagcagcagaaaacaggaaagttcgttacagttggggttataaaccctcatgtagttgatattttagaaaataatttcccatatcctattagcactcaaaaactaaatattcacataaaaaaagtgtgcgaacttgctgaaatagatgagttaattgaggggaaaaagtttgataaaaaaaccaaaaggaagaaacttgacttttaccctaaacacgaactaatcatttcacacactttcagaagatcatttgcaaccaattattataaaaaaataccaactgcagtacttataaatattaccggacattcaaaagaaagtatgtttctggaatatataaaccagagagaggataaagatgaaaacgcagatatgtttatgaaattctatgagaccattaaccaggataaagagccggaaatgaaagttattaaaaacgcggctaatcaataaatttaaaacatcccccaatgaattttaacaacctcactaccacagaaagaagcattctaaattctataaacgatgctctaattttagaaagattacagaatgataattcagatcatagcatatctattaaggaaaattgtcaaggaatagaaatagcctttaaaattttaggtataacctcggaaccattgaaagaggatctaacagaaatttttacagccgtttcagatttaaaccttgaattattgaaagcaactaaattaatttattctgaatggacctgtgaaattataaaccagactaagattaattctataattaaaagtttagagaaataacatttaatatggctgaatcatcacaagcaatttatttacacacagctagtcttttgcaggaatacattagcctttcccctatggatggttttaagagcaaagaagatccttcaggaaattttaaggacttagcacataaaattattaagagccttgataatctttttattcaaagtaatgaggataatttatactggactgattgccctctaaatgtctataaggaaaccttagaggaaaggttgaggtatttacgaaagaaagacagaaacccggatttagatttagatgatttattgaagcaggactatatgttttacgatcggataccaaggaccaaggaaagagtattaattgcagataatgaagatttaaccgactttgttagttacaattattttgaaatactgaatagtatagactcaacaagtggggaatttgttttttcgaaaataagaaccaagtttgagaatagtcgacataa

SEQ ID NO: 1209 - DNA, 24365 bp, synthetic construct
  misc_feature 1..24365: note = Synthetic
  source 1..24365: mol_type = other DNA
caattaccatcaacgactccatcgtttgcctttttctgtaatctacctcagtatgttaaggatccgtataaacggttccttgagaataaaattagaaagaagtggaacttaacaggagttccggtaaatatctttttaaggaaaaaataaagagacacagaatgaaaaactgacctacgtcagtttttctggttaaaagcggtatcataaaaattgaaataagtacttttgtaatttgcaacaaaaaattgagtaacagtttcaattaatcgagaccgcccttcccaaccataacgaacccggaaatagggctggctataaagaaaagctaaacgaagcattcgagaaagcaagaaaaatattgaaatcattattataataaagtttgatcagaaaaagatgagtacaaatcacagtgccaccgcaatcatcagaatacactgtccggatcagcgggggatcgtagcacgggtaacggacttcattcatcgtaacaatgggaacattgtggctctggatcagcataccgaccgcgacgagaaacgtttctttatgcgtgtagaatgggaactggaaggattcgaacttagcagggaacaaattgaacctgcctttgagtttgccattgccaccccctgcaaaatgaagtggaaacttcatttcagcgacaaaacaccccgcatggggctgtttgtttcaaaaatgtcgcactgtttatacgatattcttgctcgctatcagagtggggaaatgaaggttgaaattcccgtgattatcagtaaccacaaagatttggaagaagtggttggcaagtttggaattccgtttgttcacgtgccggttacggccgaaaccaaagcacaacaggaacaaaaagcgctggatatactgaaagagcatgaagtagattttttggtattggccaggtacatgcaaatattatcgccaaagtttgtagatcactaccctgaaagaatcatcaacatccatcactcatttctgccggcttttattggcgcaaaaccatatcacgcggcacatgcacgaggggttaaaatcattggtgccaccagccattatgttacatccgatttggatgccggccccattattgagcaggatgtgagccgcataagccaccacgatacggttgaacgactcattcaaaaagggcgtgatatagagaagattgtgctatcgcgtgcggtgatggcccacattgaacgtaaaacactggtttacaaaaacagaacggtagtattccagtaacagataacaacacttccatgaccaaacagaacattgtaattataaaatataacgccggaaacatccgttcggtcaataacgcactgctgcgattggaacaggagggagaaattacagcagatccggaaaagattattaaagcggataaagtcatttttccgggagtgggagaagccagtacgaccatgaagcatttgaacgaaacagggctggccgatctcataaaaactttaacacaaccggttttgggcatttgtcttggaatgcaactgatgggcagtcaaagcgaagaaggtgatgtaaattgtctgggcatttttgatgaaaaagtaaagaaattccagcttccggatcccaatccccaaaatctgaaaatcccacaaatgggatggaatcagattacagatttaaaaagcgacctgtttgatgcttcacttgaagggaagtatgtttattttgttcacagctactacgttgccttgggcaacgacacggcagccacaacgaattacatacatccttacagctcggcattgcagcgcgacaacttttttgccacgcagtttcaccccgaaaaaagcggacctgttggcgagaaaattctgaaaaacttcctgaaactatgaaaagaattgaactgataccggccattgatatcattgacggaaaatgtgtacgcctgagcaagggcgattatgacacgaaaaaagtatataacgatcaccctctggaagttgccaaagagtttgaagcacatgggatttcacgccttcacctggtagatttggatggtgcaaaagccggccgcattataaattacaaagttttggaaaccattgcgtccaaaaccaacctggaaattgattttggaggaggcttaaaatcaaatgctgatttaaaaatcgccttgaaagcggagcgcaaatggttaccgggggcagcatcgccgtaaaaaacccgcaggagtttgaaagttggatttcagtgtacggagcagaaaaaaatcatactggggtcggatgtaaaggagaggaaaattgctgtttcgggctggttggaaacctccgagctagaactgatggattttcttagagattatacatcaaaaggaataactaaaaccatctgtaccgatattagcaaagacggaatgcttcaggggtctgccattggactatatcgtgaggtgttaaatcagctccccgacctatacctcattgccagtggcggtgttagttgtatgaaagatatagaggacttgcaagaggccggcttaccggccgtaatttttggcaaggcaatatatgagggcaaaattagtttaaaagaactggagcaatttatttcataaaatgctcattcttaaataaccttaaatcaaaatcaaaatgctagcaaaaagaatcatcccctgcctggacataaaagacggaatgaccgtaaagggtgttaagtttgtagagctgaaaacagtgggcgatccggtagaactggccgccgcttatgccgaccaaggtgccgacgaactggtatttctggatatcacagcatctcacgagggtcgtaaaacctttgttgatttggtgcatcgcattgcacgccacattaacattccctttactgttggcggaggaatctctgaactatcagatgcggaagccttgctgaatgcaggagccgataaaatcagcatcaactcatcggccgttaggaatccccaattgattgacgatatggcaaagaactttggcagtcagtttgttgtagttgccattgacgccaagaaagaagaaaccggcaacgaatgggcggtaacggttaacggggggcgaattttcacagaaaagaggctattctcatgggcacgagaggcagaacaacgtggagccggggaaattcttttcaccagcatggaccacgatggcgtaaaacaaggttttgccaacgaagccctggctcagctaagcgatgatctttccattccaattatcgcatcgggaggagccggaaacatgcaacattttaaagatgcttttgaaattggaaaagctgatgcagcattggctgccagcgtctttcactacaatgaaatttcggtacctgatcttaaaacttatctaagaagtgaggggattgttgtgagatgacaagttgatggtttggagttaatagttgatggttttcctccttcgctaacgctgggagcatataaataaaaaaaacagagaaaaatgaaggttgattttagtaaaacacctgatggcttagttccggcaattattcaggacagcaaaaccaacaaagtattaatgttgggttatatgaatgaggaagcgctggaaaaaaacaaaaaaagaggggaaagcaacttttttcagcaggtcgaaaacaacgcctctgacgaaaggagaagaatctggcatttttaaatgtggtttccatagctgttgattgcgataacgacacattattgattaagtgtaatcctgtaggtccaacctgccataccggcacggacacatgctggagtgagaccaatgaggttagtgaactggatttccttaagcatcttcaggattttattgacaagcgaaaggcagagatgcctgaaggctcatataccacttcattgttcacaaagggaacccgcaaaatcactcaaaaagttggagaggaagcagttgaaaccatcatcggtgctatggccaatgatgatgaaaatttcctatatgaaggtgccgatttgttgtatcatttagtcgttttattaacacataaggggtacagaattgaagatttaataaaagaattaaggaaacgccataaataatgggaataatttaaggcacaccccgttacgttataaaaaagcgccaaaaacacctcttaatcagtgttttggcgcttttttcatcacccggtttatcattaaaataagcttccagtatcattcaatatttctgaaaaaaagtaaaaaatacgatttagcatcctcaaagtggaaatttctgtgattatagagtaaaataattacaaaagccgttaattattgtttcaatcgtattaaatttgacataccataacagaacggtattgtgattattggaaatttaaatagtaactaacgatttcttaattattaaattttatgagttccataactgagaaaatctctataaaggagaaaattggctatagtcttggagacttcgcggccaatcttatttttcaaactctgatgaccttcctggcatatttctacaccgatgtatttaaaatacaaggtgatattgctgcagttataatatttgtaggaggtatggcagggggctttctttactccggtaatgggagtaattgcagaccgaaccaatacgcgttggggaaaatttcgtccatggattttgtggacatctgttccatttggtgtgatcgcattattggcattcacaacaccaaactttagtccatcgggaagaattgcttatgctttaattacttatattttattggtaatagtttatacagcaaacaaccttccttatgcaactttaagtggagtactaacaggaaacatgtccgagcgtaacagtatttcctcttatcgttttaccgcggtaaccgttgctcagtttattatccaggtaatcttattaccattagtacttatcgttggtgatggggatcgtgctgttggttttgaatatgtaatgggaatatttgcctttataggagttatttgctttatcataacgtttctaacaaccaaggaaagaattactcctcctgctgaacaaaacacaagtgttaaacaggatttgattgacctttcgaagaacagaccctgggtaattatgttgattgtaacaattttcatctttattactctcgcgttaaaaggaggtaactacatctactatttcgaaaactacttaagtcagaatgacttaaatgagttccttcaattcattggtttctttggaatggtagacgggttcaacagttttctaattggaatgggattaactcctataacccttcctgaagatccggcctcaataggatttggaatttttaacggatcgggaattattctgatgatcattgccattgcattatcgaagcccattgcagacaaatatggaaaaagagatttgtttatagttgctctttctgttgccactttatctcaattcctattcttattcatcccggctcaaaacgttggatgggtatttatctgtcaaatagttcacggtttctcctatggtcttaccattcctctattatgggctatgattgctgatgtagcagactggtctgaatggaagaataaccgtcgcgcaacagccatcatattctctgccatgctattcggactaaaagccggattggcaattggaggttcattagttgcagccatcctttcgttctacggatatcaaccaccggcggaagggactgttataatacaatcagagcaggctataaatggtatattgatgaccatgagtgtttaccctgccattaccttccttgttgctcttgttgccttgttcttctatgaaattaacaaatcaacagaagtattgcttgaaggagaactgggaaagagaagacaacaaggattagaaactctggaacaagagaatcttaaatagagggatagcaattttaaaaaaaatgaataacatgaaatcattacagaaattagcaacaattgctctggcaattatcctaatgggtagctgcactgcacaagaagaagcaactacgttaaaagatgcattaaaggattacttttacatcgggacagccttaaatgtgcctcaagttgcagggacaagatcctcaagccatcgaaatagtaaaaaacgcatttcaattctgttgtagcggagaactgcatgaaaatgatgtaccttcaacctgaagaaggagtattcttttgggacgaagccgatgcttttattgagttcgcagaagctaacgatatgcaagttattggacacaccctggtttggcactctcaagctccaagatggatgtttgttgacgaaaacggggatcaagtatcccgtgagcgccttattgagaggatgaaaacccatgtacaaacagttgtagaaagatacaaaggccgtgttcacggatgggatgttgttaatgaaaccattctcgacgatggatcatggagacaaagtcatgggtaagaatcattggtcctgaatttgttcaaatggcatttgaatttgctcatgagattgaccctgatgttgagctttactataacgattattcagtatctcgggccggaaaaaagagatggaatttacaatatggtgaaagatctgattgacaatggcgtaaaaattgatgcagtaggtctacaaggtcatttatctatggattttccaactgttgagatgaaagaagaagctttgcaaaaattagcaagtttgggcgttaaagtaatggttactgaaatggacattaccgttttaccatggccatcaagaaggcatagtgcagaagtttctttaaattatgaaatctctgatgaatacaatccatatcccaatggactttctgaggaatcatatactgcactaatggacaaatatgttgacttttttgaaatgttcatgagaaataaggatatcatctcccgtgttacagtttggggagttgacgacaaccagtcgtggagaaacaactggccaattcgcggtagaaccgattatccattgttattcgacagagattatcaacctaaatcagctgttaccagaatcattgaactggcaaacgcaaaaaaacaataattttttctgactcgtttattttgggatcgaaccatccgggttaaccgggtggttctttttaacaggaaggaattttaaaactatataattatggtaagaaagcattttttaaagaacatgtacattgctgaccctcatgcacatgtatttaacgggaaattatacatctacccttcgcatgactacgaagcagggattccagaagatgatcttggatcacatttcgctatgaaagattatcatgtattttctcttgaaaacatcgatgatgagatcaccgaccatggaaaagctctggatgttgatgatattccatgggcaggccgtcagttgtgggattgcgacgttgctgagaaagatggaaaatactatatgtatttcccgttaaaggacaaaaccgatattttccgtttgggaattgccatcagcgacaagcctgaaggtccatttaagccacttccgactccgatggatggaagttactcaattgacccggctgtttttaaagatgatgatggtaaacattacatgtactttggtggtatatggggcggacagctacaacgctaccgtaacaacaaagccattgagtgtggacagcaacctgccgacaacgagcctgctttgtgtgcaaaagtggccgttatgagcgatgacatgctcaattttggcgaagaaccaaaagatctggtaatccttgatgaaaatggcaaccctatgttggccggagacaatgaccgtcgtttctttgaagcatcatggatgcataagtacaaaggaaaatactatttctcctactccaccggagacacccacaaaatctgttatgcaaccggggacaatccttatggaccatttacatatcagggagttattctaaatcctgttattggatggacaactcaccattcaattgttgaatataaaggaaaatggtatctgttcttccatgactcggaaatatccggaaaaacatggttgagaagtgcaagagttgcagatcttaaccatttgcctgatggcagcatagaaaccatcacggttgaatacgataaataattcattattttgatttagttaatttttcaggccgttcctacaaggaacggcctgattctttataatagcattcttaattaaacaattatccaatcacggggttaacctggcagaggcaacaaactaattctacacaggaaacaggaattaactggtatcaagtcaaatataaattgtattcagcgcccaccctaacccccaaggggaaagccaaacgcactatgctaactcgtcattttatggttgacataacactggttttccctttcccattacagcaggaacttttaaactgaaatattcttcaaaaaaacagtatcatgcaaaaaaacatcatcattgcactgctatctattctggtaatctttttgattgttaagttaacgctccaatctcctgaaaacggtcataaccacaagcctattccgcaacctgaaaagctcttacaacttccggatggtacatatcgtggaggtttctacgaccttggagccattcagatgaatattcagttcattttggagaacggtattgtaaaagaggctgaattcaggcatatgtggcgagatgagaattattacatgggaactgaaacggagccatacagatcggtgattgctcaatatgaggaagctttacaatatctggttgggaaaaagctaagcgatcatcttgaagatctgcatgagcccggaaacgttgtttctcttaaagttgacggctattcagccgcaactctccgcacccagaaaatcatagcctccattcgagaagctgttctaaaaggggtttatcggtttgaagaaccggaagaatctctcaccagaagtgaataactttaagaaaaaaacagagtgttccatacgtccctcctacgaccagtgggattgtctatgcgcaataaactgtaggattttccacacctgcaagcattattatctttcaaaatatccattgcttttgtctatatttgttcaaacagaacaaaataattaaatcgtatgtcgcttaaggatttcaaaacacgagtaaaaattaaagccgaacaggaagatgtttttgcggccttcaccaacccttttaccattgagctttggtcgggctaccctgctgtaatgccatccgaagccggtcaggagttctccatgtgggaaggcgacatacagggacgccttttggaactggttcctgaaaacaaaattgtacaggagtggtattttggcgaccagactgaaccatccgtggcaaccataaaactgttcccttcgggttcaaaagttcaagtagatgtgattcatatcaacattcccgccgaagctttcgaagatattgcacaagggtgggaagagtatattttgggtgctattaaggagtttttggaggtggagtgattgtctgccttgaagtgattgcgagaatttagcttatattattaagcgggttttaccacggtaagacccgctttcgttttattataagcaaccaaaaaccagatttgaactttcgtaaataattgttaaattgcaaaaggcgcggatattaagcacaacaaaggcgagtttccccgccttaaatgttttcacaacggaataatccttattgtgaattgcttcaaattgtaaagcaattttacaataattttagtaaatttcaaatgtttttacgaaaattcttcatcggatgactactatcactatgtaaatgttatctaatgaatattacccaaacggcatgaatctattgctttcttataaaaaacacaaaccaaaataatattatgaaacccttcatcggatgactattaccactatgtaaaagtcatccgatgaatatttacccttagcaatatgaagaaaattttaggacttgatttgggaacaaactctatcggttgggcattggttgaaggaaattttgaaaatagaaatggtaatattctggggttaggcagcagaattatcccaatgagtcaggatattattggtgactttggaaaagggaactctgtttcccaaacggcagaaagaacagcctacagaagtgtcagaagactgagggaaaggcatttgcttcgtagagaaagattacacagagtattaaatattttgaattttttacctgaacactacgcaaaacaaattgattttgaaaaaaaattaggacaatttatccctagtactgaaccaaaattagccttcaacacaaatcgtttcatctttactgattcctttaatgaaatggtggaagactttcgtaataaacaaccagacttgctaataaccgaaaatggaaagccaaagctaataccatacgactggacaatctactttttacgaaaaaaggcgcttacgcaaaaaataaaaaaagaagaacttgcatggataatattaaactttaaccaaaaaagagggtattatcaattaagaggtgaagaagaggaagagaataaaaacaaattagttgaattctattcactaaaagtgattgatgttgtagccgatgaaaaaccgaatagcaaaggtgagatatggtattcactgcatcttgaaaatggctggatatatcgtcgttcaagtaagacaccccttgatgattggaaaaataaaactcgagattttattgttaccacagacttaaatgatgatggcagtgttaaaactgataaagaaggtgcggaaaagcggagctttcgggctccgaaagaagatgactggactcttttaaaaaagaaaacagaaaaagaaatcaataattcttctgaaactgtcggatcatatatctatgaaaacttgctaaacgacccatttaaaaaaattaaaggtgatttagttagaaccattgaacgcaagttttacaaaaaagaattagaactgattctgaatacacaaaaagatttccacccggaactaaaaaacgaaagcctatacttcgattcaatcagagaactttaccgaaacaatgaaggtcaccagcttaatttgaaaaaaaagaattttgttcatctcattttagaagatataattttttatcagaggcctttacgaagccaaaagtcaagcataagcaattgtcctttagagtatagaacatacaagcaaaatggagaaatcctaaaaaaacacctcaaagccattcctaagtcccaccccatttatcaggagttcagggtttggcaatggatgtataatttaaaaatatacagaaaacaggatgattctgatgttacaaatctctttataaaatcaacagaagattatgaaaatctgtttgattttctgatgcaacaaaaagaaatagaccataaagcagttctaaaatactttttaaatgccgaaggattgaaaggcaaatcattgaattctgaaattgcgaaatacaggtggaactatgtttacgactctgttaaggatgaatcaaaaaagtatccctgcaacgaaacgggatatgatatcagaagcagattaaaaaaagttgatggcatttcccctgattttctcaccaaagagaaagaaatcagtttatggcacatcatatattcagtcactgataaaaaagattatgaaaaagcattaaaatcctatgcaattaaaaatgaactggatatagaatcttttgtagaagcatttataaaatttcctccatttaaaagtgattatggaagttactctgaaaaggcaattaaaagacttctgccattaatgcggataggaaaatactgggaatgggataatattgacataaagacccgcgaccgtatcaataaatttattaccggagagtatgatgaaaacataaaagataaagtacgcgaaaaagcaataaaattggaaaaggaggatgatttccaaggcctacaactttggcttgcaggctatgttgtttatgaccgacattcagaagctggtgaaataattaaatggaactctgtggcagagatggatgagttcataaataacttcaaacaacactctttacgcaatcccattgttgaacaagtagttaccgaaactctaagggtagtgagagatatttggcaacattatggtaacggagaaaacgatttctttaaagagatccatgttgaactgggtcgtgatttgaaaaacaacgcagatgagcggaaaagactaacgaatattgtttctgagaacgaaaacaccaatcaaaggattaaagctttgctgattgaaatgatgaacgacggctctattgagaatgtaaggccatattctcccgtacagcaggaaatcctgaaaatttatgaagatggtgtattaaactctgatattgaaattgaagacgatatccagaaaataagcaagaaagcggaaccgacaaaagctgaactacaacgttacaaactctggctcgaacagaagtaccgatctccatacaccggacaaatcatccctttgaataaattatttactccggaatatgaaattgaacatgtcattccacaaagtagatactttgatgatggctttacgaacaaagttatttgcgaagctgcagtaaacaagcttaaggacaaccaactgggattagaatttattaaaaaccattatggacagaaagtatctaccggatttggaaaagaagttgaagtcttcactgaatcgcaatataaagaatttgtagataagcactatgcaaaaagcccgggtaaacgaaacaaattgcttctggaagaaattccggaaaagatgattgagagacaattgaatgactctcgttatataagcaaatacatctgttctattttatcaaatattgtacgtaaagaaaacaacgatgatggcataaattccaagaatctacttcccggtaacggaaaagtaacaacccggttaaaacaggactggggtttaaacgatgtttggaatgagctgattttaccacgattcgaaagaatgaactccattaccaagagcgaacttttcacaacctatagtaaaaatcatcaaaaaaagttgccttctgtaccatacgaatatagcaagggtttcaataaaaaacgaatagatcacagacaccatgctgttgacgcattagttatagccagtgcaaccagggaccacataaacctattaagcaataagcatgcaaaatcaaaagaacgatttgatttaaacagaaaattaaggaattacgaaaaaagagtttttacaagggacggtgaacgagtagaaaaagaagtccccgtcaacttcattaagccctggccaaattttacggctgatgcgaaaacttcattagaaaaaatggtagttagcttcaaactaaatcaacgcattattaataaggcaaccaatcggtatcaaaaatgggtaattaagaacggaaaaaagaccaaagaaatggttgagcaggaaggtcaaaactgggccgtaagaaaacccatgcacaaagaaacggtatctggaaaggttcttttaagcaatgtaaaagtcccaaaggacaaaatcctgacggctacacgcaaaagcattgatccctcatttaatcataaaacgattaaatccattaccgacaaaggaatacaaaacattctggcaaactatcttaaaagcagagataacaactccgaattggccttttcaccggaaggactggaagaacttaataacaacatacgacaatataacaatgggaagcaccaccaccctatttataaagccagggtatatgaggtgggaagtaaattcaggttgggcgaaaacgggaataaaaaggataaatatgtggaagcagccaaaggcaccaatctcttttttgctgtttacgaagacgaaaacggaaaaagaaattatgaaactattcccctaaatgaagtcatcgaacatcaaaaatggagggctactctcacaaaagaagaacaagctgaaacgccaatgatccccgtaaaaaacgacaggggcaaatttcttttcagcctttcgccaaacgatttggtttatgttcccgatgaagaggaaaacatcaatatacttgagcttaaaaatccatcgaaagaacaggctgagaggatttataaaatggttagttcttcaggataccaatgtttcttcataaaacatgaagttgctaattcaattgtgaataaacttgaatattctactttaaacaaaatggaaagagatgtaaatggaataatgataaaagaaaaatgtataaaactaaatgtgaataggttaggtaatattctataggctccttgctgcagggagcttcactgtatagtcattcatcggatgacttggagtcatcggatgaataaattaaccaacagtaaattcaagagcatgagagcttcacatcaagtgaagtcctaaataaaaacaaattcatccatactgagggcttcactttaagtgaaaccctcagtaaaaaagttaactgaattaaatacacaaacacccaaccccatgtatttcgaacccaaccactgctaccatatatacaatcagggcaataaccgccaaaaaatattctttaacagggataactatctttacttcctaaacaaaatacgccaacacattttaccttatgccgatattttggcttggtgccttatgccaaatcattttcatttaatggtgagggtcaattttgtagaattggaaactaacaacgagcaacgaaaccctgacactactcatccgatgacttcgagtcatcggatgagtagcaacaaatcagtttcaattaaccagtccatagccatcatgcttcggtcatatacacgagccataaataagtcaaggaatatgacaggaagcttgtttagggcaaagaccaaagccgaatgccttactaaacagaacggcattaccccctcattcttcaacagcaatcaaggcacgttgatttttacacccggtcaattacctgattatctgcaaacctgcttcaattacattcacaaaaaccctgtgagggctaatctggctaaggaaattgctgattgggaattctcttctgctcccgactattatggaattcggcaaggcagcctgattaataaaacattagcatctgagctaaacatccgattcttaggagagtgaacacactccaattattcatccgcaaataattagtttaagtttttggccgaatggaacttccatgagatgttattttggctaaggccgattttcaattcattttcttgttgtgagtttcccactcatgggcgtttcatttgaaaatagtttgtttaagtcattggacaaatgacactttcatgagtcccgatatatcgggattgtgagttggttcctcatggaggtttggggttgtataaaaagtaaattttaattatcctcgtctttcaaaccataaattccacattaataattcacccctaaatcccccgagggggactttaagcctccacttgggggagatttggaaggttgaaaacgaggttgatttataaattacaggtattgaatattattaatagtcttttgagatagcatctaaaaaatcgtcttacaattgtgttttacagcatcttatataaccctttgcctaattcctccgtatcagaaactataatgtgcaacatataacttcttatagttacatgcgcgcaataattaaaattggtatataaacccattgacgactgattttgaaattgtccggacaaaattattcatcggataacttgaagtcacccaatgaataataaacgccatgataaaaaaaacactctactttggaaatcccgtctatttaagcacccgcaacgagcaactggtgatcaactttcccgatgcacagggtcttgacaacgattcaggaaaaaacaccatccccattgaagatattggaatagtgataactgatcacaaacagataaccattacccactcgcttatacagaaactactggctaataattgcgccattgtaacctgcgacaactcacatatgccccatggccttctgctaacgcttaacgggaactcggtgcagaccgaaagatatgaacagcaaattaatgcatccatccccttaaaaaaacagctgtggcaacaaaccattaaatgtaaaatcagcaaccaaagcactctgttgtcgcggttaagaggaatcagaactgataatatgcaacactgggcatccagagtgacatccggcgacagcgaaaaccacgaggccagggctgccgcgttctactgggcaaatttttttcccattaataattttaaaagaggacgcgacgaggaaccacccaacaacctgcttaattacggttatgccattttgcgtgcaattattgcccgtgcattggtttccagcggactgatgccaactttaggcattcatcatcacaatcgatacaatgcttattgtctggccgatgatgttatggaaccataccgtccgtttgtagataaaattgtatatgatattgtggattccggtttggattatacccaactatccaaagaaataaagtggcaactgctcagcattccgcaaacagatgtattaattaatgacaaacggagtccattgatgattgctgcttcgcaaaccaccgcatcgctacataattgttttgaaggaagcagccgaaaaatagcttatcctaaatttaccgaatcatgaaccgattaaatgaattcagagttatgtgggtaatggtgctttttgatttgccaaccgagacaaagaaagacagaaaaatctccggtgatttcaggaaaaagatgctgaaggatggctttgtgatgtttcagttctccatttatctgcgacactgcccgagccgcgaaaatgctgaagtgcacattaaacgggtaaaaaacatgctcccacccaaaggccatgtaggcattttaagaataaccgataaacaatttggcgatatggaactgtttatggggaaagaacctgataaaaaggaaacaccatatctgcaactggaacttttttagcaatttacattgagacccatcttcagagattatcttcaacattaaacaaaaaaagtccataatcaggactttttttgtatttagcagcagctcattttttaattctaaatattggcataaaccactcaataacaaaactttgaacagaggtctgctgttaccaatatttcaaagatacaatttgaaagcaattcacaacgagacactatcatgatgcgaaagagttttggctgttaccaatatttcaaagatacaatttgaaagcaattcacaacgtgagtgaaaaaattatggccggcgtacctgctgttaccaatatttcaaagatacaatttgaaagcaattcacaacaaggaaatgcacaaaaaatagttgatgaatgctgttaccaatatttcaaagatacaatttgaaagcaattcacaaccagttattacacggccttataattttaaaggctgttaccaatatttcaaagatacaatttgaaagcaattcacaacgttgcccctgaattgcgggcgaagtatgcgctgttaccaatatttcaaagatacaatttgaaagcaattcacaactgtttgaaaggaaataattaagtcttggaagctgttaccaatatttcaaagatacaatttgaaagcaattcacaacacatacccacaacatgcggtatagttaatgctgttaccaatatttcaaagatacaatttgaaagcaattcacaactgaccaattagatggcagcactgcaagcatgctgttaccaatatttcaaagatacaatttgaaagcaattcacaacagacggaacaataggctggaaagttaataagctgttaccaatatttcaaagatacaatttgaaagcaattcacaacggtaattccaaaataagaagatacgttgtagctgttaccaatatttcaaagatacaatttgaaagcaattcacaaccgacatcggcctgcatagaccccgttgcagctgttaccaatatttcaaagatacaatttgaaagcaattcacaacaaaaactaaaactactaattatgaaaaagtgctgttaccaatatttcaaagatacaatttgaaagcaattcacaacagaagcgttaacggtgcaatatcccaattagctgttaccaatatttcaaagatacaatttgaaagcaattcacaacccaattgatatactactctattcaggaattgctgttaccaatatttcaaagatacaatttgaaagcaattcacaaccatatggggaattccccccatgtaaatccggctgttaccaatatttcaaagatacaatttgaaagcaattcacaactagttgatgaatctggcacattcggcagcagctgttaccaatatttcaaagatacaatttgaaagcaattcacaactgcatcaagtttttccacttcaaactccgggctgttaccaatatttcaaagatacaatttgaaagcaattcacaacggcgtttcgttgcaccgcactctttaaccgctgttaccaatatttcaaagatacaatttgaaagcaattcacaacgaataatgggcaacatcctgaacgattgcgctgttaccaatatttcaaagatacaatttgaaagcaattcacaacgccgtgtaaacatgtcgcaagtgggtggaagctgttaccaatatttcaaagatacaatttgaaagcaattcacaacacaaaacaattgcattatttcgcatagaatgctgttaccaatatttcaaagatacaatttgaaagcaattcacaacagataccctcctgctgttattgtgttttcgctgttaccaatatttcaaagatacaatttgaaagcaattcacaacacgccggcggtttttccttttttgtactctgctgttaccaatatttcaaagatacaatttgaaagcaattcacaacagcaacaaaaaaaaataaaattaataattgctgttaccaatatttcaaagatacaatttgaaagcaattcacaacaatatatggctaattttgcatcaatacgatgctgttaccaatatttcaaagatacaatttgaaagcaattcacaactcatagacgaattgataattaaaaacaagtgctgttaccaatatttcaaagatacaatttgaaagcaattcacaacgggcttcaaatgaagcgccaagaaaaaaagctgttaccaatatttcaaagatacaatttgaaagcaattcacaacaagtgcaatgttactataaattagcggaaggctgttaccaatatttcaaagatacaatttgaaagcaattcacaaccttcacgaagttcaatatacgctttcttttgctgttaccaatatttcaaagatacaatttgaaagcaattcacaacacggatacacccacggcctacgatttatttgctgttaccaatatttcaaagatacaatttgaaagcaattcacaacggtatcagataccagtggttaaaaaagcgggctgttaccaatatttcaaagatacaatttgaaagcaattcacaacagtaatgacaatttaaagcgaggaattaatgctgttaccaatatttcaaagatacaatttgaaagcaattcacaaccgagggttgggatgttgataacattagaaggctgttaccaatatttcaaagatacaatttgaaagcaattcacaaccagaaacaatcctcttgactgcctccgatagctgttaccaatatttcaaagatacaatttgaaagcaattcacaacaaatagttgtgtcgtttgtgtttcagggtgctgttaccaatatttcaaagatacaatttgaaagcaattcacaactacgacagatggattaaatggatgcaagcagctgttaccaatatttcaaagatacaatttgaaagcaattcacaaccagaaacaatcctcttgactgcctccgatagctgttaccaatatttcaaagatacaatttgaaagcaattcacaacacgggtgtggtactgcggaaacttttgtttgctgttaccaatatttcaaagatacaatttgaaagcaattcacaacatttagcttaatgtttccaacgtttatgtgctgttaccaatatttcaaagatacaatttgaaagcaattcacaactgctctacggactttaaaaataattgatggctgttaccaatatttcaaagatacaatttgaaagcaattcacaacaatatatggctaattttgcatcaatacgatgctgttaccaatatttcaaagatacaatttgaaagcaattcacaacttattactcggacagccggaaaatcagcaggctgttaccaatatttcaaagatacaatttgaaagcaattcacaacatgtgcagagatacccatcagtccgtagaagctgttaccaatatttcaaagatacaatttgaaagcaattcacaactgttttaactcctaaagaaaagtctggcgtgctgttaccaatatttcaaagatacaatttgaaagcaattcacaacgaacagcagtatcatgaagctcgtaaggcggctgttaccaatatttcaaagatacaatttgaaagcaattcacaactgaaactgtaaaaaatacaatgtatattatcaatacttgactgaaaagggggttggtaatgcatacaaatgaataacaatcagtttttttgccgccaagtaaaaccctgtaaaagttagttcctgattcaggatgaattaaataaatgtcgttacaatgagagagttaacaaagatacgcctaattggagatatttttctcataccattgatccaaagtactaagggacaaaaggtttcttgaccagaagttgtaaaaaaacttccatacagcaaaaactacaacaaaagaagctataaacagcaaaacaaaaatattgaaaaccaaggaaacagcatcaccataagctgcgacatcttccttatgacgctgactgtctgaacggatcccgtaagaactattcctagccctatccaaacttccaccaatatccgaaaagaggaatcctgcaatgcgcgataaaagattgccgcgcccaaatttgtggtatcttttttcctctaaaaacaaaggtactttgctggcgaagaaatacaatacgatacctgcaatgtagattggcattatgtaggggtagtcagcataagcttccatcattcctgcaactacaaaagctgcaataatgatccaccatgatccggtaaaagaacgtttcaacttctcattatacaagttcttcatatagttaaactggcggacaatatcaggatcatcaatatttaatcttgtattgatgtaatctaggccccttttgatgaattttgcatcgcgccccctgacaatggtatagaagttgttttcttcatcgtcttcatcctttatttctgcaagtctggcaaatattttggagagaataatttccgccctgatgttatgctcatgctggggaagatcgagaagaaccctattgcctgatgatggtctaatcttttcgttccaatgtgtataaatgatcatcaaaaccccaaatgccattaaccatataaacagaccagcacccacaaccattagtggtgagtcatagtagtttccaaggggttcgggcatttcgcgaaaaaaatatgaaatcaatattgccggaagaagcaaagacaaacccgcaggaattccgaaaactaattttttactcattttttacctgtttttagtcatttacaatttgattatttaatgaatatcagtttggtgaaataaatcatggttaaggtatattgtaggcgatttagtagttgttaccaatatgtcaaagatacaatttgaaagcaattcacaacgcgacgcctcctatgacagcccaaatgctagctgttaccaatatttcaaagatacaatttgaatttaatattaagcaaatgccaatataattagtctaagctttgttggacttttcaaagttgactttatacactttcgtcattatatttatagtattctcggggatgcgtccccgggaagccgtaaagcggtaattatctttgataatgaccgctttacccatgctctcaattaacaacacaaaacatttttccagattccaacaaaataaaaattaatatagaggattcatttaccatgataggaaatatttatttttttacataaacttattttgtcttctttgagcaatgaggcaaaccacagtccgtaaattcaatttgaatttgcggcctatgtcatttgcaaataccagtctttaatcaaaggatatgagcagttcatcatttaaagattgattcaaacaactaaaatggagtaatttgtagacataacaatacccaacaatgatcgtctgggcattttttttaacgcctttcaggcatttcggtactgttttgatttttatattaacttaaaacatcagttatgaaaacaacttttactctactattgctatttattatagcttcaggttccctggcgggaggaataattttagagcaggccaatattcaggaaacttctctcgatgtgaacagcgaacagatagtagctgaaattcacatggaatttgatgaacccgggaaagtagtggttcgttttgatgggttagcgatctcctctgtaggcgaccgcattttactggctgctagtaataccggaaattttggcatcaataatggacacacctcggtgcaagtagcagatgcaaacagcaatcaaaatagtttctcgcataccatggtttatgatgttgaagaaggtagccaaacttattacgcatcagttttccaaagttctgtacaaaacgatggaaatggggtggtctcagtttacggcagtctcacagtaaaattcattccaacaacatcacccgtaattatagaacaccgaaacattaatcaaacacatatagatgtaagcgaaacagttgcattggccgaagtgagtctaaatacaactgtagccgggcaggtaaaagttcgatttgatggaacggctttatcatcatatggagatgcactcttgctggcagccaatgacagaattgactggggagtaaataacgggcatgttaccgctcacgccaccagtgaaagtgtaacaagaagcaatttctcacacacaagagtatttgatatcaacgaaggagagcattccttttatgcgacaggaacacaaagcatcgttcataacaatggagacggaatggcatcaatttacggagcattaacagtagaattcactccacatagttatgagcatcaaaccatttaccatgaagatattactcttaccaatgcagacgtaagtgaagcattgcagattgcatcacaaattgatctggatgccattgctgatggcaaattgctggccaattttgatggcttcgcagtactatcgccgggagaccggatcattcttgcagccagtgaccgtccggactgggactctaatgaaggtaatgtttcattaaaagttgctgccggcagtcttaacacgcattccttctcccattccagattgtacaacattcaagaaggatccaattcatattatgctgtagtagataggtttattggtgaagccaatggttccgggctggtatctatttatggaagactaactctgacctatattcctgaaatcatcgaagagtgtctggaacccgatcaaagtcaaaacaaccctgcaggaggtgttatgttatcccataacatacccagatggcaggagttcatcccaacgttgaataaactgcgccgtgttgagttatatattgatcctgcaggaagtgcaggaggtctggatcttgaggttacaaacattaacaatgaagtattgggaacagcatcaattagtgaagagaatctcgtatacggatggaacgaattccatttagcagaggaggtcatactcatatcaggcaacacatacagaataaacttaactacaaccattgccgttacaaatccctccgacagacacttttggtatggatccaatacaggcgattacccggatgggctggcagatccacatgacgaaatgccgaatttttcttatgcgtttagaacatttggctgcatgattgacgtccccaatttcattcctcagaccaatgaagggttcattagaatatacccgaatccagcctctgaatacattagtatatcaggacttgctgaaccatctgaaataaaaat

SEQ ID NO: 1210 - DNA, 24362 bp, synthetic construct
  misc_feature 1..24362: note = Synthetic
  source 1..24362: mol_type = other DNA
tcgtctaattcggctttcaatgaagtaaaacgttctgcaaagttaaaatcatcttcttcatcaggtaaaccgacataacgtccgggcgttaatacataatccagttctgcgactttaccaatgggagttgatgcacaaaaaccgggaatatcttcgtaatttccgtttacatttctccaattgtggtaagtgcccgctatcttatcaatgtcttcaccggacaattcacgtgttctgcggttaatgaggtgccctaaatttcgagcatcaatgaacaaaatctctttgcttcgatcacgaaattttccgtttgttctgttgcggctcataaaccacaaagcagcaggaatttgtgtattcaggaataacttagcaggaagattcacaatgcagtcaattaatccggcttcaattaatttctttctgatttctccttcacccgaagttttagaagtcaacgctccttttgccaacactacacccgcttgtcctgttggtgagaggtgataaataaaatgttgtaaccacccgaaattagcatttccaatcggaggaactccatatttccaacgcccgtcttttcggagtaaatcacctccccaatcacttacattaaaagggggattggcaataatgtaatccactttcacatctttgtgtgcgttgtttagaaacgacccttcgttgttccattttacctgtgagctatcaattccacgaatggctaagttcatttttgccagacgccatgtcgtttgattactttcctgaccatagatggcaatatcatttacctttcctgcatgtgcgtccacaaatttcaaactttgaacgaacataccaccggaaccacagcacggatcgaaaacacggcctttatagggctcgagcatttctactaacaattcaacaacacttctcggtgtgtagaactgaccacctttctttccttcagcaagtgcgaattcgcccagaaaatattcaaaaacatgtccgagtacatctgcacttctggattttgcatctcctaaagcaatgttgccaatcatatcgataagttctcccaaactggtcggatccaaattttgacgggcatatactttcggtaaaacaccttttaaggaaccattttcagcttcaatagcgtccattgcgtcgtcaactatcttaccaatggttggttgttttgcactattttgtagaaacgaccaacgtgccgacggagggacaaaaaacacattttcagccttgtattcatcacgatcttcgggatcagcccccataccttcttccgctttgagcttttcatacaattcctcaaatgcatcggagatatatttcaagaagattaaccccagcacaatatgcttgtattcagccgcatcaatattcttgcgcagcttatcggctgttttccacaaggttttttccaatggttcttctgtcgtttgtttcttttttgccattctggtttttatcgcttttgaattaggtcaaatataatgaattgaagagaatttaggaatcaaaaatccccccccaacaaaaaaagctacctcatctgagatagcttttccgaaaaattatatgaaattaattagatcttcttgacgttaactgcattcaaaccttttcttccttcttcaatatcaaaagaaacttcgtctttttcagtgattttgtcactcaaccccgttacgtgtacgaagtattcttttcctgtttctgcatcaacaatgaaaccaaaaccttttgtttcgttgaagaattttacggtacctttattcattttgtatttattattttctacgaagataccgttctgagcgaaataacaatgaaaaaaaagcaaataattgaaaataaatttgttttcccgggtaaatgagccaaaaaagaacgatttatcgctccagtcgcatctcaacaatagagcgcttgaatccgaatttttcgcagatcggagcaagggaagaatccccctttagatgcagtgcgacatccccttttgcatgccgcaatacctgatcgatcatattgcgtgcaactcctttgtttctgaatttatccgaaaccgcgatgtacaccaatacattttccgccatgtaaccttccattcccgtctggttaacgatggctgctccgacaatctcaccgtgtgatttgttcacaatggtaaatccgccgaatgacaaacgttcttttgtggcgtactcaatagcttttcgaataaattctttgttgggctccattccttccaggtactcggaaagaaagtcgacaattttgtgcttctccatttgagaaggtctgttggtcgcattaaataacaaattctctgtaataatcccatctaaagtttgcatatcggagtagtatttgtatgtattaacaaacatctaaaaatcgtcttttcccgggatgggtttcgttagtggttgcaagatacacattatctaaagatattaacacattcaactgtagttattaaccaccaataaacatattaacaatctgaatgaatattaacaggaagtcattgaatatttaccgttattttctgtaaaatcccatctcatccacgtagttgaaaacagatggtgtgagcaggtaacgaacatcttttcccgcttcaatggatctccggatatagctggaggaaatgtgcattaccggcgcatctttgagaaaaacaaccgacggatgctggtgtagttcatttgtttcctgttcccggttttccatttcctgcaaggtaaaaacccgtggataaacaaaaatgcggtaattattcagtaaataatcgtaattgtaccatttgtgcaatgtgcgcaggttatcctctcccatcaacagggaaaattccgtttcggggtattgctcactcaacactgccagtgtttttgaggtatagcttggttgttccagcccgaattcgatatcactggcccgcagtttcggattgtcatcaactgcttctttgaccagcgccagccggtgatgatctgccaacaaggtctttttatctttgtgcggattgtggggtgaaacaacaaaccaaacctgatccagattggtgtgatccaccatgtaattggcaatgatcaaatgtccgacgtgaatcgggttgaacgagccaaaatacaatcctactttcatgcgtgaatgaatttctttaccagttgttttgcctcttcacatgctgtttccaggtgatcgttgagcagtatgacatcaaattggtctgcgtggcttaattccagtttcgcttttgccagccgtgtttgaattttttcttccgtttcggtagaacggtgacgcaaacgtttttccagatccgctacagtcggaggttgtacaaacactgccaacgcatgttttcccaatttctttttgaggttgagtccgccgacaacgtctacatcgaaaatcacaacgtgtccgtttttccagatgcgttccagttcggaaaccagggtaccgtaataattatccgtatacacttcctcccactccacaaacgctccttcttctatttttttgcggaatccttccacgccgatgaagtaataatctttgccatctgtttcgttgtgtcgtggtgctctgctgcatgcagaaatggaaaattcgagttctttcagatgggtcagcaaatggtgaacgatcgttgtttttccggctccggagggggcagaaaagatcacacatttacctgtatgctttaattcggtcattttacaaggtatttagtacctgttcttttattttttcgaggttgtctttcatgtccaccaccagtttctgcatttccgcgtggttgctcttgcttccgagcgtattgatttcccgtccgatttcctgggaaataaatcccagctttttaccggctcccggtgttttcatcgtttcaaggaaataatccaggtgattagccaggcgcattttttcttcagaaacatccagcttctcgatgtagtagaccagttcttgctccaggcggttttcgtcgtacccggacgccgcaatttcttccaatccttttcggatacgctcacgcacagtttcaatgcgttcctgttcgtatttgggaacttctgtcaataacgtacggatgccttcgatgcgttccgtaaattctttttccaacgcgattccttcctgtcgacggaattcgttgagtttaccacatgattccccgaccagtttcaatacggtttctttttcgccttcggacaattcttcccgttcgttgacaaaaatttccggcatgcgcaacaatactgacaggtaatcttcggttgtgttaccaatctcgtcgttgatagacttcaggtctttaaaatatgcttttgctaaatccgtattgatggaatacgttttggaatctcctgtgctgtcgaggttgattgtcagatcaatttttccccgctccagttgttccgtcacctgctttctggcaagtggctcgagttctttgtaatagttgtggattcgcgcgttcaaatccagtcctttgctattcagcgaccggacttcaacggaaatttttttactttcaaacgttccggaagcacgaccgaaacctgtcattgacatcagcatatctgcaattttcgccaaagctactaaaaaacacggtatttcaatcgtttttggctacaaacaccagagcacttttcactcttttattccgcatcacgctaatttctttcatgatttgcataaaaacaactcgtcaagacgctaaggaatctgcttttattctaacagtagtctgtcaatgagaaaatgaatgtttaattgacactaaatgaaaagaacagggattctgacggtgaatttttcatggcttctccgcgtttgatgatgtccattaattgtgcaacttcaataacagataacgggcttttagttcccagtgaacggtgttgctccaatttgtattcagctctttttattgcattgttaatcataaccttcaattttaatttcaattcacaagcaccatttacgggaagaattttcagatggttacattttttcaaaaaaatagtgttgataacatttttaaacgcatcgttaataaacaatatctcactaaaaatcaataacataaccatttattttcaaaattgaatttttcaacaattttatcagatttacgttccgtgaagggtgattctgccccggcgaacggtggcagcttcgctgaaaaggctgctgtttccgagctgtttgacgtgtaattcattaccagttcaaacagcaaacggaaacaaagcatatgaagtgaactaaaaccggcagacggttgaggcagccagcattaatccctccttggaatcaataaattcagtacgaataaaatcacaatcgctcccaacgccccggttaagataaaaccaatggttcctccaccgaaactcacgttcaacaaaccaagcaaccagtatcctactcctgctccgacaattcctacaataatgtttccgattaagcccaatccgcttcctttgtacaatgttccgcccagccatcctgctatggcgccaacaatcaatgtccagattactcccatgtttagttgttttaattggttaatacctcccaatttaacaacttaagaagtggtaaacaagtttttttagttattttaagattttcccgagcgcttatttcagcactttttctgtgactgctttattcttattggccaactggccacaagcggcatcaatgtcttttccgcgacttctgcgcacattaacaaccaatcctttgccttccagataagcggcaaattcatctgtttttttcgggtcggcacgttggaatgccgcgtcatcaatcgggttgtattcgatgatgttgattttacagggaacacagcgtgagaatgtcagtaattcacgggcatcttcgatggaatcgttgaaatctttgaagatgatgtattcgaatgtcacacgtgttccggttttttcatagaaatacgccaatgcttcggctaatgaatccaggttattggtatcgttgatctccatgattttactacgcttttcatcgttcgcagcgtgtaatgacaaagcgaggttgaatttcacctcgtcatcccctaattttttgatcattttggcgatccccgccgtagaaacggtaatgcgccgcggagacatgcccaatccttctttggaagtgatgatttccgtagaacgcaacatgtttttgtagttcagcaacggttctcccattcccatgtaaacaatgttcgacaatgggatgttgtaccgttgctccgcctgatttttcaggtacacgacctggtctacaatttctccggcagacaaattgcgcaacaatttcaagcgacctgtcgcacaaaacgtacacgacaagctgcatcctacctgtgatgaaatacaagcagtcatccgggaggaagtcggaatcaaaacaccttccacgactttcccctgctcaatttcaaaagcgcatttgatggttttatccgacgaaatctgctgatcggcaacagtaattccgtcaatgtaaaaatgagtttccaactgcgctctgagctctttactcaggctggacatttcatcaaacgcatgcgcatttttattccacaaccactcgtacacctgcttggcgcgaaaggcttgctgaccgaaagcgatcatttgagctttcagttcttccagcgataaattgcgaatgttgatcttgtccgtgttcatatttcggtacaaagatagggattttttatcctaaatgctccattgatagttaaatccactcacctgctgacttcgctctgaagcgacaattttccccgcatcggttcctgtttcaaattcgggaagtggcaatgcgtgttccattgctttccgggtgtaataactttccctggacggatggtcgggatagacgaggttataagctcccgctacagtctgatcttccagcagcagtttcataaatttcaaaatatcctgtttgtgcaccaggttgaccggtttctgtccgtcagcaattcctgttctacccgacaggctgaataccggatgccggtccggtccgatcaagcctcccaatcgcaggatggttgttcgtcccgggaattttgtgagcaattcctgttccatccggtaataaacggaacctgtgtccacctctgtacagcattcagcaacagtcccctgctctgcctggtaaacgcctattgtagaagtaaacaccacacggcattcttctggtagttttgcgtgcaactcatttacaaaatgtagcagcttcgattgctgtactttgtctttgggtagtgttgctgtaatgaagagaacatccagtgcttcgatgaatgcttccggaaggtgatctccaaattcaaagcggaaccgggtttgaaattcacctgtctgctcacttcgggtggttgaaacaaccatcttattccggtctgctgacaatgtgttgacgagatcgttccccagccatccggcaccaataactccgatttttttcatttgctgctccattctgattaaatttttacaacaaaatgttctttccgctgacctggtcgcttcagaagcattcccattcgaaacaaatctacagaaacgtggaaccgctcatcctttcgaagctgttcccatgctgcaaacatggaatcactccagcgaatatcgtccagaatcaggaaggtttcatcatgaatggaagattccagcagatcgacatatcgcaataatgcgataccgtcatgatgcccgtcaatgaagatcaaatcataggatttcagttcattttcattcaggaacgtatcaaatgttgtgttgacgagggtaatcgtgtctgtttttgtttgttggaaattttcctgtgcaatttttgctgtttccgggcatgcttccactgttgtaatggttgcatccgggtttccttttgcaaagtgaatggttccgattcccagagaggttccaaattccagcatattctccggacggtaaaatcgggccagttggtaaaacagacgtgcatacttccctttgctggaactgatccggaggatgtcgcttatttttcgttctttttttaaggttttggatcctgctccgaaatctgccacctgaatgactctctggtctttcgataattgattcagcaaggagttgacctgtagttgatcttctttttcaacaggggttcgaaggcattcatccaccagtttataaataaaaggcgaatgagttccatgccttcctttggctttccagcgatattttatatattcgaacacaaaattcacggtacaaagtaaatcaattgcgattaagaatcagttatgaacagcgaagaaaaaataaatggccagcgtgaacaggtgctgaacgaccaatcaaaagtggtattgtttgctccctgcagaatcggggaaggaattctgcaattgacttcggaggaatggaacacgaccatccgggcgttccaggcaagcaatgcttcaccgacgtatttcattcctgcatccggctccggttcgcgcatgtttgcttttctgttcgatttcttaaatcagccgaacacatccgatattggtgctgttgaacggttcatgaaccacatccaggaatttgcattttatcagctgcttccgaatgatttgaagttaaaaatccgtgaaaatgcacttgatgcggaagaattagccaatttcttactgggtcgttcgggactggattttggaaatttaccgaaaggattgattccgtttcactacaatgaaccgtttgttttgaatccattccaggaacatgtattgcaaggaacacgcttatccaacggaagagcaaaatttcattttacgattcaacctgaatttgaagaaaaaatcaaagcaagcatcatgaatctggaagggctcaccggtaagcaatatgcggtctcctactccacgcaatcgaaagaaacggatgcctatgcttttgacgaaaaaggagcaattgcattggatgaaggaaaagagattcgtcgtcctgccgggcacggagcgctgcttgaaaacctgaatgaactggacgaagaactgattttcattaagaacatcgacaatgtgcagcatttcaattcctcgaattattctatggaaacctggtctgtactgggtggtttactgcaaaaattccgtaccgcattaagtacgctgtcacgcaatccggataaagcaaagctcgttgaactgaatgaaaaatatcagttcctctcacctgcggagatcaatgctgtgcggaccaatgaagagctgattcagttaatcaatcgtccggtacgtgtgtgcggaatggttcgcaacgagggacagccagggggaggtccgttttgggtagatgatcatggtgtcatttccaaacaaattgtagaaaaagcacaaatttcccaccacggagaacaatttcgtctgatggtgaaaagcacgcacttcaacccggtaatgattgcgctttgtccgcgggatctgcaaaatgaaaaagtggatttaactgctttccgcgacaattcgaagtatttcattgtcaataaaacgcagaagggacaagaaattaaatacatggaactccctggtttgtggaacggtggtatggcaaagtggaacacattgtttgttgaaatttctcaaaagacattcagccctgtaaaaacggtattggatttattggaagaagggcatcgggggtaagaacgcagtctatcatttcgtaaaagctacctttcagacataaaaaaggcgagttgccccgccttaaatgttttcacaacggaataatccttattgtgatttgctttcaagttcagcaaaagtactatttttttcaaaaaaatcttaggtatttatacgggaaatgattgtagtcaaaaaacgtatggttaaaatcgttatcttcatggtgtaaaatttcactgaaaatttcacttttcaacacgtaaaacgattatgaaaaagatattgggattggatttgggaactaactcaattggttgggctttaattcaacaggattttgataaaaaacaaggaagcatacttggaatggggagtcggattattccaatgagtcaagatatattgggtgagtttggaaaaggtaattccgtttcacaaactgctgaaagaacaggatacagaagcacccgacgattaagagaaagacatctacttcgccgagaaaggttacacagagtattgaatgttttgaatgttttgcctgaacattatgctcatcaaattgattttgaaaaaaggtttggacaattcaaagcagaatcagaacctaaattagcctacaacaataaacaatttatttttaaaacgtcttttgaagagatgctggaagatttcaaaaaacatcaaccagaattattaacaggagaaaacggaaaagaaaaattagtcccttacgattggacgatttattatttgcgcaaaaaagcattgactcagcaaataggcaaacatgagcttgcctggattatcctgaactttaatcaaaaaaggggatattatcagttgagaggagaagaggaggaagaaaatccaaacaagttagttgagttttattcattgaaaattgttgatgtgatacctgatgaagaatccaataaaaaaggagaaacatggtattctttaatcttagaaaatggttggatatatcgacgttcaagcaaaacatcattggatgactggaaaggcaaaacgagggattttattgtaacaactgatctgaatgataatggcacaataaaaacagataaagaaggaaatgagaaacgtagtttcagagctcccggtgaaaacgattggggattggtaaaaaagaaaacggaacaagaaattgaacaatctcataaaacagtcggaacatatatttacgattctttgcttcaaaatccgaaacaaaaaatcaaaggaaaattagtccgtaccattgaacgtaaattttacaaagaggaattaacattaattttaaaaaagcaaattgagctacaacctgaattgttttcggaaaatgcatatactgattgtatcagggaactctatcgcaataacgaggcgcatcagttaacattaagtaaaaaagattttcttcatttatttttaaatgatattattttctaccaaaggcctttacgaagtcaaaaatcatccattgggaattgtaccctggaatatcgaaactatcaaattgatggaattgagaaaagacaatatataaaaactattccaaaatcaaacccctattatcaggagtttagagtttggcagtggctgtataatctgaaactatacagaaatgcagatgacatcgaggtgacgaacgaatttattaaagatgaaagagatagagagcatctgtttgattttctgatgttacaaaaagaagttgatcataccgacatcctaaaatatttcttcaaagagttaaaaggtaaagtactaacaaatgagattggtaaatatcgttggaattatgtttatgattcggataaaaaggaatctaaaaaatacccgatgaatgaaacaggttatgaaatcaataggagattaagtaaaatagaatctactcctattaattttttggatagagaaacggaacaaaaattgtggcacattatctactctgtgacagataaaaaagaatatgaaagtgctttaaaaacgtttgcagaaaaacagcatttagatgcgacatcttttgttgaacatttcagaaaattccctccttttaaaagtgattatggaacctattccgaaaaagcaatcaaaaaattacttcccttattacgcataggaaaatactgggattttaattccattgacaacaaaacgaaaaacagaattgataacatcattaattcaattgatgatgaaggaatcagattacttgttagggaaaaagctgaaaaacacaaattagaatcagaagctgacttccagggattacctctctggttagctcaatatatcgtgtatgacagacattcggaagcagatattgcaggcaaatggagttctgtaacggatttggaaaaatttcttagtgactttaagcaacattctttacgaaaccctattgttgaacaggttgtcaccgaaacacttcgcgttgttaaagatatctggcaacattatgggaatggtgtagaaaatttctttgatgaaattcatattgaactggggcgggaaatgaaaaatacagcagatcaacgtaaacgattaaccaatatcataactgaaaatgagaacacaaatattcgtatcaaagcgttgttaattgaaatgatgaacgatactacagttgaaaatgttcgtccacactctccaatgcaacaggagattttgaaaatctatgaagatggggttttaaattcaaacatagaaattgaagaggaatatttgaaaatcagtaaaaaagcagaacccaccaagtccgaattacaacggtacaaactatggttagaacaaaaataccgatccccttataccgggcaaatcatacctttaaataaactttttacacacgaatatgaaatcgaacacattatccctcaaagcaggttctttgacgatagcttcagtaataaagtgatttgtgagtctgctgtaaacaaattaaaagataatcagttagggctggaattcattaaaaaccattacggtcaaaaggtttctgtcggacttggaaaagaaataccgattttcacggaagatcagtacagggattttatcaaagaaaattattcgaaaaacagaagtaagcggaacaaacttttgttagaagatattcctgaaaaaatgattgaacggcaattgaatgatacgcgatacatcagtaaatttatctctaatgccttgtcaaacatcgtcagaagtaaaaaagatgatgacggaataaattctaaaaatgtcatcccattaaacggaaaaatcacttctgaattaaaacaagactggggattgaacgatgtatggaatgagttgattttaccccgtttcgagagaatgaatacattaacaaatactgatttatacaccacttataacgagaaatatcaaaagtttttgccgacggttccttttgaacacagcaaaggatttcaaaagaaaagaattgatcacaggcatcatgctttagatgctttggttattgcctgtgctaccagagatcatgtcaatttgttaaataatgaatctgcaaaatcagagatgaaacgatatgatttacagaataaattacgcaaaaaagaaccgtattttaatttgaaagaaaacaaagaaaaagacgcatttaaagaatttttcaagccttgggaaacgttcactgaagacacaaaaaaatcgttagaaacaatcattaccagtttcaaacaaaatattcgcgtcatcaataaggctactaataaatatgaaaaatgggttgagaaaaacggggaaaagaaaaaggaattggttgagcagaaaggagtaaattgggcgattcgaaagtccatgcataaggatactgtttccggaaaaatagaattgcataggattaaagttccaaaaggcaaaattttaacagcaaccagaaaaagtattgactcttcatttactcaaaaaacaattgagtcaataacagatacaggaattcagaaaatccttcaaaattatttgttaagtaaaggtggaaattccgaactggcattttctcctgaggggattgaagacctgaatcgaaatattgcaaaatacaacaataataagccacaccaacccatttataaagtcagaatttttgaaataggaagtaaattttctttaggacaaacaggaaataaaaaagataaatatgtagaagcggcaaaagggactaatttatttttcgctgtttatcaagatgaaaacggcaaaagaaattatgctaccattccgttaaacgaagtaatagaaagacagaaacaaggactatcctctgttcctgagacaaatgataaaggaaataaattactgttttctctctctccaaatgatttggtgtatgtcccaaatgaagatgaaaatatttctactgttgattttaaccatttgacgaaggaacaaacggaaagaatttataaaatggtgagtagtacggggagtaagtgtcattttattcaatcatcaatatcatctttaataaggaattatgatgctaaaagtaaaataggagaaataggaagtttaaacaaacaagaaacaacattagataatctaattagaataaaggaaagatgtattaaactcaaagttgacagattaggtaccattttaaaagcttaaaaatgaacggaattattatttaccaaactaacgacaataaaacacaggttgaagtccgttttgatggaaatactgttttttgttcggttgaggaaatttacctgtatcccagtattgaaaaataggctgcacatttattgtatttcattatcaaaaatcatcctttttctgatggaaacaaacgaattggaacatttttgtttatatggtttttagagaaaaataaacatcgttttaaacaaagcggagaattgacaatcaatgacaatgtgttagtggcactggctttattgatagctcaaagtaatccggcagaaaaagcattgatgacaaacctaataatgcaactcattaaaaatcaacaggatttgtaaccttttcaattaaactcagtaaaaacggatacatcacctgaaaaaccgttttactatggtaaagagaaccctacacttcagcaatcccgctcacttgagtgtgaaaaatcgtcaattgattgtagaattaaaaaatgaagagcgattgacgcacactgttcctattgaagatattggagtagtaattttagaacatccgcaaattaccattacgtctgttttaatggaggaattgttagcggaaaaagttgcactaatcagctgcaatagtcaatacatgcccagcggaatgttcttaccgttcgatgccaatacagaacaaacagcccgcatgagaacacaggtagaatcaagtctcccgttaaaaaaacagttgtggcagcagaccgttcgtcaaaaaatacagaatcaggccaacctcctccgaaaagcgggactgaacgatgaacgactgctcaatctcagagaaaaagtactgagcggtgacaccactaattgtgaagggcaagccgcgtcttattactggggacagttatacggaagtcattttatgcgatcaagggagcgaacatcacccaatgcacaattaaactacggatatgcaatccttcgttcagttgttgcacgggcactggctgcatcaggaatgcatccgtcattcggtatttttcatcgcaacaaatacaatgcattttgcctggcagatgacatcatggaaccttaccggccttttgtagattggattgttttaaacctgctacagcaatcagaaacagcagaattaacccgcgatcagaaaatcgagttgctaaagcttccgcaaatggacatgctcatcaatgacatcaagcgaccgctgtttcatgccgtgagtatcacgacggcaggactctacaaatgttacgatggtgaatcccggaaaatcccatatccggagtttgaataaaatcgtatgaaatggatacttcacgttttaatgcatacagaactatgtgggtaatggttttatttgatttgccgacggaaacgaaaaaagagcggagagatgcctctcaattccgtaaaaaactattggaaagtggttttatgatgttccagttttctatttatatgcgtttttgtcaaagtatggaaaatgcggaaatgcataccaaacgggtcaaaaatatacttcctgaaaagggaaaagtcggtatttttgctattaccgataaacaatttagccgaatggaaatttttcatggcgtaaaaaaacaagaaaccaatccaccagcccaacaactgacactgttttgaacaggaaaacagaaatgaataatgaatcatttttttaagccaaaaaagggaaaagtcctgtttttttatttctaaaacaggactaaatctcttgctatttctacgattcagcgcagaacgttgtaattcatccgtaaaaataaggaacttgaaagcaaatcacaacggtttaactctcgcttcttgttctaaagaagttgtaattcatccgtaaaaataaggaacttgaaagcaaatcacaacaagtttggaaggtgttttttcctcttctgtgttgtaattcatccgtaaaaataaggaacttgaaagcaaatcacaacgtatctaacatttgactttattatgaaaaggttgtaattcatccgtaaaaataaggaacttgaaagcaaatcacaacttccgtttctgtttgctgatagggggaaaagttgtaattcatccgtaaaaataaggaacttgaaagcaaatcacaacagattagaataacggctataattatgattggttgtaattcatccgtaaaaataaggaacttgaaagcaaatcacaacatccgcaggatgaaaccttttttacattgggttgtaattcatccgtaaaaataaggaacttgaaagcaaatcacaacaaacgacaattgaatcagatcaccgaaacggttgtaattcatccgtaaaaataaggaacttgaaagcaaatcacaacataaaaccatttttgccccatcaacactggttgtaattcatccgtaaaaataaggaacttgaaagcaaatcacaactcaagttcctttcttaatcttttcagtttagttgtaattcatccgtaaaaataaggaacttgaaagcaaatcacaactcggattcctgcgtattttttagtgtaaggttgtaattcatccgtaaaaataaggaacttgaaagcaaatcacaacgaatttgtacaacttagcgaatcggtgcgagttgtaattcatccgtaaaaataaggaacttgaaagcaaatcacaacagttttgaaaagataaagacagacaagttggttgtaattcatccgtaaaaataaggaacttgaaagcaaatcacaacatgagtttaaaagttaaaaaatgcaagaatgttgtaattcatccgtaaaaataaggaacttgaaagcaaatcacaacttatgccggtgatattaaacagtaattactgttgtaattcatccgtaaaaataaggaacttgaaagcaaatcacaacaagacaacagcaagtcgttgtccgttgaggttgtaattcatccgtaaaaataaagaactttggtcaaacagcaaaccatccaactgatcgggaaggatcctcttttgtcaatcgaaccaattttatgcatcaaccaacaagtctgtaaatccatgtatccgtagcaaaaagttattccttcatttatcggcaactttcctcactaacggtatgcaacagcattattcgttaaaccaggtatttttgatggtgtgacgcaccaggtagtattcttcttcataccaataaaagaacgccacgcaattattcacaccgtcaatgatcatctcgtattcattccccgcatcactggtaaccgtcatcgtgtatttcagttcttcctcgttgtagtcccattttttgatgtagtaatcagatgaaatggtagctgtcgtgtggcgaaaggtcgtcagttccttattgaatacaaacagcgtccctccttcatctgtcgaatacacgtcccatttctccccttcattgtcccagacagcattctgccggaaatttgttgaaatattgagttgagcaattacaccattcaccagcaggaatgaaaaaataaacaagattgttttcatgacttcaattttcagcaaatgtcgcagataaaagtaaatggtgaaatacggcagatgtagtattttcacttttcattcactgaattattttatactttagttctcaaatcaaaccgcaacatgaacaaagagttactctgccaaatctattcccacccgttaatcggagagactgagcttgaaaaaatcattcaggctcaccggaaagtttcgttcaaaaaaggagcattcatcctggaagaaggtgaggtttctaacagttacctcatcctggaaaatggtctgatgcgttcatttgctcacaactacaatggcactgatatcacaaccgacttcttctccaaccaggagattgtcatcgaggttctttccctgtttcagcgaattccgtcccgggaaaatatccgggcactgacggattgtgactgctgggaaatcaaatttgacacattccaggaattgtttcattccattcccggtttttcagaatggggaaggttgtggatgaccaatcgtttgtttcatttcaaacaacgttccgtagagatggtaactatttccgccaaagacaggtacctgcaattgattaaggaaaaaccgcaaatcgttttgcaatcaccgctgaaatacattgcaggctacctgggcattacagatacttctttcagcagaatccgaaaggagatttcacaggaacattagaattcttgccataagacaagttcggctgaacatttatcatttacatttgtttttacgtttcactttaaaaataaacacatgaataacaatgtaatatgttggtttgaaatctacgttaaagatatcaatcgcgcgaaaaagttctacagcgacgttttagcaacaacgtttagtgatatggaagccccgggagatgctccgcaagaaatgaaaatggcctgtttcaataccgccgacccaaccgaccagaacagtgtgtccggcgcattgattgaaatgccgggaacaaaagaaggagatggcgcctgtgtcaataccattgtttattttccttgccgggactgcagcgtagaagaaagcagggttgagaaagcgggcggaaaggttgtgaatccgaaaatgtccatcggggaacacggtttctgcagtatctgcattgatacggaaggaaattcattcggattgtactccatgcaataactaaaattgataacttaacaataaaaacaaatgcaattaaatccttacttgaattttgacggaaatgcagaggaagcattccggttctaccaaaccgtatttggcggggaagtatttatccagaaaatgagccaggctccgggggcagaaaatttacccgaaaatgaaaaaaacagagccatgcacgttgctattacactccgtaacggacaacacctgatggcttctgactgcctgccaagcgcaggacatgtactgaatgtcggaaacaacaattacatttccattacaccggacagccgggaagaagcagaccggattttcaacggattatctgccggtggaaaaatcgaaatgccgatggcagacatgttctggggcgattatttcggatcatttacagacaaattcggtgtgtgctggatgatcaactataccaatccgaaatagccacatggaaaaactgattgcacaagcaaaaatacaggttcaaaaacccatccgtgacgtatttgaaaacattgtcaatccggataaaatgacacagtattttattggtagcagcacggggcgaatggaggaaaaagcagaattgacctgggtatttccggagttcgatgaacaatgtcctgtgactgttacaacaattattccacaccagttgattgaattcaagtgggatcccgaaacaattgttcgcatcattctgaccgaacaggcagacaaaagtaccgttgtgaaagtaatggaagacgggaagtcaaattcggaggaaggattgaaatggtttgggggaaatacagagggatgggccaactttctcgcctgtctgaaagcattttctgaacacggtatcaacctgcgaaaaggtgcatttgattttttgaaatcttaacatgaaaaaaattctgctcattctgtctattgctgctgcaaactacggtttttcgcagttgccattcccttcttttctgcaaggaacctggaaaatggaagggcttcaggtctatgaacgttgggatcaactcaacgaccatacattgaagggggtttcctataaactttctgagaacggaatggaagtttccgaatacatcgaaataagtggtaataaagggaaaattcagtataccgccagtgtcatcggtcaaaataacggcgcaggaatcccgtttcgactggtgcaggcagacagcctgtttgtgtttgaaaacctgaaacatgatttcccgaacagaattgtctacaaacgtatctctgataacctgttaaacgtcactgtttccggcaacaacggaaatatgttcagttatgagttacacagagaaacaaccggaaagaacgtagaaaataacacatccaatccgaactatgatgccgcactggcaatacaatcaggtgcagacgagtatggaatgaaaccgtacgttttcgttattctgaaaacaggaagcaatccttccgtgaatgacaaatcagaaatcagtaaacacttcagaggccatctcgacaacattaaccgcctggtagccgaagaaaagatggttattgcaggtccgatgggtaaaaatgataaaaattacaggggaattttcattctatccaatgtgaaagacctggaagaagcgcgggagctgctccaaaccgaccctgccatcaaagctggtttgcttgatgttgaactatacgactggtacggatccgcagcattaccggaatacctcccctactcggacaaagtctggaaatcaaaaccctgacaccgattcacctatgcatttgaacgaataaacaacagtatggagaactacaacaccgttgacgaatacattgcaaaggaacctcaggaccgacagcaattgctggaacttgttcgtgtgacaatccgggagacagcacccgaagcggaagaatatatttcgtatggaatgccggcttacaaactcaataaaaagcccctggtatattttgcagtattcaaacaccacattggtttttatgcgactcccaccgggcactcgcaatttgccgatgaactttcaaaatacaaacagggaaaaggatctgttcagtttccgattgatcaaccaatacctgttgatctgatcaaacgaatcgttgcattcagagcgcaggaaaataaaactaaataatcgtatgagtaaagacattcaacaatatcacgaccaacagatgccggaagacaaagtcatttgtgaattgttgtacaagcacatctgtcaacaccttgctgctgctgagcgaaaagtctggcatgcgcacccggtatggttcctggacggaaatccggttgtcggttacagtaagcagaaagcaggaatacgactgatgttctggagcggagcagatttcgatgaagacaaactggcaatacggggagaaaaatttaaagacgcatctatcttttaccgttcggcaacggaaattaacccggatgatatccggcgttggctggagaaagcacaggttatacagtgggattataaaaatttagtgaagcgaaaaggagtattgatacgcattgaaaatcaggcatgaaaacaaaacggtatatcgctttattgcgcgggattaatgtaggaggaaatcacaaagtacccatgtcacaattgtccgaagcgatgggacaactcggtttttcaaacattctcaccctactgaatacaggcaatgtaatctttgaagcacccgaaaaaaatgcatcggaagctgtgattgaaagacacttacaggacgttttcggatttcccatcccggtgatcttgagaacgtttgacgaactctcagaactggtagaaaccgatccgtttaaagggattgcagtcacaaaagatacccgattgtatgtgacgtttttgaaaagtaaaccaacaatgcaacttccacttccgtatatttctgcagatgaatcatttcagatcatttttgtcagtaatacagctgtcctgagcgtcctggatctttccatcggaaagacagtaaagggaatggatgatctggagaaattgttcggaaaagaagtcacaacacgtaattggaatacagttgttaaactggcaaataaataaaacagcatgaatacaccatttaaaccaataggttatacatctgtctccccttacttcattgtagaggacgcacaacgtttttatggagctgatgcgacacattttcgatgcacaggagttgagaacataccaccgtccatccgggaaaatcatgcatgcagaacttcaaattgattattcggttattatgctggcggatgcaacggaaacttatcctgcagaaaccatcgtgatgcatgtctatgttccggatacggatgctgtctttcaaaaagcgattgtggcaggatgtgaagcaattgacgttccgaaatcacaggaaggagatccggacaggaggggaacatttaaagattttgcaggaaatctgcggtctgtgggaacacaaatgaacgacagcaacttataaatcaacaaaataccgataaatctatgtattttttgttcggtttccctacctttgttagggtatacctgatagaaaaaacgaaataacaactaaaagtgattgcttatgaaaattataaaaagaatcgttatcgcattgctaattatcattgcgattccgttgattgtagcactttttgttccacgggactttaaaagtgagaaaagcattgtaatcaataaaccggtaacggaagtatttgactatgttaaacacgttaaaaaccaggacaatttcggtatctggcagctttcagacccggatatgaaaaaaagttacgaaggaacagacggaacagtcggcttcgtctatcattgggacagtgagtctatgggaaaaggttctcaaaaaatcacggcaatcgaagacggaaaacgggtcgattttgaactggatttcggattcggagacccggcaaaagcgtatttcattacccgtgaaaaaagtaccgatcaaaccaatgtaacatggggaattacaggacgtaccccctaccccttcaatttcatgagcctgttctacgacatgggaaatgactttgaacaaggcttgcaaaacctgaagaaagagctggaaaaataaacaaccaatggcggaaataaaaaccaaacaacacgaagcaaatgttacggatttcatcctgtcatttgcagaaacggagcaaaaacaaaaagacagtttcgaactggtaaaaatcatgcaggaatataccggattcgaacctaaaatgtggggaccatccatcatcgggtttggtatgtaccattataaatctgatcgcagcaagcaggaaggcgactggccgttggtcggattctctccccgcaaagcagctatttcattgtatgtatacatgggaacaccggagcaggataagttattacaggaatttggaaaattcaagatgggaaaaggatgtatctatgttaaaaagttatccgacatcaatatagaagtcctcaagaaaatgatgggtgaaaccattacagcacttcgggaaaaatacggaaattaatatcattcagccatgccaactaatcatcaatggacggaagaagtcgcaattttatcggcgatcatagataaaacaccactggacaaaaccaccaaatgggggtcggatgtgtatacctataatggtaaaaatgtggtaagttgcggaggattcaaaaacttttttaccctttggttttacaatggtgtgtttctggaagatccgtataaagtcttgatcagtgcttctgagggacaaacaaaatcattgcgtcagtggcggtttacttcgaaagaggaaattgatgagaaaaagattctcgcctacattcacgaagccatcgaaacagagaaaaaaggattaaaaataaaaccggcgaagttcattgctgttccaccaccatccttactcagtgatgcgttgaaaaatgacaaagcctttcagaaagcatttgaactgctcacgcccggaaagcaaaaagaatacattttatacctgaatgaagccaaacaggaagcaaccaaagtgaaacggctggaaaaaattacgccgttgatctttcagggaatggggttaaatgataaatacaaataaatcatcgagtgatgaaagtactggcaattgaaatcaaatgggccgttatctttgtggtagtatccttgctttggatggtattggaaaaagtgtgcgggctgcacggaccttacattgattaccacctgtaccttaccaacctgtttgccattccggcaatc

SEQ ID NO: 1211 - DNA, 24362 bp, synthetic construct
  source 1..24362: mol_type = other DNA
  misc_feature 1..24362: note = Synthetic
aaggatgccgttcccatcggggctaggggttttgtctctattttcaacttttgtcaaacttcaatatttttaacatcttcagtatttcgttaattataattattgaagaggttaagaaagccataaacattacaattaggaaaaagtaaaagctggaaattaaactttcactaaataaatcatagacaaaataaagtgaaaaaaataagttgatgattagaattgtaattaggaagtaacctattgataatttggctttatgattatgaatttttggaaatttaagtaaaagaaaagaatttacaattaaataaaagcctgttaaataatattcagctccgagattaattctatgaccacttgcaaaaattatgaccagtagaaaaaagaaagtaaaaaatagaatcacagaatatattatcgatgctattttatattttttatttgctgtaatcattttattaccctatccaatcaaatccaaaaattcctgttcatcaagaatcgtaatcgtcccaatatcctgtgcttttttcagtttgcttccggctttttctccaaccaccagataattcagatttttagaaaccgcagaaatattctttccgccgtgtttttctaccatttcttccgcagattctctggtaaataatgataattttccggtaaagagaaaagtttttccttctaaagcgttggataaaacttcatttgtattttcgcctttttccagctgaacaccgtaagattttaaccgttccaacatcaaaatgttttcaggattattgaaaaaatcaacgatactcaccgcaattttcatcccgatatcttccacctgacacaattcttctgcagtcgcttttttcaaatcatcaatcgtgttgaagttcttcaccaatttcttcgcaaccgtttctccaacgtgcttgatgccaattccaaacaacactttttcaaacggaatttctttcgatttttcaatgccatcaatgatattctgagccgatttttccgccattctttccaggggaagaatctgttctttcgttaaagcataaaaatctgcaggattttcaattaatcgggcattataaagctgttcgatggtttcacttcccagattatcaatattcaaagcctttcgggaaacgtaatgaatcattctcccgaccacctgaggcggacagtgcaaatcattcggacaaaaatgaatagcctggtcttcaagttttatcagttcagttccgcattccggacagtttttgatgtactcgatttctctgctttcagatgttcttttctcttcgtttacgccaacgattttcgggataatttcgccacctttttctacataaacgaaatcgtgttcgtgcaaaccgagttttttaataatatcttcattgtgaagagaagctcgtttgacagtagttcctgctaataaaacaggtttcagattcgcaacaggcgtaatcgctcccgttctcccgacttggtatgttactttttcaagttcggtctctactttttcagctttaaatttgtatgccatcgcccaacgtggagattttgctgtgtatccaagctgtctctgttgttttaaagaattgactttcaaaacgattccatcgatttcaaaaggcagattatgtctttctatgtcccagaagttgatgaattcttttatttcatctaaatttttgcagagttttgcctgctctgaaattgtgaatccccagtcgtgagcttgatgaagaagttcccaatgactttctgccggaacttcctgcgaaacaaactgatacaaaactgatgacaatctgcgttttctaacttcaccgctgtcctgcattttcaaacttccgcttgctgtatttcttgggttcataaagaggtcaagaccttcttcctcacgctgtttgttgattttatcgaaattttttctcgtcagataaatttctccacgcataaaaaaacgttcaggaaaatcgccagtcaattttaccggaatatctgaaatggttttcacattggaagtaatttcgtcgccctgaaaaccgtcgccacgcgtgactgcctgaaccagttttccgttttcatataaaatagaaatcgaggcaccgtcgtattttaattcagcaacaaattccacaggctcatcgatggttttaatgatgcgtttttcccaatctgccaggtcatcaaaatcgtaagaattatctaaagagtacattctgaactgatgctgaatggtcgggaaaatcttcgtaacaccgccaccaacacgcacggtcggagaattgtcatcgtgaaattccggatgtttggcttccagatcctgaagttcttttaataataaatcaaattcaaggtcagagatgctcggcttatccatcagataatagttttcattatgctggttgagttctttacggagctgttctatcttttgctgaatgttttcggacatcgggaagttcaatttttacaaaagtaattaatgaaaactaaaatttgattatcttaaactatctttttaaagaaataaatactggattcaaccgctgattttttttgaaatcattatctttatcggaatcaaataaaaagatatgaagcgaaacactttgttcacgatgtctgcagttttctttgcagtccaattttctaacgctcaaaccaaatcaacagaaaaactcaatccgattgtcgaaagttttgtcaacgaggccaacaacaattcccaactcgaggatatggcctacgaacttttggacggcatcggaccaagattggtcggaacacccgaaatgctttctgccaataattacaccgccgataaactgaaatcttggggcatcgaagcaaaccttcagcaatttggaacgtggaaaggctggcaacgtggaacgacgcatgtggatatggttttcccaagaactaaaaccttgtcagcaacgcaattggcctggagtccatcaaccaaaaaagcagtcgaagcggaagtcataattcttcccaaagtgacttccaaagccgagtttgacaaatggttaccatcagtaaaaggaaaaattgttttgatggcgcaatatcagaaaattggccgttccgatgagcaaatcaaggaatttgcaacgccggaattatacgacaaacttaaagccgaaaaacaacaggcgaccaaagattttcaagaatttataaaagcgataggttacgataacaatactttgccagaagctttggaaaaagcaggtgcatcgggcatcgcgatttccaactggacgggaattatgagcaccaaccgtgtttttggtgctaagaccaaaaagattccaatgtttgatatcgatttggaagattacggaatgctttacagaatggcggaaaaaggtgcgaaaccgagaatcaaaatcgatgctcagtctaaagtgcttccagaagcgaaatccttcaacaccatcggaatcatcaaaggaaaagagaaaccaaacgaatatgtcattctttctgcgcacctggattcttgggacggcgcgcaaggtgcgacggacaacggaacgggaactttgacaatgctcgaaacaatgagaatcctaaaaaaatattatccaaataataaacggaccatcatcgtcggactttggggaagcgaggagcaaggtctgaacggttcacgtggttttgtggcagacaatcctgaaatcatcaaaggcgtacaagcggttttcaatcaagacaacggaacgggtagagtggtggacatcagcgggcaaggtttcaaagactcttacgcgtacatcggaaaatggctggatgcagttcctaaaaaagtgaaagacaacatcaaaaccaacttccctggaatgcctggtggaggcggttccgaccacgcttctttcgtttcggctggcgttccaggattctctttgagttcgctgaactggggctatttcggttacacttggcacacgaccaaagacacttatgacaaaattgtttttgatgaattgaagaacaatgtgattctgacatccactttagcttatatggcttccgaagacccagaattcacaagccgtgaaaaaagagtgatgccaaacgacgaaaaaggcgaaccaatgaaatggccagttgcacgcgagccgaaaagaacgagcaacgacgaataataatttccaattgtgctaagctgaccttttaacgaagttaaactttgtgccttaaaatcataagttttatatgatgaaatcttagtgcctttgcgttaaattttaattctcaataatattaaaaatgaagaaactaattctaggattaacgattttaagttccataataatgaatgctcaaacccaaatcatcgcgcacagaggctattggcagaccaatccgccaacgactgaaaactctttgaaggctttggagaatgcgcaaaagctgaaaatctacggagcagaattcgatgtgagaatgacgaaagatggcgttctggtcatcaaccacgatgagcaccacgggaaaatggaagtctctgaaacggatttcaaaacattggaaaaactcaaactttccaatggcgagaagtttcccactttgaaagattatttgaaaaaaggcaaaaaagatttatctctcaaattaattattgaaatcaaacctgcaaaaacgccagaacttgagaacgagattgtgaggaaaacaattcaaaccatcaaggatttgaagttggaatctcagagcgaatttatttcttttagtttgaatgtttgtaaagaaattaagaaagtagaaccgaacttcaaagtgcaatatctggaaggcattctttcgcctcaacagataaaggcagaaggattggacggcatcgattatcattacagcgttttcgaaaagaatccgacttggatttcagaagcgaatgcattaggattaatcaccaattcctggactgtgaatgaccttgaagtttataaaaaattgaaagagcaaggattgaaattcgtaaccaccaatgttccggatcaattgaagaattattaatataagtgaacttaaatctgaatcaattgaattcctcaatgataaacttgtattaaatcataagtctttgttctgtttctaaacaatcgtttggtaaatttgcaccttcaaaatgattacaatgaatttaaaaggaaaaaacgccatcattactggtggtggaagaggccttgggaaagcggttgcgcaaatcctagccaatgaaggcgtgaacgtcggcatcacaggaagaaatgaaaattatcttaaaataacagcaaacgaactgaaagcaactggcgtgaaagtagcctacgccgttttcagtgtggacaatgaattggaagtaaaagccggaattgattcgcttgcggagcaacttggcggtgtggatattttggtcaacaatgccggaataggcgactttggaagcatcgaggaaatgccttctgagacttgggaacaagtgattaaaaccaatcttttcggtgtttattacgtggcgaaagcggttcatcctttcttgaaagaaaaaggtcagggtgatatcgtaaatgtagcttccacagcaggtttgaaaggcggaccgaatatgtcagcctacgccgcttcgaaagccgcagtggtttcattatcccaatcgatgatggcagaatggagaaaggaaaacattcgtgtgattactttgacaccaagtacgattgcttctgatatgagcatcaatggcggtttgacagacggcaatcctgataaagttctccagccggaagacttcgcagaatgggtgagagatattctgaaaatgaacagacgcgcattgattgccaacggttctattttctcaacaaatccgtaagttcagagtaaaaaagcaaaaagcggttttacaacaatgtagaaccgcttttttattggattaatctttccttttcaaaactttcccccgtggctcattcccttcatagagcgcaatatcggaatgtaggaactgtgcggcggccgctgaatcttcaactttaatggaacttcgctgtatcatttctgattcgaaatcggataggacacttttcctgattccatcggttcgccattgcgataatggtctgcatttttttgagatttcacgagctaaggacagcgcatccaacaaagcctgattggcaccttgccctttgaaaggactcatcgggtgcgcggcatcgccaatcagcgtggcttttccgaagttattcattaattctgacgagagcaacgcgcggtcataaacaggatatccggaaatctgacttgtcaatgtagcgttgatgatttctggaataggcgagtgccaagtggttcgtcgaatggcttcttccttaagcgcttctgaacctttactgctgaggtttttagcttcttcctcagacatatgaaaactgagttgccacattatggaatcggcatcaaatggcatcatataaatcctttcgttcccattggctgtctgaaaaaccgtggctgagtctaataaatgatggtccggattttctaatgcattcaacgggcaaatgcctaaaatcacgatgcaatccaaatagcgcaaaggggaaattttctcaccaattaatatattccgaaccgcacttcggatgccgtctgcaccgactatgaaatctgctttctctattgttgatgagcctttgacttgaaagttgaggtcaattttaccatcttgagtttccttaaaatcaatgagttgatgtccccattttatcttgtcaattcctcccaattgttctatgaatgcggaacggagcgattgtctggcgatatggatattggtcttttttggtgtttgtttatcggagttttgaagccactttcgcattccccattcggcaaccacttttccgtcgggtgtgtgaaccagatgtcttgtcgagaccacacctttttccagttttgaaattccaaaaccttcaatcgctttgctggcttgctgtaaagttagcccgtaaccttgcgaccgttcattaaaactattgtcgcgttcataaatcgtaaacggaatgccacggtgcagacaagccacagccaaagcaacaccaccaatcccagcaccgatgatggcgacgtgcggaagattctccgtatctggaacaggaaaactatccgaagcaatcagtcctgatccagagcaagttggacagacataccaatgcgcttccggtggagtgggttcaattccattacgtcctgctttctcaaattccaacaaagccttttggtaatgaaagcgtgcacttttcttgattctccgctttttctttccgaggccgagacagtctgtgcagatgttgaaaaaaggtgttttggtttgcattttattatggtcgttctgataggatttgaactttatcaatttttataaccacaaaagtcacaaaagttgtaattctttgtaagttattcaaaagtgaaaaaaaggtcaaagttatgtagttttcttttttgctcttctgcattgatgaatgtatatttttctgttgtgacttttgtggttaacacttataaaatcatcgtcaactgtatccttttcctcgcctcatccacttccacgactttaacctgaacgtgctgatgaagcttcaccacttcattcacgtccgagacaaaaccgtctttcaattgtgaaatatgaaccaatccactttctttgatgccaaggtctacgaaacagccgaaagccgtaatgttgtttacaatacctggaagaatcattcccggattcagattttttattgattttacattcgggtcaaactcgaagactttagctgactttcttgggtctaatcctggcttttctaattctttcaaaatatccttaattcctagaattcctatttcattagtaatgtatttttctggattgatgagtgcaatcttttctttatttgaaatcaaatcttcggtcttaaggcctaggtctttcgccattttttcaatcgtcttgtaggcttctggatgcactgccgaattatccagcggatttttagcatttttgattcttacgaatgcggcggcttgttggtaagctttctcgccgagtctaggaacttttttgagttcttttctttccgtgaaggcgccattttctgttcgatagttaacgatgttttcggccattttctctccgattccagaaacatagcttaatagtgatttgctcgcagtgttaagattcacaccaaccgagttcacggagcggatgaccgtgttgtccaattcttctttcagtttggtctggtccacatcgtgctggtattgcccgacaccaatggatttggcatcgatttttacgagttctgccaacgggtcggccaatcttcgtccgatagaaactgcgcctcttacggttacgtcataatttggaaactcgtctcgggcaatcttgctcgctgaatagatggaggctccagcttccgacacgacaaaaacctgaatcggtttatcaaaagcgattttcttaatgaaaaattctgtttcccgtccagccgttccgtttccgatggaaatggcttggatgttataggcattcaccatcgagcggattttcttcatcgccattccagtttcgttttgtggggcgtgtggatagatggtttcgttgtttagcaggtcgcctttctcatccagacaaaccactttgcaaccagttctgaatcctgggtcaatggccaaaatccttttttctcccaagggtgaagccaatagcaattgctgaagattctcagagaaaacctcaatagctttgatatccgctttttctttggcttcctgcaatgcttctttggaaatagctggttccaaaaggcgtttataagaatctgcaatggcgagttctatttgtttcgttgccgaattattgcttttgatgacggcattttccatcagttcaagcgcttcttctttatcaacatcgacagaaactttcacaaaaccttcgttctctgcgcggagcattgctagcaatctatggcttgggattcggttcagcgcttcctgccattcaaaatattgggcgaatttctgagccgattcatcttcttttttagcttttacaactttcgaagagataattgcttttctttgaaaaagtcttcgcaaattttttcggatgtacagattttcattaagccattctgctacgatgtctctcgcacctttcaaagcttctgcttcatttgccacatccttgttgaggtattttgaagcgaggaattccacatcatcattgcgctggctcatgatgatttttgccaaaggttccaggcccttttctcttgcggtgtcggctttggtcttcttgcgttttttgtaaggcagatagaggtcttccagctcctgaaggtcaaaactctgttctattttttgtttgagttcaggattcagtgcattctgttcttcgatggatctcaggatgctttctttccgtttcgtgatctcatcaaactgtttgcttagcttaaagatattttcaatcaccacttcatccagattaccggtgcggtcttttctgtagcgggcaatgaagggaatggtgcaatcttctgcaagtagctgaagggtgctgtctatacttttggaggatatattgagctgtttctgtataaagtcggaagaagtcatttctaagttttgaaaagcgaaaatagtgttttgaaatgagaactgcagagtgcattatctttaaatttcaagagcaacatccgtaaacattaggaggagttataaattttctaaacggtgattaagcactatggaaatgaagaaaggcgagttgccccgccttgaatgttttcacaacggaataatccttattgtgaattgctttcgatacaaatttagaaattaattatttatgctgtttacggttttccgtatttatgtgaattaatttctgtttaattttaaggaatctcaaaaactgatagttatggcaaaaaatatacttggattagacttaggaacgaactcaattggttgggcgttagtaaaacaagattttcaaaataaacaaggcgaaattctcggaatgggaagtagaattattccgatgtctcaggatattcttggggaattcggaaaaggaaattccgtttcacagactgcttcacgtactggatacagaggtgtaagacgattacgtgaaagatttttgctgagaagagaaaggcttcatcgtgttttgaaccttttacaattcttaccggcacattatgctgctcagatagatttcgcaaagagatttggtaaattcaaagaagaaaccgaaccgaaattggtatatgatgccaataaatttatttttaaaaattcatttgaagaaatgctttctgattttaagaaacatcagccccagcttttggagaataataaaaaagttccttatgactggacgatatactatctgcgtaacaaagcattaactcaaaaaatacagaaagaagaactggcttggattcttttaaatttcaatcaaaaacgtggttactatcagttgcgtggtgaggaagaagaagagaacccaaataagttggttgaattctattctttaaccattgtagatgttgtggccgatgaacctcaaaaagggaaatctgatatttggtattcgttgattttagaaaatggatggatttacagacgtgcaagcaaaacgccattgtttgattggaaagataaaaccagagattttattgtcactacagatttgaatgatgatggctctgtaaaaactgataaagatggaaatgaaaaaagaagtttccgtgcgccaagcgaaaatgactggacattgattaaaaagaagacagaaagtgaaattgataaatctaaaaaaacagttggaacctacatttataatgcacttcttcttaatccaaaacaaaaaatcaatggaaagttggttcggactattgagaggaaattttacaaagaagagcttaaaaacatattagaaatgcaaaaatcatttcatcctgaattgcaaaatgatgatttgtataatgattgcgttcgggaattatatagaaataatgaagcacatcaattgactctgagcaagaaagattttgtgcatttttttatggatgatattattttctaccaaagaccattgagaagccaaaagtcttctatttctaattgtacattggagtttagaaaatataaagatgaaaatggagtagaatacactcaatatttgaaagctgttccaaaatctaatccttactatcaggaatttcgggtttggcagtggatgtataatctgaatatttatttaagagatgatgattctaacgttacaaaagaatttttaaatacaactaaaaactttgaaaatttatttgagtttttaaacaatagaaaagaagttgaccaaaaagcattgttgaagcattttaaattaaatgaaaaaacatatcgttggaattatgtagaagataaaaaatacccttgcaacgaaactaaggcgatgatttcatcgagattagacaaagttgaaaatatttccaatgatttcttcactagggagcttgagcagaggatttggcacatcatctattccgtaaacgataaaattgaatacgaaaaagctttgaaatcttttgccaataaaaataatttggatgaagtttctttcttcgaagcatttaaaaagtttccgccttttaaaagtgaatacggctctttttcggagaaagcgattaaaaaattattgtctctgatgcgattgggaaaatattggaattatgccgatatcgataaatattcaaaagacaggattcagaaaattatcaatggagaatatgatgagaatatcaaagataaagtaagagaaaaggcagttcattttacgactgaaaatgatttccaaggtctgcaattgtggttggctcaatatattgtttacggcagacattctgaagcatcgttgattggaaaatggaattctgcggatgatttggaagaatttttaaaagattttaaacaacattcgcttcgtaatccgattgttgagcaggtgattaccgaaactttacgtgttgtaaaagatatttggataaaatatggaaatggagcaaaagatttcttcaatgaaattcatattgaacttgggcgagaaatgaaacttcctgccgacgaaagagagcagctgacaaagcaaatttctgaaaacgaaaataccaatcttcgcatcaaggctttattggctgaaatgatgaatgaccattcggttgaaaatgttcgtccatattctccaatgcaacaggaaattttaaaaatctatgaagatggaattctaaaatcgaatatagaaattgatgatgatattctgaaaatcagcaaaactgcgcaaccgtcaacatcagatttaaaaagatataaactttggctggaacagaaatataaatcgccttataccggacagattattcctttaaataaactttttacaccggaatatgaaattgaacacatcattcctcaaagtagatattttgatgatagttttagcaataaaattatttgtgaatcggcaattaacaaattaaaggataattatattggacttggatttattaagcaatttggaggaactattattgaacttggtttcggaaaaagtgtaaaagtttttgaagcagaagaatatgaagattttgtaaaaaaacattacgccaataacagaggcaagagaaacaagcttcttttggaagaaattccagagaaaatgattgagcgtcagatgaatgatacgcgacatatcagcaagtatatttccggtgttctttccaatattgttcgtgcagaagatggaagtgatgaaggtgtaaattctaaaaatatcgttcctggaaatggaaaaatcacaactcaattaaaacaagattggggattgaatgatgtttggaatgatttgattcttccacgttttaaaagaatgaataagctaaccaattcaactgacttcacggcgtggaatgaaaatcatcaaaagtttctaccaacagttcctattgagttttccaaaggattttcaaagaaaaggatagaccatcgtcatcacgctttggatgctttggtcattgcttgtgctacgaaagaccacgtgaatttactgaataatcagtcagcaaaatcggataccaaacggtacgatttaaaaaagaaactgatgaagtttgaaaaagttgtttacaatcatacacaaacaggagagaaaatagaaagagaaattcctaaacaatttttaaaaccttgggacaactttacggttgatgctagaaataacttggaaaatattattgtaagctttaaacaaaacctccgtgttatcaacaaagctactaattattatgaaaaatatgtggagaaatatggtgtgaaaaccaaagaaagagtagagcagaaaggaaccaattgggcgataagaaagccgatgcataaggaaacagtttccggaaagattgatttaccgtgggtaaaagttccgaaaggaaaaatattgactgcaacgagaaaaagccttgatacatcctttgatttaaaatcaatcaattctatcactgatacagggattcagaaaattcttaaaaattatttagaatttaaaggaaattcagaaattgcattttcgcctgaaggaattgaagatatgaataaaaatatcgaaaaatataatgatggaaaacaacatcaacccatcaataaagtccgagtctttgaattaggaagtaagtttcaagttggacaaatcggaaacaaaaaagataaatatgtagaagctgcaaaaggaacaaatttattttttgcggtgtatgaagataaaaatggaaagagaagttatgaaacaattcctttgaatatagttgttgaaagacagaaacaaggattgaattctgtgcctttagaaaatgacaagggaaatcaactattatttagtttgtctccaaatgatttagtgtatgtgcctttagaagatgaaattttagaagggaattttaatctatataatttgagcaaagagcagattcaaagaatttataaggttgaaaaaacctctggtgttgaatgttattttgtgcgtcaggatattgcttttctgataaagcaatatgatgcaaaaactaaaattggagaattggaaagtcagaataagcttcaagtcacaatgacagaggatagaatcaaaattgcagatgtttgtttgaaaataaattgtgatagattaggaaatataaattttttaacaaaagaaaaaataaagcaaatctttaatggatatagataaaatagcaatcgatgcaaatgttattttatatgcttatgacaatagagatgtacataagcaaggtagagcaatagagatattgctcaaaaaaccatttgttactcaattagttattttcgaatttatgaaggtgcttgaagaaaatttaaaagggagaaaagggaaatcactaaacttaccattaaattacttacagaattagtgtatcctctttctcaacatagtgatatttataactatgctcactttttagttcaaaggtattattatggattaagcgacattttagtactttcagattcaatccttaataattgttctgttttgctgtcagaagatatgtgcaacgggatgattgtcgataaaaaattaaaaattgttaatccctttctatgataacccgctccatctacattggcaatcccgcttatctcaaactcaaagacgagcaaatgtacattatggaaccttcctcaaacgagatgaaaggcaaagttcccgtggaagatttgggattgctgatgttggatcattttcagattaccatttctcatcagctcattcaaaaaatgatgggaaataatgtggtagtggtcagttgtgattctcatcatttaccgcacggaataatgcttccgctttacggtcacaccgaacattccgaccgaatcaaagatcaactagaagccagcgaacccctaaaaaaacaactctggaaacaaaccatcgaatgtaaaatcgaaaaccaaaaagaagtattaagaagattaggaaactattacgaaccaatgattgattatcaaaacaacgttaaaagtggagatattaccaatatggaaggtattgcagcacagcactactggaaataccttatcagtcttgattttctgaggcagcgttttggagattcgcccaatcagtttttcaatttcggttactcagttctcagaggtattgttgcaagagcaattgttgagaccggattgcttccggtgctcggaattttccataaaaataaatataatccgtactgtctcgcagatgatttgatggaaccttatcgcccatttgtcgatttattggtaatgcaatggcttgagataaaccgggaaacagaagaattgactaaagaatttaaagcttacatcttacaaattgcaaccagagatgtgagagtagacgataagacaagaccattgctggttgctgtaaaaacaactgcaacctcactgtataaatgttatacgggagaaaaacgtctgatctcttatcctgaactgatatgaatgccgaaaggtttaatgcataccgaattatgtgggttttagtattatatgatttaccgacagaaactaaagccaatatgaaagatgcaaaccgctttcgtaaatctttgttggatgatggctttaccttatttcagttttcgatgtatgtacgacactgtccgagtcgtgaaaatgctgaggttcatattaaaagagtgaaatttatgctgcctaaagcagggaaagttgcgatcatgtgtatcaccgataaacaatttggtgatatagaaatattctttgccaggaataaagaagaaccgccacccaccttccaacaacttgaattattctaaattttaaattctaaaaataaaaacaatctactgattttcagtagattgttttttgaggttgtgttgtatcccaaagatacttaaaaatgaaagcaattcacaactatcttggccagctcctctggctgcttattgttgtgttgtatcccaaagatacttaaaaatgaaagcaattcacaacataatccagtagaggaagggaaacgaatcagttgtgttgtatcccaaagatacttaaaaatgaaagcaattcacaaccaataatttatcgccttgtttgttattccagttgtgttgtatcccaaagatacttaaaaatgaaagcaattcacaactacctaagaaactgccgaacatagaaaaaagttgtgttgtatcccaaagatacttaaaaatgaaagcaattcacaacaattctatcgtgtatttcgaaaccttgaccgttgtgttgtatcccaaagatacttaaaaatgaaagcaattcacaactaaggatgacaacgaaataattgctggcgagttgtgttgtatcccaaagatacttaaaaatgaaagcaattcacaacaaaagcaagtacacactattcaggattattgttgtgttgtatcccaaagatacttaaaaatgaaagcaattcacaacgttagtgcgatggcttttgcgcaatcaacagttgtgttgtatcccaaagatacttaaaaatgaaagcaattcacaactagttcagaggggagaacttccaacgcttcgttgtgttgtatcccaaagatacttaaaaatgaaagcaattcacaactgaagttggatattggccatttccaatgaagttgtgttgtatcccaaagatacttaaaaatgaaagcaattcacaacatggcgtttgggttaccgtacgaatacattgttgtgttgtatcccaaagatacttaaaaatgaaagcaattcacaacaattcttcatctaaaatttcaaccgttgtcgttgtgttgtatcccaaagatacttaaaaatgaaagcaattcacaactcctaccattcacatccaatacttctgaaggttgtgttgtatcccaaagatacttaaaaatgaaagcaattcacaaccgcgccggttgcgttgtgtgttgaattggtgttgtgttgtatcccaaagatacttaaaaatgaaagcaattcacaacttataattgtatctacactattttgaataagttgtgttgtatcccaaagatacttaaaaatgaaagcaattcacaacgcttcatcatctttattcttcgtcgtccaagttgtgttgtatcccaaagatacttaaaaatgaaagcaattcacaacatcgatgggttcaagtttggagttttcacggttgtgttgtatcccaaagatacttaaaaatgaaagcaattcacaactcataatactgttctttgtacaggtaaatagttgtgttgtatcccaaagatacttaaaaatgaaagcaattcacaacttcttacgctgccttcaattgcatctccgcgttgtgttgtatcccaaagatacttaaaaatgaaagcaattcacaacatactgtttgaacttaattccgtcccgaacgttgtgttgtatcccaaagatacttaaaaatgaaagcaattcacaactattagatgtttctgccggcacaaaaataagttgtgttgtatcccaaagatacttaaaaattaaggcaagtcataacctaaaattactagtgttcactaaaatgcaaaagcaccggaaagtgatcactccacccacccatatatcttgacccggaataagtcctctgcgggtagtggctgtttttacgttccttatttctcagttgtggagcgttatagatttctgctgtgatggttgtgaaatgtaattgttccagaagcagattctcagtgtataaaatctgatcaaaaccaacaccctttttaccatgataagtcgaaaattgattgttgagatacaaagcttcgaaaggattactcagcatcttattgccattgtgatcaaaaagaaactgctgtaattccgaagtatcgggattctcgttgaagtcgcccatcaaaatgattggctctcctttgcctgctaaatccctgatggtttcgtgtagcttttccagaatataattccgttgtgctttcttaatatctttttctcttttggacggcagatgacagacaaaaacgtgaagctttttatccttaaataggaattcggcgtgaagaatatctctggtatcaaattctacattttcatccaactgaaacttcaaagcatcgaaccgaatcaaggtgtacttatcattatcaaacaacaaagcaacactcagtcctctggagtcattagattgttgatagatgatttcgtaaggatgaataggagtattttcattaaccaaatcttccaaaaccgatctcgcaccaatctcagccaaaccaatcacagaaggcaattgcccgtaatcttcctcaataaatcgaaagacattgctgagttttcggattttaagatggtacttgtactcgtcccagttgtggaatcctgaactttttatttcagcatctttttcatcaggcggaaagagattctccacattgtagaacatcatcaattctgaattcatagagcctaccaacgctttctgcgcatataaataaatgtgaaagtcactattacaaacattaaacctaaagtaaagaaataaccattcttatgatgcagttccggcatattgtcgaagttcattccgtagattcccgcgataaatgtgatcggtaaaaagtaaaccgaatagatcgccagaagcttcatcacctgattggctttctggtcagacattgccaaaaacatcgagatgaggttggttgtctgcgcattcagatggtcgtagtctgcagttacatctttctgtttatcaagaagatccatcacctgcacatcttccaagtcaagcgttttgaacttggagatccagtcgccggacatattcaggattctggtgttgagacccgatttgcgtttcactttgtaaagcctgcggatctggacggaatcgttggtgtttttcaggaagatttcgttttccattgcatccagtatttccaaaaggttgctgctttcgtcgtcaaaacttttcatgattttcaatgccagtcgcaacgccaattcatcacgtttcacagtatcaatatcctccttgtccagctcggaacacaattcattgatgcttttactcttcgttctgtgcgtggtaatgatgaggtttggtagcagaaaaatgcccagtttgctgctgatgtcactgatggtgttcagcgtgcgcttctccagatctgtagattcgcgggtcagaaagaacttcacatcgcccacttcttcgtatttcggaagatggtttgggtctatggtgtcctccaaaagcaggtaattgatgtgataccgctgatgcaaaaactgcaggtcttcctccgtcggcgcagtcacatcgatccactcccagtgctttgatttgtatttctgttctataggcataccgcaaaactaaataaaattacaattagttgatgaaaattgattattgaatttatttgggcagctttatccgtctaccactcccaatcttttttgcagacgatttcggtttaagtagaacagtaagtcaaagcaaaaaaggatttccgttcaatccgggctgcgcttcgcaatattcgagagttatcagaattcaaagtttgcgtcttttccgacattggaaacggaagcgttaagaaattttaaagaaattacgttaagaaaaatccattgtttgaagctgatgctggaaatgcactggcggcaagtttggattttttaggaatttatttgaaattttagctgagtttcccagtcttgactttttggttcttttgtgtcaagacaaaagaactatccattatgtgttatttatttgcttgtgaatcagtgtaatatctaacgtctcaattctaacttccaataaaaaacctatgtaacaaataaaataattatttttgcaggtacttttaaaatgacaaaatgatcaaaagtgtaatctcaggcgtaggccattacgttcctgaaaatatcgtgaccaacgatgacctttccaaactgatgaccaccaacgatgagtggatcaccgagagaacaggcatcaaagaaagaagacaccgcaagaaccgcgtcgattccgaagagacgacttctttctacggtttcaaagcatcagaaatcgctttgaaaaacgccaaccttactgctcaagatatcgattatattatatttgcaacgctttctccggattattattttccaggttcaggtgttcttttgcaggatttgttgggttgtggaacgataggcgcattggatgtcagaaatcaatgttcaggtttcgtctatgcgatgagcgttgcagatgctttcatcaaatctggattgtacaagaatgttttggtagtcggtgcagagatccattcttttggactggatttttctgatgctggccggggcgtttctgttatcttcggagatggcgctggcgcagtggttttatcagccagtgaagatgttaacgcaaaaggaatcttgtctgtcaatatgcactccgaagggaaatacgcagaagaactggccgtgaaattccctggaaccaaattgggctggagcgacactttattgacaaacccagactctgtaacctcagaagatatctatcctgtgatgaacggaaacttcgttttcaaacacgctgtgaccagatttccggaaacaattctagaagctttggaaaaggcaggtaagaaaattgaagatttggatttactcattccacaccaggcgaatatcagaattgcgcaatacgttcagcaattgttgcatttgccagacgaaaaagtcttcgtgaatatccaaaaatatggaaacacaactgcagcatctattccaattgctttaagcgaggcaattcaggaaggcagaatgaaacgcggcgatttggtttgtatgtcggctttcggaagtggtttcacttggggaagtgtcctttttgaatattaattcaattccattaaaaataaaaaaagcgctattctgatttccaaatagcgctttttgttattcattgatttgtttgacaactttatcggacaaggctttcaattgggtcatttcatccagactcaaattcattgcttttgccaattcgattgggatgcaagtggctttttccttcagcttcctgcctttttctgtaagatggattttcaccacacgttcgtcttctttgcttcgtttgcgagtcagataatctttggattccaaacgttttaataatggtgtcaaagttccattatccaattgcaaaatttctccaacttggttgacggttaaatcgtctttttcccaaagcgtcatcattgcgatgtattgcggataggtgagcccaatatctttcaggattggccgatagcactgcataatctctcggtgcagcacgtaaacagaaaagcaaagttgcttgtcgagttttagtagatcttccatattgggctttttagttaatactttagcaataatcactgatgacggaatttattacttggtcatctttaccggagccggggaaagagttggagtaagcaaaatttagtcgttgcctacggtcagtatcacttccatatttcctcttgtcgcattagagtaaggacagatttgatgtgctttttcgatcagctcctgagcttgctcaattgatactcctggtatattagcatgcaattctgcctccaaaccaaatccgccgttctcaatttgtccgattcctacttttgctgtaacggtcgtttcgccggtttctattttgctttgtttaatgaccaaattcaatgcgctgtcaaaacaagctgaatatcctgctgcgaaaagcatttccgggttcgcaaaatcgtcgtttgcgccgcctaaaccttttggcattctcacttccaggtcaagaattccgttttcacttttcacgtttccgtttcttcctcctgtggctgtagcgccaatgctgtacaatgttttcattttgttgatgatttaattattatttgatgacacaaatgtatggtgtaaaattatattgcacacaatataaattgaagtttacatcaaaatctatgattgatgtaaactatgaatgtgactaaaaaacttttactagaatcattttatactctgctaaaatattggattgaaaaaagtccctctcatttggagagggatttagggagaggatttaaataaaatcgtagtaaccattatcctttccaaggattttctggtcgttggtattcagccatcttttcagaactgtggcgtaaacttttcggaaatcttcggtgtaaatcaaatcaccatcattgagtttcgtaaggtctggaagtggattcaaaagtccttttttcttaagtccgccactgatgaagaacatttgattggccgttccgtggtcggttccgttacttgcattttgcgccacgcgtcgcccgaattctgagaaggtcattatcatcacatcatcgaatttcccgttctccttcatatccttcacaaaaacttccaccgcttcatcaatggttttaaacaactgattttgtctctgattctgattcgtatgcgtatcaaaactgccaacagaaagataatagacttgggtattgatatcagatttaattaaggaagcaatcgttttgaagtcctttccaatttgtgtgttcggataaactttgtccgtcggtttcgctttgctttctttgaatatatattctgagttgttgaccgtatttccgagcgtgttgtaaagataacttgccaaatcgtggtcgtggtcgtgattgtccgctgctagttttttataaagcgattcctgactgttatcgaaaagctttttcgggtctttcaaggcgattgcttttttggtttcgcctttcattgccaggcttagcaggtcatccacttcaatcgcttgcgtcggatttgtacattcgtggcaggcttcgtccaggtatcgtcccagccagccggaattgatgaattcgttgctgccactcgcagattgccagatgtccatacttcggaaatgcgatttgttcggttccggataacccacgttgttcatcactgccaattcgccattatcgtaaagatttttaaaatatttcagacttggattaatggcggcttcatccgtcagcaaaagcgctgtgtcttctctgattgagatctgattccttaaactgtaatagatatcatttttgacaggaataatcgtgttcagtccgtcattaccaccggaaagctgaagaataataagcgttttcccgttcatttcgatcgcctgaggaagtgtcagtgcactaaggaaatttgggaacagaaatgaagctgctgcaagactgctggttcgtataaaggtttttctattgataatcataacggcttatttttaacagagttgatattccggagtcgacattatactaatcatcaaatgctgtctgctcttatcattattgaactcattaatcatatttctgagtttctcagtaggatttggtaaaagcaaactgaaaaggtcttcatccagaatatgcttgatgctttcccagtgaatgctgattttattctggtttttgttcacgaccactttgttttcgcctcttcccatattcacgtcgtcgttcggctttggttccacgtcaagcgttttgtagccagccattacagatgggattttcatccttaataatagggtagagctgtcaatccactcagttccggaaggccagcctgcgacgtttggtggctgtaaaagctgttgtccgaggagtctttcgaagttgtaaatcgtatttccgtctttcgtgtccattggcattattctgcggattccgacaattaaatcaattggggatttgactctggcgccaatattactctcggaataaaaccaattggaaaggaaaatttcatccattaaagtcaaaatctggtaatccgattcgtagaatttttggcttaaggatttgattaatttctcgtccggcgtttcattaaccaaatacttataaatttttttggtgataaattccgcgcattccggtttttcaagaatcatattaatgatatctgttcctgtaaagtttcctcgctttccaagaaattccttttctccggaatcatgttgtttcaagttttcccggaattctccattctcatcataactccaacctgtgaaagctcttgcagattctttaatgtctttctcagtgtaaagatttcctcttccaagcgtg

SEQ ID NO: 1212 - DNA, 24362 bp, synthetic construct
  source 1..24362: mol_type = other DNA
  misc_feature 1..24362: note = Synthetic
gtgatgcccggtaccaacaaacgctatggagtaagcggaaacagttttgtatgtgccgtagaatttggacccaaaattaaagcaaaatctttactggctggcggtgtaagcggaaatgcaaactctcctcatttttatgatcaagcaaaagcttataccgaaggaaagtttaaagatgtgctattttataaagaggaaatactgaagaacgtaaagaaaaggtatcatccgggggaatgattttttagctttttccaaaatttcttgcaaaagacgcacttatatgattatatttgttttattaagaccttaaagataaaaggattggggtgtccccggtcgagctaaagccaaaccttgtgtttggctttcgttttttatggaaatgttttaagtccatacttttttccatttttcgagtagaatttatctgcaaagttttcaaatgcaggattagcccttttaggctctaatatatacctagctgttggataagccaacaaatctgctaattgtaacccattaatattttcttttttatctctgaatgtaattttaagttgcagatattttaatcgctctggagaaacataacctgtgcctctggcaattaagcgctgaaaatgttctcctaatttcttgtcttctttagggcctcgtttctctatcacaatctccagttctttatttggatctggttgttcatctaaataaaatactgctctttcaataataaaagacaatgaaagctcataaacatcatttgataattttccgtattgtttaatgtacttttctttgccaatagccgatgctataacggtataattctgattaattatagactgatttaattgatgataaaattgctgttttaactctaaatcaaataaaatctgaaactccttttcacacttcctaatgtcacgagaatgaaaaatcacttctttgttaccccaaaaattagcttttatttcattaaagtcttccctcactttttggtaatgatcttgatgaatcactatgccacataataaaaatataggaaaatttaggtctaaagtaactaagccatgatctccactttcatcaatgaacaaaaaatatttatttataatttgggacatactaaataaaaatacaactaatatctagattttaagttcgtccaaaaggtatctcaaatttgaatttcatcatttaaaaaaataaaatatttcaacgcgacatttattgagccgatcttacttttttctgttcggtaatatcccaggaaatccctaataaataaagtgggtttcctgattcatctttaatggttatttttctggtatgaagccaatgtttacccgttttggtttctagtacctcttctgggatgtcaagaattccacctttattgatcacgtctttgtctttagcggtaaaaaaatcagcttgttctttcggaaaaagatcgtagtcattttttccaattaaatcttcttttttatatcctagtaattcttcccctgctttattgagacgaacaaagcgcaattcttttgcatcttttacaaaaatcatattcgggatgttttcaagaatagaatcgagaaaaatattaccctgttttgtttcctcagatttttgctttagtgctatttctattattttttgttcggtaatgttgcgggcaatggcataaatttttcccgtagctggatctggagtggagttccaatcaagccataaataaccaccgtcttttttccgaaacctattcataaaattaacagtaacagctccgctttttagtttctcaatttcctgcagggtagaatccaaatcatcaggatgtacaaaattaaaaaactgtttttcaagcaattctttttccgaatagcccaacaccttttcaaagttgggattaagaatttcaaaatagccctgtacattggcaatgcaagaaaggtcataactgttattaaaaaagtgctggtattcttttaatttttctttcgctttcttagtttctgtaatatcttctataatggcagtaaaaaaatcttcattattagatttccaggtctctacactcaattcaattggaaattcaattccgccttttttaaggccactcatttcaatatctcctttaccaataattcgggcttctttagttttaagaaaatgatcaaatcctactttatctttttcaaggtattgttgaggtattataagagatatgggctttccaatagcttcgtctaaagaataaccaaacattttttcggctgctgtattccaataaattatttccccttctttatcagccgaaataatagaatcgttggcagattctacaatagcatgaaacttttcttcgctagaagacagctcagcagttctggctttgatacgttcttccagtacttcatttaatttttttaaatcctcctcggttttctccctttcctcaatttctaatgaaagcgaaactatacctgcaatggaggtggcaaaagcctgttcttcataagtccatattctttttggccctacgtgttcatgacaaacaatccccactatttttcctttaaacttaactggaatgttcataatggatgttattccataatgcttcaaataatctttggttaattcagccgtacgtggatcatcctctgcattatttgcatcaatgatatgatcaaactccaattccgaaaaatatcttggataatccgttctggcaatggaaacaccaaggccataatcagatttactcaataaataagtgttttcagaggtcaaagaaatccggtcagtatcaaacattttgatgctcactcgctctactttaattgatttactatccgtttcaattattttttttagcttttccttaatcggcaaactatttattaaattatttaacctcaataatccggtttggcgttcaatgatggtaacaatcctatatttttcctcttcctcttcttttctacgttcggtaacatccatcaatgccccaatcattctaatgggttgcctttgtgggttgtaaataataaatcccctgtcaattacattggcatatcctttatttaaagtattaaaacggtattcttgattccataactgatcataccggctaaaaacactttcacgcattgcattaacacccgcaacttcatcagggtgaatatttttgttccaccattctaaatcggggcctgtgggcccaccaaacaacttttcaaattgttcattccgccaaattctaccggtctccaaattccagtcgtaaatagaatcttgtgttgccgcaagtacataattaaaacggctttgattttcttggagagattcttttaaccgtttaagatcagtaatatcagtagcaattccacctatggcgtaaatcttaccctctgcatctcgtaaagggaatttcacaataatgtaagtatgtaaaccgtcatcatgcggaatgttttcttcataagtaagcggtttttctgttttagctattaacttatcttttgctataaaagactcggcaaattcttttggaaatatctcataatcagttaaattaattactttttctctgcttactttatacagcttttcaaattctttgttgataaataaatattttccgtttagaaatttggcaaaaataacagccgtagtattatccataatatcctgaaatctctttttagaaatatccaggttattaaacaaaatcatgttctcataagaaacggcggcttgtgtagctaaaatttttaatgccaccactttttcggcagtaaaaacacccgtgaaaagactattttcaagataaataatcccaatcatctttttttctttaagaatagggatgcaggcaattgattttggatgtgctgttaaaatgtacttatctaacccaaacattttatccttagaaacatcatcaattacaactttctcatttgtttttttaacatattcaataatattgttgggaaggaaactattatcgggaccttttaacttagcatacgtttttatttcaattcctttgtttactactgcttctgcggtaatagacaattgattttcaagctcaagcaataaataacctttatccgctccagacgcttgcatagcaatttgcattaatatttcagaaagttttcccggcaacagctgttctgaaatggcaagggaagccttaaggatggcatccaagtcgagctgtttaagcggaaatccttctgttgaagtgagtcttgattgcatatttatcattttctctaagcgtaaacttttcttttccttttttcttcagttatatatccacaagaattacaatcaataggtatgatgttttttatatcacaataataacctactgaaaataagatatttatattcctactaattaattttctaattatttattttatttgtgcgagttaataaaaataccatacaactacttttaattagttgacgacagtcaaaatggggcttgattctgatcatctgtagataaatttatcagttaaatttaattacttgtaaatcatctatttataggcaaaacgatctttatcatgcgctgttttgaccgccatcaatactataaatttgaatgtctcctaaatttgaaaatttcagaaagttaattcttaaacttttggaatttcagaactaggagccatggttgaagtaaaaaaagaagggattattttagaaaaaacatcattaggttttgagaatgacggagtatttaatccggcggtaattaaagaaggaaacacggtacatctattttacagggcggtaagagttggcaattactcaaccgttggctattgccgtttagaaggccctttaaaagttgtggaacgttatgataaaccggttttgtttcctcaatttgactatgaaattcaaggcgtagaagaccccagaattgtaaaaattgatgacacttattacatgtcatactgcacccatgatgatttaaacgccataggtgcacttgccacctctaaagatttaaaagaatggacaaaacacggcatcatcacccctttattaacttatgacgaatttaaaacccttaccgaggtaaatattgggttaaacgaaaaatactaccgttattattcagactataagcttcgtggatttttagataagaaactttatttatgggataaaaacattgttttttttccgagaagaataaataaccaactcgtttacctgcacagaatacgtcccggaattcaaattgttaaaattaattccttacaagatttaaccaaaaccttttgggaaacttatatgcttaattttaaagacaatattgtgctcgaccctaaatatcaacatgaagcaagttaccttggcgggggcgctcctcccatagaaaccaaagaaggttgggtaatgatttaccatggggtggaagatgcccctaaaggatatatttacaatgcttgcgctgcacttctggatttagatcacccccaaaaagaaatttcgagattaaaagtcgctttgtttaaacctgaaaataactatgaacaagaaggtgtggtaagcaatgtggttttccccaccggcactgccatgtttgatgaacgcttatacatttactacggtgcagccgatgcaaaaatagccgttgcttctttaaattttaatgagctgttaaccgagttgatcaattctaaaagctgatggttttagaggatgttttggaaattaggtagaaaagcaatatcactggtctttaagagaaaactaaaataagggaatggcttattttagaaaatcaagaaaaactaaaataagaacatttcttattttagaaaattgcaaaaatctaaaataagaatgctccttattttagataattggtaaaaactaaaataaggagtacatttgatttagatttttctaaaaaaatgaaaacatttaaatcaggagtctatatcaaccagggttattataaaagctttcagcctgaaaatatcaatcagacttggaaacttgatgatatagaaatcattaatttattaagtcaagcagatagacaattaggcaggctggatatgtattctgaatacattccaaatattgatctatttattagtatgcatattgctaaagaagctacacaatccagtaaaattgaaggtacgcaaaccaatgtagaagaagcgttcttagaaaaagaagaagttgcaaaagaaaaacgtgatgactgggaggaggtgcaaaattatatcttggcaatgaataaggctattaccttgttaaatgatttacctttttcatcaagattaattagagatacccataaaattctattgcaaggagttagaggcgatcataagcagccgggagaattcagaaaaagccaaaattggattggaggagcaacaatcaatgacgccatatttattccgccagtacataccagtattgcagaattgatgtctgatatagagaaatttgcaaatgatgaactcaaccaatttcccgacttattaaagattgctttaattcattatcaatttgagactatacatccttttttagatggcaatggaagagttggacgattaatgatcacactgtatttagtgagtaaaggaattttaaaaaagcccattctttacctctctgatttttttgaacgtaacagaggtttgtattatgataatttaatgaatgtgagaactaaaaatgatttaagccaatggtttaagttttttttagtgggtgtaatagaaaccgcaaaaaacagtattacaacatttgacggaatattgaaattacaaaaacaggtagaaatcaaaattcaaactttaggatcaagagctgtaaatgcgcaaaaattgattttatatttataccaaagaccggttattgaagtacaaaaagccgctgaagtaataggttcatcccccaccacagcttataagctattagccgatttcgaaaaattaggtattttaagcgaagtaaccggctcacaaagaggtaaattatatacgtttaaagattatttggagttgtttaaataagccttggttcgtgtccccacgaaacattgcgatgttttagcattaagaatagctgatctcattttaggtgtcccccgctggcgggggttgggggtggtaaacctatttcaggataagacacacttttcaatatcaatgtacatttctcatttcctctaatttaccttcacataactttatggtaatttgcaaaaacgcacccaccttttttaataaaatctccgcctcttctgctgaaactataaacccatctctatatctggcttccgaatagcttttttgcaacaaatcaaataatcgcttttcttcaaggctattttgtggaaatacagttaaaagctcctcggtaaaacaaaggcataattttaatagccttcccaaatgatgaatatcagaacgataagctaaaaacactcgaatcaatgctgcgcaagcctgctctacactttgatgcaataagaaaacagcatttgcctcgtaattaacttttaataaagcggccgcaccttctaaaaaacctttagccatttctaaacgattataaaaacacttttctgtttgttcaaaaagttcagcaggattgaaatagggtaattgattggtgatacccatcccatcagcagcatacagaattgtcccaaaatttaataccctggtaaaaaatttgtgctgcgctattattttctctgctatggtatcagaaccatgcgaaagcaaagtaatttccccctcggtaaaatgagtagtcacaaaatcttgcgcttcatgttcaaagcgggttctgcctttggtcaccatgagtaaaaagtaatggtgatcacttgctaattgttgttcattaaaacaaaggtagctttcttgatgcctcaagcgataagcaaaacaaatgatccaaacaggttgataccgatggatcatttgagttaacataggttttaacggagaaaacgtagcgtttgaaaatccaaaataaggcgacctgctattcatcgagttttccattaggcatcccctcctttcgcattcatttcatcctcagcaacatccagtaaggtggtgaggtaataaaaatcaattaaatagtcctcaaaatctaccgggagccccccaatattataatgtaaaaaatcaagcatcatttttctcaaatttctattcagccgcttggctggggtactctctacaaaagcttgaaaagccttaaataatttttcattgactggccctttagcatgctccctattctttttatttaaatagctcaaacattgctgttcatctttagcttttgtggcctcatcttcatttcctaataaaaatgccacctcaatcatcttttctaagtattcataagccaccagaaaatcggcatcctctgtagcgcttgtaaaactggtttgagttaaggcatactcggcccactctgctaaaacattttgccactgcgctaatgactgaaattggaaacaagccttaatagccaggtaagggttttcaagctccgccaagctcaattttttcactttacctgtatgactgtaaaataccttatacaggttctttaattcttctcgctccaaaataatttgctcccgactgcctaactgaaaatgatcaatttgcaattccccttcttccacttcccggctttttaacaataaataaagggcttccagtaagcggagcatatctttttgaatcctaacaacacaacccggctccccacggtaagtccaactaaaattagaaacagttgctttaagcagttcccataagtcttttttaaaattttccgacgattgcgcatcaaataattgaatcaacacctcttggggttgctccatttctgctgcacttaataaactggtttcgcatcttaactcttcattttccatcactgttatttttatacctacaaatgaagcgcagcaaataggcgtacccaaccaatttcaattgtattttacaatcaaacagttgttttgtacatttaccttaaagcaatacatttacaccatgagcgaaactttacacatcggcagaaaaattagtcgtatccgcgaactgcgaggtatgaagcaagaagcattagcggtagaattgggcattagccaacaagcagtttctaaactagagcaaagtgaaaaagtggaagaggaagtgttggataagattgcgaaggctttaggagtgactgcggaggctatgaaaaattttagtgatgaagccgctttaaattattttaacacttttaatgatagtagcactggggcttttaataacttcaattgcaccttcaatccaatcgataaaataattcaactatatgaagaaaaaacagctttattagaaaggctattggctattgaaagagaaaaagtagaacttttgaaggggaaataataaactcatgatttatcagacatttatcggacatatagtacatttatcagacattctattctgaattatactgcccatataattacgatggactaaagcattcaataacatctctcttaaagctgcaacggagtattccccctttctcaactcgctgaataccttcaaaaacaactaaagcctaggttcgtgtcctcacgaacctatatttatctttatcctgcttagtataagaaccgaaaacttgacatcttaatttttcaataaaaaccttataaataaagaaagcgaggttttatccccgctttaaatgttttcacaacggaataatccttattgtgatttgctttcaattcaaatttagaaattattttcattaaaaaatatttaatgaaaattttaaaatattttttctttttagttttattttcaggaccttacaagaaataaatacctccatttcaccaaactatttaaaacacatttaaaaatacctcaaaaacattatgcttatgaaaacaattttagggcttgatttagggaccaacagtattggttgggctttaatcgagcaagatttcgataacaaaaaaggaaatattataggaatgggtagccgtattatacctatgacacaagatatcaaagatgaatttggaaaagggaactctatttcacaaactgcagacagaacaaattttagaggtattcgacgtattcgggagcgctaccttttaaggagagaaagattacatcgtgtaataaatgttctgggatttttaccaaagcattatgccaatcaaattgatttcgaaaagcgcttaggaaagtttattgatgaaacagaaccaaaactggcttatgatgagaagaacttcatcttcaagaaatcttttgaagaaatgctaaccgactttaaacaacatcaacctcaaatattagtcaatgaaaaaggagaagataaattaattccttacgactggacaatttactacctaagaaagaaggctttaactgagaaaatagagaagaacgagttggcttggttaattctaaattttaatcaaaagcgaggatattatcaactacgtggagaggaagaagaggaaaatccgaacaagttaattgagtttcattcactcaaaattagtgatgtaattgctgatgatacactaaaaggtaaatcagaaatttggtattctttaattttagaaaatggatggatatacagacgttctagtaaaacccctttgttcgattggaaagataaagtgcgtgactttatagtcacaactgacctgaatgatgacggatctgttaaaaccgataaagaaggtagtgaaaagagaagttttagagctccaagtgaagacgattggactttactaaaaaagaaaacagaacaagaaattatccactctaaaaagactgtcggcacttacatttacgaagcgctactacaaaatcctaaacaaaaaattaaaggaaaattagttagaactattgagcgcaaattttataaagaagaattaaaggccatactaaaagcacaacaagtatttcatccagaattgaatgatatggatttatatattgaatgtgtgagagaattatatcgtaataatgaagctcatcaaacctcattaggcaaaaaagatattgttcatttgttaacagatgatattattttttatcagcggccactacgaagtcaaaagtcatctatcagcagctgcactttagagtttaggaagtataaagacgaaaatggagtagaacaaactaataatctcaaagcaattccaaaatcacacccactttatcaggagtttcgcttatggcagtggatttacaacttaggcatttatacaaaagaaaatgatataaatgtaagtactaaacttttagaaaacattgaggattacgagaatcttttcaattttttatttagtaaaaaggaaatcaaacaagatattttacttaagtttttattggaacaaaaaggatataaaagcaaactattatccgcagaagtggcaaagtaccgttggaattttgttcctgataagatttacccatgtaatgaaacaggatcacaaatacgctatagattatctaaaatagagaatatttctgatgattttttgacctctgaaatggaacaaaagctatggcatatcatctattcggtaactgataaaattgattatgaaaaagccttaaatacttttgcccaaaaacacaatttagatgttaattcctttgtagataacttcaaaaagtttcccccattcaaaagtgaatatggttctttttctgaaaaggctattaaaaaacttttaccattaattcgaataggtaaacattgggactggaatactatagaccataaaagtcaggaaagaattagtaaaataattactggagaatttgatgaaagtataaaagatagagtaagagagaaatcaattaatttaacaactgaagatcattttcaaggcttacaactttggttggcacagtatattgtttatggacgtcactcggaagctgtgaatttaggtaaatggaatactgtcagcgacttagaaacctatcttaaagaatttaagcagcattccttaagaaatccgattgtagagcaagtaattaccgaaacacttcgagtagtgaaagatatttggaagaaatacggagctggtgcaaaagatttctttaaagaaatacacgtagagcttggccgtgaaatgaaaaataccgctgatggcagaaagcaacttactaatcagataacagaaaatgaaaacactaatttaaggataaaggctttacttacagaactactaaatgatagcaatgttgaaaatgtgcgcccattctctccaatgcagcaagaaattttgaagatttatgaagatggtgtactcaactcaaatatagaaattgatgatgaatatttaaagattagtaaaactgctcaaccatcaagttcagaattaaaacgttataaactatggttagaacaaaaataccgttcaccttacactggagaaattatcccattaaataaattgtttacaccagagtatgaaattgaacatatcattcctcaatcaagatattttgatgatagtttcagtaataaggtcatttgtgagtcggctgtcaataaactaaaagataagcagctaggccttgagtttattaaaaatcatcacggtgagattgtgcctactggctttggtaggcaagtaactgtctttggtgaagatgaatatgaaacatttgtaaaagaaaactatagtaaaaacagagggaagaaaaataagctaatgttggaagaaattccagataaaatgattgaacgacagctaaatgatacacgttacattagtaaattcatctctgcccttttatcaaatctcgtacgtgaagaaagcaacgatgatggcgtaaattcgaagaatgtattaccaggaaatggaaaaatcactacagaacttaaaagagattggggcttaaatgatgtatggaatgatttgatcttgccacgtttcgaaagaatgaataaattaacagactctacagcttttacagcatggaatgcaaatcatcaaaaatttctccctacaatacccttagaattttcaaagggttttcaaaagaaaagaatcgatcatagacatcatgctatggatgctttagtaattgcctgtgcgtctagagatcatattaatttattaaataaccaatcggcaaaatcacaaacaaaacgatacgatttacaacacaaacttaggcggaaagaaccttatttcaaccagaaagaacaaaagcaaaaagaagcctttaaagagttttttaaaccttgggacagtttcacggttgatgctcgaaatagcttagaaaatataatagtaagttttaaacaaaatcttcgtgttattaataaaacaacaaatagctatgagagttacaaagacgaaaacaacaatttaagaattggtaaagatggaaagtttaagaaagatttagtaccacaaactaatggggacagttgggcaattcgtaagtctatgcataaagatacagtttcgggacttgttaaattggatagagttaaaatacctaatggtaagattttaaccgcgacaagaaaaagaattgacacctccttcaattttaaaaccattgaatctattacagatactggaattcaaaaaatcttaaagaattatcttatcagcaaaggaaatgatccagaattagctttttctccggaaggtattgaagatatgaataaaaatatcagaaaatataacgacaataaaaatcatcaacctatttataaagccagagtttttgaattaggcagcaaatttccattaggtcaaactggcaataaaaaatacaaatttgtagaagcagccaagggtacaaatctcttttttgcaatttaccaagatgaaaaaggtaaaagaagttatgagactattcctctaaatattgttattgaaaggcaaaaacaaggcttaaactctgttcctttagaaaataataaaagtgaaaaactattatttcatctttcgccaaatgatttggtttatgtgccaaaccatgagttattatttgaagataatgaagttagcataaataattccctaaagggcgaaagagagaatatatacaaaatggtaagttcctctggtgttcaatgcttttttgttaagcaagaattagctacaactattgtaaataaagttgaatattcagcattaaataagatggaaagaagtcttcatggagttatgataaaggacagttgtgtgaagttgaatattgacagactaggaagtatttctatagttatatgatcaaacgaaccctttattttagcaacccctcctatttaaatttaaaagaccaacaattacaaatagacttacctcatttaaaaagtttaggagaaaaagagagtaaaaagcacatccctatagaagatatagggattgtgattttagaccatcaacaaattaccattacccatgcttgtatggcggcactgttggctaataatgtggctttaattacctgtaaccatacacatcatccggtaggcttattattacccatggatgggcatcatacccaaagcgaaagatataaataccagattgaagcaacacaacctttaaaaaagcaactttggcaacaaactattcaagctaaaatattaaaccaagcggcggtattatttgaaagaggcattgcttgcgataatatgatccattgggcaaaggcggtaaaaagtggcgacccggataattacgaaggcagggcagcagcttattattggaaaaacgttttccctaaaaagatcgacttttttagagggagagagggcgacccacccaataatttactcaattatggttatgccatattaagagctattgtggctcgaggtatagtttcttctggcttaatacccactttaggcattcatcataaaaataaatacaatgcctattgcttggcagatgatgtgatggaaccttatcgcccatttgtagaccaaattgttttaaaaattattgataagggtgaaaactttttagacctatctcctgctataaaaagtcagttattaaacattgccagtgtagatgtaagttttgaaagaggaaccagccctttaatggtaggcgtacaatataccaccgcctctttagctaaatgttatgaaggcggtataagaaaaattaactaccccatattgaaagactttgaagcaaaaaaagcaaaactttataaaaacgaagatcatattagcttagctgccgaagaggagatgaaattgaataagcaaaatgctgatgatgatgagccattgccattttaaacatgcgccttaatgaatatagaattttgtgggtattagtatttttcgacctcccaacagaaaccaaaaaagaacgaagcactgcaagtaagtttcgtaaagaaattatgcgtgatggttttgcgatgtttcagttttctatttatttaagacattgcagcagccgtgaaaatgcagatgtgcacattaaaagagtcaaaagattattaccatccaaaggccatataggcatcatgacaattacggataaacaatttgggatgatggaattattttatggaaaagaagaaaaaagtttgcctgatactcctcaacagctagaattattttaaaatattagcactatagcctgaaaatttcattagaataaaaatcgaagagcataaaacccttcgattttttaaattctaattttaaatacaacaaactgattaacagcaaaataagaccacctatgttgttgtaaatatcagttcttcaaagaatgaaagcaaatcacaacgagtttctccgatttgtaaaaggcattttcgttgttgtaaatatcagttcttcaaagaatgaaagcaaatcacaacgataagctttcggttaataatgtggcgcagttgttgtaaatatcagttcttcaaagaatgaaagcaaatcacaacggattttatattctatgtaagcaaattgttgttgttgtaaatatcagttcttcaaagaatgaaagcaaatcacaaccagtatcagtgaatctttttgccatttgtgttgttgtaaatatcagttcttcaaagaatgaaagcaaatcacaactctagtcaataattaatagtcaattaacaagttgttgtaaatatcagttcttcaaagaatgaaagcaaatcacaacgccctcgcatttggagcggtaaaccttatagttgttgtaaatatcagttcttcaaagaatgaaagcaaatcacaacgtgaatgatgttttggttgtaacactaaatgttgttgtaaatatcagttcttcaaagaatgaaagcaaatcacaacatcaaaaaggctatcatttaggcaatattgttgttgtaaatatcagttcttcaaagaatgaaagcaaatcacaacgacaaaaactctttccattaaacctaatttgttgttgtaaatatcagttcttcaaagaatgaaagcaaatcacaacatgttttcatgttttggatttcttaattctgttgttgtaaatatcagttcttcaaagaatgaaagcaaatcacaacaacagatggaatcaaaactttaagcggaaagttgttgtaaatatcagttcttcaaagaatgaaagcaaatcacaactattggaagttctgttccttatatcttagagttgttgtaaatatcagttcttcaaagaatgaaagcaaatcacaacaactatacagtagtaagtagaagacccgtgttgttgtaaatatcagttcttcaaagaatgaaagcaaatcacaacaaattatcacaaataatgtaaaaggcatatgttgttgtaaatatcagttcttcaaagaatgaaagcaaatcacaacaaagtaatgtattgagtattactgttgcgtgttgttgtaaatatcagttcttcaaagaatgaaagcaaatcacaacagcaaacgagccgaatgaggcaataattaagttgttgtaaatatcagttcttcaaagaatgaaagcaaatcacaacatcgatatatgctaaagttacagctgatggttgttgtaaatatcagttcttcaaagaatgaaagcaaatcacaacagctttaagctctaatattgtttttactgagttgttgtaaatatcagttcttcaaagaatgaaagcaaatcacaacacacatggtttgcaaaatgctcggttgaacgttgttgtaaatatcagttcttcaaagaatgaaagcaaatcacaacatagctcaaacaactgatttaaagcgtgttgttgttgtaaatatcagttcttcaaagaatgaaagcaaatcacaaccctcttgcggatattgcggattgctatcgggttgttgtaaatatcagttcttcaaagaatgaaagcaaatcacaacatagcggaaattggggggtaggggttactagttgttgtaaatatcagttcttcaaagaatgaaagcaaatcacaacaccaggtggtgatgtgatttgctttcaatccaacgttgttgtaaatatcagttcttcaaagaatgaaagcaaatcacaacaaacaactcagcttcaagatacctttattagttgttgtaaatatcagttcttcaaagaatgaaagcaaatcacaaccttagcgcaaagaggcatcgcattagtggcgttgttgtaaatatcagttcttcaaagaatgaaagcaaatcacaacgggttataccatttttcaaccggaacaatagttgttgtaaatatcagttcttcaaagaatgaaagcaaatcacaacgataaatggcactattcgagacaggtaatcgttgttgtaaatatcagttcttcaaagaatgaaagcaaatcacaaccatgttctgtaaatccaattgtacttccttgttgttgtaaatatcagttcttcaaagaatgaaagcaaatcacaacccggtgttaacaaggtgtccaatttaccgagttgttgtaaatatcagttcttcaaagaatgaaagcaaatcacaacatcttgagtcccagtaataataaactttctgttgttgtaaatatcagttcttcaaagaatgaaagcaaatcacaacaagggcaaccagacagtaggcattttaaatgttgttgtaaatatcagttcttcaaagaatgaaagcaaatcacaactataaacatggttttttaagttatggtagagttgttgtaaatatcagttcttcaaagaatgaaagcaaatcacaacattaaatgattcaggaaaaaataatagtgagttgttgtaaatatcagttcttcaaagaatgaaagcaaatcacaacaatagcatctaatttatgtctttcagaaggttgttgtaaatatcagttcttcaaagaatgaaagcaaatcacaacacccgccccaggtgttacctgtcaaacatagttgttgtaaatatcagttcttcaaagaatgaaagcaaatcacaacatttaaaagacaatgatttataattacaaggttgttgtaaatatcagttcttcaaagaatgaaagcaaatcacaacatgggagacaaagaagtttctttttttatcgttgttgtaaatatcagttcttcaaagaatgaaagcaaatcacaacactggccaatggctttgttttagttcctgcgttgttgtaaatatcagttcttcaaagaatgaaagcaaatcacaacataaattaggcattattttagcactcattgttgttgtaaatatcagttcttcaaagaatgaaagcaaatcacaactacaagcttacttgcatggctttggttgtagttgttgtaaatatcagttcttcaaagaatgaaagcaaatcacaacaatgaagattcttacttaatttgtcaggatgttgttgtaaatatcagttcttcaaagaatgaaagcaaatcacaacactattgaagatattgaaatgacttggtctgttgttgtaaatatcagttcttcaaagaatgaaagcaaatcacaacgaacggacgctaactttctgcttatttgagttgttgtaaatatcagttcttcaaagaatgaaagcaaatcacaacaaagcaatgtattaactattactgttgcgtgttgttgtaaatatcagttcttcaaagaatgaaagcaaatcacaacatgtcatgtattacggtggcgaagctctttgttgttgtaaatatcagttcttcaaagaatgaaagcaaatcacaactaatgtataaatagtctttcttccaaagtggttgttgtaaatatcagttcttcaaagaatgaaagcaaatcacaacatatatcttagcttatctattctttgataagttgttgtaaatatcagttcttcaaagaatgaaagcaaatcacaacttaaatcatcttcaataatgtgcaagcctagttgttgtaaatatcagttcttcaaagaatgaaagcaaatcacaactgggtatgagcaggaataatattaaacgctgttgttgtaaatatcagttcttcaaagaatgaaagcaaatcacaacttgattctagaactctttcttttatttttgttgttgtaaatatcagttcttcaaagaatgaaagcaaatcacaacacattgccagcgttattatttttaaagtatgttgttgtaaatatcagttcttcaaagaatgaaagcaaatcacaacgatgatttacaaggttctcaactttgccgtgttgttgtaaatatcagttcttcaaagaatgaaagcaaatcacaacggtgtgtatcacacaaacttctaaaataccgttgttgtaaatatcagttcttcaaagaatgaaagcaaatcacaacaaatgaattatgcactaaaattgaatgctcgttgttgtaaatatcagttcttcaaagaatgaaagcaaatcacaacggcgccacatattgataacccatatctgctgttgttgtaaatatcagttcttcaaagaatgaaagcaaatcacaaccagaatcaaccgcatacttatatcaagaaagttgttgtaaatctcagattctcaaagaatgaaacggagcttgcggagttcttgaataccttaaaaaaacaatgaaaactaatgaaaaaagcaaatcacaactaggcataattatactgaagccatggttcgtgtccccacaaactgatcttaaatttcaataaaaatgctgtttcgtgaggacacgaaacaaggcctaatataaccaaccaccatactacaactataggataaacgtaggatgaagccgagaacactaagggataacgaagagacaagaccagtagcacacctgatcaacgaatggatagaaataaaaatagtaatatttttaaaaataagctaaatttagtttatcaaacacattaaaatatggctacaagtaaaaatcccttactcaaaggttttagcgggcaaattggtaaaaccattgtggtaaagcaatatcccggagaccgcaccattattactgcttacccagacatgagcaaagtaaaacctactgccgcacaattggcagccaaaagtaaatttgctgatgcggtggcttatgcgcaaaacattaaagccaagcccgaattaaagatgctggcagaaaaacgcctaatagaccgtactggaacactataccacgctttaattaaagaatttatgcagcataaaacgtagaacgaaataaataatcttaatcaatttgttgggttcaacgaaatcataaattggcacatcttcaaatcagcaaattttcaaatcttcaaatcccccatcttcaaatcaaaagaatttatgcaaaaattgaaagagtaacaaacaccatctcttcgggaagggatatagtcttgttctggactccttttgccatcctacgttggccaacgtaggatcaccgaacaaggtcaaaaggaaaccaaaagggataccgaaagatgatcgtttttttatccctttttaaaataaacccttcaaaaacataaagcttataaatacggcataaagtcctctataggtaaaagaaaaagccttgctttttcttaaaaacaaggcttttctatactcaaacacactattttaagtatctattcttaatgtttagcacccagtttcataaccgtctaagattaggttgcaaatttttctgatatgaacttcatcattcacaaaattaaagctatcccgaaaacttatatttcccatctctaccaatatggatggaactaaagcatcggataaaacagctaatgactgctcttttaaagaatctctaaccgtaatgccctttatattcttcaaggattttaaaacctgatttccaaacattttagattcttttagtttgtcacctgccttggcttcaacacttacataaacttctatcccattaaaaacatttggatattttgaagccctttctattggcattgaattaaaatgtaatgaaataaatgcatctccatcaatacctctgtttcttctttcatatagccctaaatattcatctttcgttctagtcaacaccactctaattcctcttttctctgcttcttcttttaaaataaaagcagcattaagcgtcatgtctttttctaaaatacctgtaacacttttggtagcaccatcttttcctccatgacctggatcaattaccaatgttctttgatttttaatgacaggcatttgtgaagcaaagtttattgtattaattcttgaaatttgtttggtttctacaacggctattaattctcttttaagattgctctccggcatattcgcctgtttagcgcttaccgtactttcaaaccttaaatctgttttcttaatggtctctttcggttgttgatgagcagcaatacttaaagaattagctggagactgcatataaacgaaaacttccttttgattgatgaaagccatgcagcaaataatcaccaatggcaaagcggttaaataaatgagttttttcatgtaattgcttggttttttaaacagcatatgcatccttttttttaaaggcaacttgctgaaatggttaataaataaatgagaagaaggttgtgctaaattcagaattaaactggcataggttcttttatcaaaagtcaatacacttttggcatcaacttcatattcgtgattggcatcaatagaatttaaataagcatacgcaaatggattaaaccaaagtacacatttacataattgggcaattagtttatccataaaatgaaaggcctttatatgaattttttcgtgatggataacttgctcctttactttctcaggaaggctttgatcaataaaaagataatgacaaaaagaagagtttttaaagctacaattgggtgaaactgaaacgtactttagctggtctttataaacatagtttctacttttccataatatgtgtcctatgcctataaatagtttggtcaataaaatagcaaagaccaaaacataaagggccatcaatatcgcttctaaagagatctgattcagcacagtatgttccccatcaatatactcagggtccatggcatttccccggctattacttatagcaatttcgcctgcactttgctgtaaagtggttaagggagaaactacttctctttttacggtaacgcttaacagcggaataataaagcttaaaaccaatgtcccaattaaataccatctattaaaactaaagaaggtaaacctagagagtataaaatgatagaaaaaataaaatactgctgtacaagccgacacttttgcgaagtataaaaacagttccataagcttaagaattttggttgattatttttttgatctcctctaaatcactttctgataattgctcttcttttaccataaaagaaagcaggcttgaagcagaattatcaaaatagttagcgaaaaactttttaaatgattgctttccgtaagtgtctttatctatagcagggaaatattcatacgtttttccataggctttgtaagacaaataaccttttttctctaatattcttacaatagaggaaatggtattatagggaggtttaggctcttcgtcaatttcttcaattacatctttcacaaatgccttttgcagcttccaaaatatctgcataatgcgttcttctgctttggttaattcttccataaccaaatgtaaaacttataattcagttttacaacttatttttcagttatataactgattaatcaattatataacttacccaaccgtgaaaatcaaaaatatgatttttgattttcacggttatttgattaaaacctcactctaaaatcttctttagcttgcccttttttgaaaaatactaagcctatccaaaaaagatcaatgcttacactcacttgtggatgcgctttaatttgctcccaggcttctttcattccggcactccagtaaatgtcatcaaaaatcattactgagcgatcatgaacttttggcaagcaccattcaaaataatctaatgtagcttgtttgcggtggtttccatctacaaaaacaaagtctaattgcgctaaattttgaataattggaggtaatgtgtcatcaaaattgccaacaatcacatcaatatcatttagcttaagctgatctaaattttctttagcaattgcggctgtttgggggcagccctctaaggtataaatctttgcatcggcaacagccttaccaaaatagccagtggtaatgcctaaacaagtgcctaattctatgatgttgtttggttgaaactctttagctaaacgataaagcaattgcgctaattttttaggttttaaagcatttttagctaaggtttttatttgcttttgtttttgattatttacatgtgaaccagcacctaaatcggtaatggtgatgcttcgctcatctttaagtaaccttttacgtaaatcttctatgtttttgtaggaagatttatctttaaaatcgtaaattacttcatctattaatttatatacaaaaggtgaatgcacaccatggcgagttttagcactgatgatgtgtttgatataattgatgaacaaagtactgtttaacatggttgcgaaaatacgctttaaggatcaaagagtaaagaacaaggaataaagattctaaaagcgtctaaaaacaaaaaagatgaacgagaaagaaatagcgtctctaataaaattgttggatgatcctgatccacaaatttttgagcacatagaagataagcttttatcttatggcaatcaggtaattacttacttagaaagcgcatggg

SEQ ID NO: 1213 - DNA, 24362 bp, synthetic construct
  source 1..24362: mol_type = other DNA
  misc_feature 1..24362: note = Synthetic
atgactcagaatttctgtaagtcgactaatccgactatagcctcaattcaggtcaacgaagctggagtaatctggtataacgcgccaaccggaggaacggtagtagcatccactacgccattaacaacgggaacctattatggtgtattggtaaatgctaccacgaattgcgaaagttcaatccgattggctgttgcggttcaggtaaatgatgcgccaacgccaacaaccaataatgcgacgcagaacttctgtcagtcgacaaatccaactgtagcctcgattcaggtgaatcaaaccggagtaatctggtacaatgcgccaaccggaggaacggtagtagcgtcaacgacaccactaacaacgggaacctattatggtgtattggttgatccgacttcgggttgtgaaagctccatccgattggccgttgccgttcaggtaaatgatgcgccaacgccaaccactaataatgcgacacaaaacttctgtcagactgcgaatccaaccgtagcgtcgattcaggtgaatcaaaccggagtgatctggtataacgcggtaaccggtggaacggtggtagcaccgactacgccattaacaacgggaacctattacggagtattggttgatccgacttctggctgtgaaagctccatccgattggccgttgcggttcaggtaaatgatgcgccaacgccaactacgaataatgcgacacaaaacttctgtcagtcgactaatccgactatagcctcaattcaggtgaatcaaaccggagtaatctggtacaatgcgccaaccggtggaacggtggtagcaccgactacgccattaacaacgggaacctattatggtgtattggttgatccgacttctggatgtgaaagctctatccgattggccgttgcggttcaggtaaatgatgcgccaacgccaaccacgaataatgcgacacaaaacttctgtcagactgcgaatccaaccgtagcgtcgattcaggtgaatcaaaccggagtgatctggtacaatgcgccaaccggtggaacggtggtagcaccgactacgccattaacaacgggaacctattacggagtattggttgatccgacttcaggttgtgaaagctctatccgattggccgttgcggttcaggtaaatgatgcgccgacgccaaccacgaataatgcgacacaaaacttctgtcagactgcgaatccaaccgtagcgtcgattcaggtgaatcaaaccggagtgatctggtacaatgcgccaaccggcggaaccgtagtggcatcaaacacgccattaacggcaggaacgtattatggtgtattggttgatccgacttcaggttgtgaaagctccatccgattggccgttgcggttcaggtaaatgatgcgccaacgccaactacgaataatgcgacacaaaacttctgtcagtcgactaatccaaccgtagcgtcgattcaggtaaacgaaaccggagtaatctggtacaatgcgccaaccggaggaacagtagtagcgtctacaacacctttggtaaccggaacgtattatggtgtattggttgatccgacttcaggttgtgaaagctccatccgattggccgttgcggttcaggtaaatgatgcgccaacgccaactacgaataatgtgacacaaaacttctgtcagtcgaccaatccaaccgtagcctcaattcaggtgaatccaaccggagtaatctggtacaatgcaccaaccggcggaacaatagtagcgtctacaacacctttggtaaccggaacgtattacggagtattggttgatccgacttcaggttgtgaaagctccatccgattggccgttgcggttcaggtaaatgatgcgccaacgccaactacgaataatgcgacacaaaacttctgtcagtcaacaaatccaacgatagcctcgattcaggtaaatgaaaccggagtgatctggtatgatgcaccaacaggaggtaacataatcgcagcgactacaccattgttaaccggaatgtattatggcgtattaacggatccgacatcgggttgccaaagcgctatacgtttattggtgactgttgaggtaaacgatgcattaacaccgactaccaatgatacgactcagggcttctgtcagactgccaatccaacagtagcctcgattcaggtaaacgaaaccggagtaatctggtacgatgcgccaaccggtggtactatagttgcttctacaacaccattagtaagtggcacaacctattacggatcgttagttgatccgatatccggatgtcaaagttcgatccgtttagctgtttcagtacaggttaacgatggaccaacaccaactacaaacaacgccagtcaggctttctgtaaatcgaccaatccaacagtagcttcgattcaggtaaatgaaaccggagtaatctggtataatgcaccaaccggcggaacggccgtagcttcatctacgccattaacaacaggaacctattatgcggctttggttgatccgagttcgggctgtgagagttcggtacgtttagcggtagcggttcaggtaaacgatgcgccaacgccaactacaaacgatgcaactcaggatttttgtcagactgccaatccaacggtagcgtcgattcaggtaaacgaaaccggagtaatctggtacaatgcgccaaccggcggaaccgtagtggcatcaaacacgccattaacggcaggaacctattatggcgtactggttgatccggttaccggttgtgaaagttccatccgattggctgttgcggtgcagttctttaacggaacacaggcaaccatcacaggcggttcaccaaacgcttgtattcaggatcaggtgacgtatacaaccaataccggaatgtcgaactatgtttgggtagtaagcagcggcggacagattgtaaacggtggaacaacaaccgacaatacaattaccgtactatggaatcagattggagccaatactgttagcgtatcctacaacgatgccaacggatgtagcaccagtaactcggctgcaatgaatctgaatgtaaccaattgttcggatattaccatcaccaaatcggtagacaatccgacaccgtttattgatgacaatgtagtctttacgattaccgttaccaataccggtcaggcgcagttccagaatattattgtaaacgaagcaatcccgaatggctatgcatttgtgagtatggtagtttcccacggaacctataacaacaataccggaatctggacgattccgacgctaaatgccaatcaggtggcgacgttacaacttactgttaaagttttattctcaggcgactatttgaatacggctaccataacgagttccgacccggtagatgtagatgtgaacaacaatactgccagtgcttcagtagaaccgaaatgtctggtggtatacaatgaatttacccctaacaacgacggagccaacgatgtattcacgattaaatgtgccgaacatttcccgaataactccttagaaatattcaaccgttacggtaatctggtttataaaacaagatattaccaaaacgactggaaaggaatttcgaatgtcaacggaacgttcgacggatccgttttacctacagggacatattactatgtttttgatacgggagacaatacaggtactgttaaaaccggatgggtttatatcatgagataatcatgatataacctttccaaagttttttatcaattaaacacgacgcaatatgagaatcaatataaaactaatagccataagttttttaggagcggcatttttgctgcctcaaaagacaaaagcacaacaaaatccggagtatacgcagtacatgtacaataccatcacaattaatcccggatatacaggttcgcccggagtattggaagccaatttgctactccgttcgcaatgggtgggtatcgatggtgctccaaggacgggaacgttgggtgtacattcgcctatatccgataaaatcggtttgggacttaatgtaatcgctgataaaatcggaccctctacggagacttccgcttccggaaacttttcatacaccttgaatctgggctataaagccaaattggcattcggtttaaaagccggtgccagggttttaaatgtcgactggtccaaagggcggtatttagatagtaatgatgtgctgttaaacaataatatttccaataagatcatgccattaatcggtgccggtttgtacttgtatggcgaaaaatggtatgtgggtgcctctgttccgaatttcatcaaacaggattattatgatgatattcaggaatcggtaatggccgacaaactgcactattatcttatcggaggatatgtgtttgatataacagacggacttaaattcaaaccatccgcaatgttaaaagcggtttcgggagcaccgttggctgccgatttatcggcaaatttcctgattcaggaaaaagtaacgttgggcgcttcctatcgttgggacgactcggtgagtgcgatggccggattgcaattcctggatcatttctttatcggatatgcattcgattattccacaaccaaattaaacaaatacaacgatggaacacatgaaatcatcctgcgtttccaactgccaccgaaatcatcagcaattaaatcaccacgatttttctaataccgaagtatatgaagaaaatactatttttcagcctgttattttgtatccatttttcctatgcccagcaaaagcttaaggacgccgataaactgtttcacggaatgtgttatttagaagcggccaaagcatacgaagaatatttggaaaaagaacctaatccgtcgatacaaaccttaatgaatgtaggggatacctactattatctgaacgatatgcgtaaagctctgacctggtataagaaattatatacggtacagggacaaaacctgaacgatatttatatgttgcgctatacgcaggcactacgtggcgtacgcgattatgaagatgcgaataaaacgaccaaagattacctgaaaggaaaaggaaatcaggagatgattgctagttttaacgcccaacaaaaatacaatgacagtttagcacagaaaccgtcgctatataaaattgtaccgttggaaattaatacgtcttattccgatttcggatcgactttctatggaaaccagttggtgtattcgtccagtaaaaaaggaggaaagctgatcaaacgactatactcctggaacgaacaacctttcctgtcgttttatgtagccgatagaaatgcgtcgacaggtgctttgtttaacgaaaagcctttttacgaagaaatcaattccaattatcacgatgcgaccttaacgttttcaccggatttaaaaacgatctattttacaaccaatgcgaccaaaaagaataaaaacaaactgaagattgataaggaaggggtaaacaacttccagattttccgcggaacgattgaaaacggaaaagtgatcaatatcgaaaaaatgttttttaacagttatgaatacagcgttggacatccgtcgttaagtccggatgggaaatggttattttttgtgtcggatatgccgggcggatatggggaaaccgatatttatgtagccgaagtttttgccgacggaagtattaatacaccgcaaaatctgggaccaaaaatcaatacgatcggacgggaaatgtttccgtattacaataatggaatcctgtatttttcatccgacggacattacggttttggtggattggatgtgtacgaaagcaaacattccggtaagttaaattttgacgagcctaaaaacctgggtgaaccgattaacagtaataaggatgatttttcgtatatcattgatccggaaaccaaatatggttatttttcgtccaatcgtgacggaggtaaaggcgatgacgatatttatttctttacgaagtcgaaagccgaatgcaaccagtttgtatccggaacggttgtaagtgccaaaacaaaactacctattgccggtgcggcgataaaagtgtacgattcctttggcgatttaaaatccgaaaccactacgggtgaagatggtaaataccagatcacgattccgtgtagcgcaacctataaattcgatgcttcgaaagaaggatttgcgaatcagaacaagccggttgtggccaatagtaaaaacgaagccaaactttctgtagacttcgaactggcaaaactggaagattttactgtaaaagatggtaaaaatgagaaaattgatgtgaatccgatttattttgattacaacaaatgggatattacaccacaagcggtaaccgaattggaccgtgtggtttatgtaatgcgtaccttcccgaaagtaaaaatcaaaatcgaatcgcataccgattccagaggaagtgattcgtataatctgaaattatcagataatcgtgccaaagcgacacaacgctatattatcgaatccggaattgagccggaacgagttttaagcgcgatcggatatggcgaaacccaaccaaaaaacaaatgccgcaacggagtaaaatgtaccgaagtggaatatgcggtgaaccgtcgttctgattttattatcgtagaaaaataaattggacttagtaaaaccaaaaaagaaggagcagttcattcattcagacagctccttttttggttttatttattgtaaagtgaggagcctttttcgtagtaaggtactttattgaataattatcttttgttccatatatttacctgttacacgcaacgattatttcgtattattttgagagaatcaacgacatcattagtattgactaattctgtactattttctaaactacctattgaaaaataaaaaggctctggtgactcgctcgaaacataaaaacgaaattctttctgatattcaaactcatttggtttttcaaataggctaacctcacgattactacttttttattatagtattcaataaagccatgttgatattctatttctaattcatttagtttgttttcaatcaaattcagaaatttggcattatctttaattatcagacagagtgatccaaattgtttgatttttttatatgtattcctaaatgattgcctttatatccagttttggtatctcaaattttccagctgggtagttatgatctcacggactccttcataagaagctcctctaagttcatcatcttcaatttttcggaaatattggattgaattcatataacggataaagaaacggaagagtttttgaatagtgaatatatttacaaattgtgcaatatatttatggcatggattgtaagtccggacttttttagaagagaagaagttcaaactacatggtagttggtataatacattaaaaacagaaacaatgattattggaaaaatagcgatcgatttagcgcaattacactatagcttgctaccagaagtaacagaggccgttcaacactatttaagcaataagaatgaaataacgaccattagaaaattaattgaggtaattaccaacgaagaatttatactgtatataaatgaagcgtttatgtattttgagatatatgaaaattgtgaatttaatccagtaacagcagcacaattacaggaatttataaagtataaagtaattgatccaaatgtgccgaacgcacgttatttctgtaatttttattatgagaatggtaaatgtatcgatcctaaaaagggaatagatgctgttagatcatatgaaccttgtttaatcgagttttctcatactagcatgatgacctattatgtctttgattggtatcttgatgagtatcgttttgaaatcgaagattagagggttataacacctcacaggtttccaaaacctgtcaggtgtttataattcgattatggtttatttactttcaattagcttttccagccgcgccatgatttcatccttttccttgagcatacgctcgtatagcgcaatcttctcttcgtgaagctcaactaatttatcgataggatggaaggtacaattctggttgccttgatagccaattgaaccattatcaaatgtattagcaattatatttacagcttgttcttcgtcaagattttcgatagcttctaccggtattttaaatatttcggctacctgtgttagtaagttcgtttcgatagtttcccgttgttccattaaagaaactcttttttggctccaatcttcgcctaaggctatagccagtgcttcttgtttgatgcccagcatttcgcgaaaacgtttgatgtttcttccctggtgtacttttttgtctggcgtatcgaaatgtgacatattactgatttttaaaaattgtcggtataaatataagtaaaaatatggttctataacagaacctgaaaaaggaataggataattattggagtactgaaatagtcaactttacaggacgaactttatgtttataaaacgcccgattatgaaaaattcaacaccaagccgcaaccgcaacaaacaaaaaaaattcccggtacgcctggtttcggtatacggaaaagcctttccacgtgcctatggacggtatgtatattatcccgaaatccgattggccggaaaatggcttcaagaggccgggtttaaaacgacaatgaaagtaaaaataagctgcgaatatcggaaactgattataacggtagacactaccaaaaatacctatttgcaacgatagagcacaccagcacactcgcaacacacccgcagcaacacctgacaggtttaggtgtgctgaatcgtgaaaaagagtaatagaaataaaaaaatgccttaatatactttttatatcaggcattttttattgttttttattttgtggtttatatcaaaacccgtgtatttacaaggtttccaaagaggttggaattgtatttgataaaactacaaaaaattgaaaggaattcacaacgagttgttaaaggtaattcgcctaaaatttgttggaattgtatttgataaaactacaaaaaattgaaaggaattcacaacccgcaacagttcctttcatgccgaaagcctgttggaattgtatttgataaaactacaaaaaattgaaaggaattcacaaccaagatcaggttgatttttaattgctgaatgttggaattgtatttgataaaactacaaaaaattgaaaggaattcacaaccattagagctggcaaacgttcaacttttcagttggaattgtatttgataaaactacaaaaaattgaaaggaattcacaacgcaatgcgggattttgtaaaacggctgctagttggaattgtatttgataaaactacaaaaaattgaaaggaattcacaacacctttgtcccgctcttgcagctaattctagttggaattgtatttgataaaactacaaaaaattgaaaggaattcacaactcttgatcttggttccaatcaaattcgattgttggaattgtatttgataaaactacaaaaatttgaaaggaattcacaacccatttgccctatgcggcacaacgggcgtcgttggaattgtatttgataaaactacaaaaatttgaaaggaattcacaactgcagcacgaagcctttcaagtctttgtttgttggaattgtatttgataaaactacaaaaatttgaaaggaattcacaacaactacttgtaagaggagattttgacgtatgttggaattgtatttgataaagttataaaaaaatgaaaggaagtgtcaaatggtttaagattgtatttctataaataaaaaaagccccgaagatagtcgaggcgctaaatgttttcacaacggaataatccttattgtgaattcctttcaagtacaaattaaatactttttataaaataaacattacgtataaccataaaatttaaaagaattattttcttaattttcaaattaaaagcatctctatatggaaaaatatataataggtttagatttaggaaccaattctattggttggagcttaatacaacaacattttgaaaataaatatggtcgtattttgggattggggacacgtattatacctatgtcgcaagatataatcagcgattttggaaaaggaaagtcaatttctcaaacagcagaacgaaccggctatcgcagtacaagacgattaagagaacgtcatcttttaagaagagaacgtttgcatcgggttttacatcttttgggctttttaccgaaacattatgatgagcaaattgattttaaaaagcattttggaaagttctttagtggtagtgaacctaaattggtatataatcaaaatgagtttttatttaaagattccttccttgaaatgctggccgattttaaacaacatcagcccgagtttttaaaagataaaaaagggaacgattgtttgattccttacgattggactatatattttttgagaaagaaagcgttaacgcaaaaaatagcaaaagaagaactggcttggattttattgaattttaaccaaaaaaggggctattatcagcttcgtggcgaagaagaagaagagaatccgaataaattggttgtctttcattccttgcgagtattggatgttgtggccgatgaagagaaaaataaaaaaggggaaacctggtattctctttatttggaaaatggctggatttatcgacgatccagtaagaccaaattgtacgattggaaagataaagtacgcgattttatcgttactacagatctaaatgatgacggaaccgagaaacaagataaagacggaaatgtgaaacgcagtttccgggcaccaggttccgacgattggaccttgattaagaaaaaaacggaacaagacattggtcaattggggaaaactgttggaacctatatttatgatcatttattactaaatccgaaacaaaaaataaaagggaaattagttcgtactatcgaacgaaaattttataaggaagaattagaacagattttaaaaacacaacagtcttttcatgtcgaattacaagatacttttttattgaaaaaatgtatagaggaattgtaccgtcataataaaacacaacaacaacaacttttttcaaaagactttgtgtatttgtttttaaaggatattattttttaccaacgaccattacatagtcagaaatccaatgtttctaactgtagtttagaatttagaatgactaaaaatgaaaagggggaaagtatagtgcgaccgttaaaggttatcgcaaaatcaaatccttattaccaggaattcagacttttacaatggattcataatctagctatttatcgaaaggaagatgatgtaaatgtatcggacgaattttttaaaactatagaaaacaaggatgagctgttcgattttctaaaccataaaaaagaaatcgaacaaaaggttttgattcgatttctgttggagaagaaaggttttaaaggcagagcattaacaaccgaaatagaaaaataccgttggaattatgtgatggataaaaaatatccatgtaacgagacaaaagcaatgttgtattcttgcttgagtaaagttgataatgtacctgctgattttttaagtttccatcaggaattgaatttatggcatcttatttattcagtaaccgataaagaagaatacaacaaagcattaataacatttgctcgcaaacatcaattaaacgaagaatcattttttgaagccttccggaagttccctccgtttaaaagtgattacggtagtttttctcaaaaagcaattttaaaattacttccgttaatgcgttttgggaaaaattgggattggaatcagattgataaagaatctcaggagcgtatctctaaaattatcacaggagaatatgataaagaaataacagatcgggttcgtgaaaaagcgcaacacttaacaacggaaacggactttcagcaattaccactttggctggcacaatatgtagtatacggacgtcattctgaagcaactaataccgataaatggtactctgtaaaagacctggaaaactatattgcctcttttaaacaacattctttacgtaatcctattgtggagcaaattgttttggaaacattacgggtagttcgtgatatttggatacaatatggtaaaggagctaaagatttctttaatgaaattcatatagaattgggacgtgatctgaaaaatactgccgaagaacgggaacgcatcacgactatggttaccgaaaatgagaatacgagtctacgcatcaaagcgttattggctgaaatggctttggataaagccgttgaaaatgctcggccgtattctccttcacaacaggaaattctacggatttatgaagatggcgttttaaattccggtatggatatagaagaagatattttaaaaataagtaaaacagcacaaccttccagtagcgatttaaagcgatataagctctggctggaacaaaaatatcgttctccttataccggacaaattattccgttaaacaaattatttacaccggaatatgagatagaacatatcattccgcaaagcatctattttgacgatagttttagtaacaaaattatttgtgaggcagctgttaataagcttaaagataatactatcgggttggcgtttattaaaaaattccatggacagattgtggattgtggaatgggaaaacaagtgaaaatattcgaagtgtcaggctacgaggaatttgtaaaccaaaattatgctaaaaacagagcgaaacgaaacaaattgctaatggaagatataccggaaaaaatgatagaacgtcagctaaatgatacccgttatatcagtaaatatatttccggaattctgtcaaatattgttcgttcagaatctaacgatgacggtgttaattctaaaaacctgatttctggaaatggtaaaattacaacagctttaaaacaggattggggattaaatgatatttggaatgatttgattttaccacgatttgaacgaatgaatgaactaaccaattcatccgattttacatcatggaatgaaaattaccagcagcatttgccaacggttccgcttgaactttcgaagaacttttctaaaaaacggattgatcatcgtcaccatgctttagatgctttaattattgcctgtgcaacaagagatcatataaactttatgaataacgagcatgcgttaaagaattggaaaacaaaagaagaaaaacaaaaattccgttttgatttacgagccaaattgtgtgataagaaatataataatggctcttccgaaaactataaatgggtatttaaaaagccatgggaaacttttacaaccgatagtaaagatgaattagaaagaatagtggtaagttttaaacaaaatctacgtgttatcaataaggcgaccaattattatgaaaaatggatagataaaaacggagaaaaggtaaaagaaacagtgaagcaggaaggtattaattgggcaatccgaaaaccattgcataaagaaactgtttcgggcaaaataagtttagatcgtataaaagtagggaagggaaagattttaaccgctacaagaaaatcgttggatagctcttttaatgaaaacaatatagaaacaataacggatactggaattcaaaaaatagtaagtaattacctcaagagtaaaaacaacgattcggaaattgctttttcgcctgaaggaatagaagaaatgaatcagaatatacgggattataatgaaggtaaattacaccaacctattttaaaagttagggttttcgagcaagggagtaaatttcaattaggagaaacgggtaataaaacaaaaaaatatgtagaagcagctaaagggactaacttgttttttgcggtttatcaggataaaagtggtaaaagaaattatgatactatcgccttaaatctggttattgaaagacaaaaacaaggtttgccgtccgttccagaaataaatgaaaaaggacatcaattgctatttacattatctcctaatgatttggtttatgtaccaatggatgaagaagatatttccggaattaactttaataatttgaataaagaacaagtcaaccgattatataaaatggtaagtagtactggtagtgaatgtcattttattcattcaagggttgctacgttaattaaaaattatgattctaaaagtaagattggtgagtttggtagtttaaataaattggaagtaacaatggataattcggttcgtataaaagaaaaatgcatcaaattgaaagtagatcgattgggaaatatatttaaagcttaagtaatgttaaaacgtactatctatatcggcaatctttcttatctgaaagtaaaagataatcagttgtatatagaagagcctttatcgaaagaaataaaaggggttattccgatagaagatattggttttttaatattggatcatccacaaataactctttctaatcctttaattgtgatgatgcagcagtataatgttgctattattagttgtgatgaatcgcatttacctttgggattgatgttaccgataagtgggcatgtggaacattcagaacgattaaaacaccagattgcaatttcggagcctttacgaaaacagctttggaaacagacggtcgaatctaaaatttttcaacaaaaagagcttttgcgcaaactgaagttgccacatgatacattaagtaaatatatgaatgatgttaagtcaggagatagtacaaatatggaaggcatagcagctcaatattattggagccaattatttgataattttttacgggaacgaaaaggagaggctcctaataattttttaaattttggatatgctattttaagaagcatggtggcacgtgctttggtgtgtagcggtttacatcctactattggaatttttcacagaaataagtacaatgcatattgtcttgcagacgatataatggagccttaccgaccttatgtagacgagatggtttgggaatggatggctaatccaatagcaacacatgaattggataagaatgctaaatcccatttattacaattggcgacacgagatgtttacatcaatggtttacagcgaccattaatgacagcgctaagcattacgacgagttcattatgccgctgttatatgggagtaagtagagtgattcattaccctatttttagatgagttttagccgttttaatgcctatcggattatgtggattatggtgttttttgatttgccaacagaaacgaaaaagcaacggagtgttgctactaaattccgtaaagcattattggacgatggatttaatatgtttcagttttcgatctatttacgacattgtccaagtaaagagaatgcagaagttcatatcaaaagaataaaaaaaagcttacctaatgaaggaaaggttggtattttgtcgattaccgataagcaatttgagcaaatggaattattctttgctaaaaaagaagctaggctacctactataccgcaacaattggaattgttttaatagaaataaaaaaatgccttgataattcattttatcaggcattttttattatttttttattttgtagattataccaaaacccttgtgtttacaaggtttccaaagaggttggaatcgtattcgataaaactacaaaaatttgaaaggaattcacaacaagcactaagccatttaaaaaaggtgacaagttggaatcgtattcgataaaactacaaaaatttgaaaggaattcacaacacagtcacgttcaaaactggtttattgtctgttggaatcgtattcgataaaactacaaaaatttgaaaggaattcacaacaagttggcctataccattcttgtgtcggttgttggaatcgtattcgataaaactacaaaaatttgaaaggaattcacaactcaccgccaatcgtacacgaacgaacgtttgttggaatcgtattcgataaaactacaaaaatttgaaaggaattcacaacaagttggcgagccggccacgttaataccaagttggaatcgtattcgataaaactacaaaaatttgaaaggaattcacaactcgtccgcccgttattaaatcggtagcttcgttggaatcgtattcgataaaactacaaaaatttgaaaggaattcacaacgggtaggtaaaactactatgattactaaatgttggaatcgtattcgataaaactacaaaaatttgaaaggaattcattgccttaataattgatagtatctactttaagtgttttttatttttacccacaaaagagaaattttactacattcgtatcgaaataatccgcttgatggaatagaagagcagatacaaccccaaaaccaaaccaaaaactataaaaaatggaacaaaaagaaccaggagctttaacaaacgaggagctagtgcaggcaataaaaaaaatgaaaaccacccgattttacgatgccgggattattggttttttaataggagtagcctgttatggtaccattaaaggcggatttgggatatttacctttattccgcttgtctatatccctattgcgacaaagaacaccaaaaaatacactgcgttaaaagaacagctaaaagaaagaggcttataataaaaaaacacctgacccgttttcaaaacgggtcaggtgtttaaataaatgcgtccataaaaaactacgacattgctatcgtagtttttttattgtaaatgaggtaagcttattcggcttctaccatcgtatgatacacgttcatcacgtcgtcatcttcctcaattttttccaatagtttttccacatccgctacctgatcggcagtaagggttttggttacttgcggaatacggtcaaaaccggacgaaaggatctcgatattgcggttttccaattctttctggatcgctccaaaactttcgaatggcgcatacatcatgataccgtcttcatcggcaaagatttcttccacaccaaaatcgatcatttccaattccagttcctctacatcctgaccttcggccgggattcggaaattacaagtatgatcaaacataaattctaccgaaccctgtgtacccagtgttccgttacatttgttaaaatagctacggatattcgctacggtacggttattattgtcggtagctgtttcaattaaaatcgcaattccgtgtggcgcatagccttcaaataaaacctctttatagttggccgtatctttatcggatgctttttttatcgcacgttctacgttatcttttggcatgttggccgctttggcattttgcatcaccgcacgcaaacgggagttggtctccgggtttggtccgccttctttaaccgccattacgatatctttcccaattctggtaaacgttttggccattgccgaccaacgtttcatttttcttgcttttctaaattcaaacgctcttcccataagagttatattgtatttgtttatagtttgtaaaaacagcctgcaaaaataaaattattacagcactttaacaaaaaaagagacttttttaaagtcccttttcctgtgattattttttgtaaaatggtaatttaaccacttttgcagctacatcattttttcggattcggatcgcaatttcactgtcaactgccgaaaaagcagtcggtacatagcctaaaccaatacctttgtttagcgatggcgacatggttccggaggtaactacgccgattacattgccgtctttgtctacgatttcatagtcatgacgtggaatacctctttcggttaattcgaaagcgactaattttcgggaaactccggcttctttttgtgctttcaggtttgcggaattcacaaacgctttatcgaatttagtgatccaccccaatccggcttctaatggggaagtcgtatcgttgatgtcgtttccgtataagcagaagcccatttccagacgtaaggtatcacgggcagccaatccgattggtttgattccgaatgccgctccggcttcgaataccttgttccagatggtttcggcatcttcatttttaaagtagatctcaaatccgcctgatccggtataacccgtagccgaaatgatgacgtcttttacaccggcaaattcacccatttgaaacgaataatacggcatattagccaaatcgattgccgttaacgattgcatcgcttcggctgcttttggtccctggatggctaataacgaataggcatcggatgcattttccatagtcacacccaaatcgttgtgctgtgaaatccagttccagtctttttcaatgttggaagcgttaacgactaacaggtagttgttatcggcaattttataaataataagatcgtccacaataccgccttcgttgttgggaagacacgaatattgtgcttttccatccactaatttagaagcgtcgttagacgttactttttggatcaaagccagggcattttcgccacgaaggaaaaattcacccatatgggacacatcaaaaacacctacgccgttacgaaccgtttcatgctcaatgttaactccttcgtactgaacaggcatgttatatcctgcaaacggaaccattttagctcccaaactttcgtgaacgtgcgttaatgctgtatttttcattttgtgctgtatatttattttaggccgctaatgtattgattttttacggagtggcaaagtgttttactgtctgagataatctttgagttcttcgtaatttcgaatcagaatactttgtttgggtttgtccatcatttcttgaagggattccggaatgagcaagccgtggtttaaatacgattgaacggtgcccagaaattttaccggatgggctgtttcgagaaataatccggttatatcgggattatgagctagttttttttgcaatccgaggtagccaaccgcaccatgcggatccatgatatactgcactttttggaaaaccgattccattgcgattcgcgtttcggtatcactaaaggtataggacgaaaagtctttttttagttgattcagatcacgagcatacaattcctgtatacggataaaattactgggatcgctcacatccattgcattcgaaacggtacagatcgtcgctttgggttggtaaatcccattatccagatagcgcggaacggtatcgttggcattagtggccgcaataaaatgggcgatcggtaagccgagttttttggccagcattccggcaccgatattgccaaagttaccacttggacaggaaacatatagtggttttccggtgtcctggagaactttatacgcaaagaaaaaataacacatctgtggtaaccaacgcgccacattgattgaattggccgaggttaggtttttggttttcagatcgctatcctgaaatgcttttttaaccatcgcctgacaatcgtcaaacgacccctgaacttccagtgcgctaatgttttgtcccaaagtggttaattgggcttcctgtatcggactgacttttcctttgggatagagcacgaccacatcgacattttttatgcccagaaaaccattggctacggcgccaccggtatcacccgaagtagcgacaagaatggttgttttccggttgttttcccggttaaaatacgccagacaacgcgacataaaacgcgcaccaacatccttaaatgcgagtgtcggcccgtggaaaagttccagagtataaatatctttttctatcggaacgaccggaaagtcaaatgaaaaggtttcgttgattatctgttgtaactcattttccggaagggtatctccgataaaaggtgccagaactgtataggcaatactcgggttgtctcttttgtttaatgccgtaaaaaaagagccgggtagtggtgttattttttccgggaaatacaaacctccatcggggccaatactctgtaaaacggcttcccgaaacccgacgcggtgttgtttgttcgtaagactataatagttcataatactgtttttaactgttaattaattgtactccccgggttgcaaccggcgatacgtaaacttcaaagggtattccggtttcggtatatttttgttccattgcaaaagctactttatgagttgtttcaagatctttatttaaagtaaaaacagaaggccctgatccggagattccaacgcctaaagcaccgtgttgcaatgcggtttcttttatcagatcaaaccccggaatataacctgcccgtaaaggttcaacgatccgatcgtgaagcgaacgacgtatcagttcgtaatcgctggtatacaaaccggcaattaatccgcccagatttcccgattgggcaatagctttttttagcggaatttgggttggtaatacggcacgcatttcggatgtttttaattcgatctgcggatgaataacagtggcatataattcggacggtaccggtaaagctaccacatccaatggttcgtaaccgcgaataagtgtaaaaccacccaaaagtgccggagcaacattatcggcatgttcgcaaccactcgctacggcttctcctttcatggcaaatggaataagttcctttgtgctgaatggattacccaatagcatattgatgccgaaaacggctccggcagcacttgcggcagaactgccaatgccacttccagccttgatttttttatgaattacgatatcaaaaccacaatcgggttgtaggacttccaataaagccatagcagccactccggctacgttttgtgcggctttcagtggtaagtcggctccggttatcccgatgatgcggatacctttttgggtggtttgtgtcacaatcatttcgtccccgatggtgtcgagacacaagcccaatacatcgaatccgcaggatacattggcaacggttgccgggcaaaacaggcgtatagttttcatgtccattcgttttaaaggtttccaattcgtatgacatcggcaaaaactcccgatgcggttaccgcggctccggctccggcgcctttaatctgtaacggctgttcggcatagcgatcggtataaaacaaaacaatgttgtctttgccttccaaatgataaaacggatgctctttgttaatatattgcagccctacgctggcttttccgttttcaaatcgggcgacatattttaaacgacaggattgctgttcggccttgttatataaggcttcaaaatgggaagcatgctgttgtaaggactcaaaaaacgcagcagttgattcggcttgtaaaacaggatccggtaaaaaagaatcgtttgcaattgcgtcgatttccatcggataaccgctttcccgaatcagaatcaggattttccgcatcacatcgataccactcagatcgagcttcggattgggttctgtgtagccttcctgttgtgcctgaaggacaatatcatggaagcttttaccagatttaaagttattaaagataaagtttaaactacccgataaaaccgcttgaatctgatgtactttgtcacccgatgcaattaggttttttaaagtatcgataataggcaatccagcaccgacattggtttcgaacaggaaaggcgcattgtattttttggatagcttttttaattgctcgtattcggaatattccgaggaacaggcaattttattacaggtaaccacagcgacgttttgcgccaggaatcgtttgtaaagtgatgctattttttcggaagcggtattgtcgataaaaatactgttcggaagatttaatgcttcaatccggtttataaagtgttccgggttgctgtcttcgcccgattccagtgcggctttccagttgtcgagcgcaataccatctacatcaaaatgcagtttacgggaattggaaatcccaacaacacggaggtttaatttcaggttatcccgtaaataatccgcttgctggtgcagttgttcgagtaattttccgcctacattgcccacgccacaaataaagagatgcaactgtttgatatcatcttcaaaaaaacattcgtgcagtacattcagtgctttgacaacatcttttttatcgataacagccgaaatattgcgttcggaagcaccctgagcgatagcgcgaacattgacgttgtttcttccgagtgtactaaacattttaccgcttagtccctggtgatttttcatgttttcgccaaccaacgcaataatgctaaggtttttttccagatataccggtttgattttttgcaatcggatttcgtattgaaagagcatatcgattgcctttttggcgcgttgtgcctgttcttcctgtatgccgatacaaatagaatgctccgaagaagcctgtgtaataaacacgatattaattccttcgcgggcaacggctccaaacagtttttcggaaactccggccacgccaatcagcccggaaccttccagcgttagcagggcgatattttcgatatgactaatcccttttaccggttcgttactggaagtggaatccgaagcgatatgcgttcccggtgcgtccggatcaaatgtatttttaatataaaccggaatgtttttgttgagcaccggctgtaatgtaggcgcatacagaaccttggctccaaaatgagacaattccatggcttctttataactgatcccggcaatggcacgcgcttgttttacgagcttcggattagcagtgtacataccattcacgtcagtccatatttgtaactcaactgcatccaaagaagccgcaatcacagcggcagtataatcggagccaccacgaccgagcgttgtagtatgcccattatgggactcggctataaaaccgggaagtatggtgctattggcttggtttttatcgaaataatactggatggcataattgctggtttcgaaatcaactgcggcgtttccaaattgttcgttggttttgatgagttcccgactgtcgcaataggcaactttaccggtattggattgtaattttgcaaataggattcgggatgaaaataattcgccatacgacaggatggtatcgtttgttttagccgatagttcacccaataaaaaacaaccgtctaatagggaagcaatagtcacaaagcccgatttgatataggattgtagttcgctattatcctgatccggaagtagcttttgtacgacttcataatgtcttttttgaagttcggtcagaatgtttttatagcgaaggtcacggtttttagcctgattaatggcttccgatagcgaatcggttacaccggccaaagccgatacaaccactactttttttccgggtatattttgtattactgcaatagcctttttgatattctgttcgtttgcgacagaagtacctccaaattttaatactttcatagtactatagaattagggcctgtaactgtttccagtgaaaggcataggattaaaaaataaaaatgaaatggattcgtttgaaaataaacgacttagtggtgttagtaaataacacgtagctacactggactatatgaaatgattataccccgaacggggtagtagtggttgttgtagtggtaataatagaaatgacagccgaagaagattcggttgctataaggaacttatattttctattagctgttagcattgttacaaatatagaagtttttgtttagaaaaagctttttttgtaaatttataggatgtcaaaaatggttaatatatggacaatctgataaaagtcgataaaaacgtagtactacagcggtttcatcccattggtaaattttcgcataaaggcatacagggacatgctttgatcatcggtggaagttatggcaaaattggtgcgccttgtttgtcggccaaagcctgtttgaaatcgggcgcgggattggtaacggcttatattcccaaatgtggttatgaaattatgcagacggcacttccggaagttatggtggaaaccgacgattatccgacacatatccgggcaatcgagacgaaactaaaaatacaggcggttggaatcggtatcggaattggtcagcatctggaaacccatcaggctgtctttcattttttaaaactaaataaagcgcctttggtaatcgatgccgacgggattaatattctatcagaaaacaaagaatggctggagtttttaccagccaaaaccattttgacaccgcatgtaaaagaattggaacgactaataggtgcctggaaaaacgaagcggataaaatggaaaaagtaaaaacactttccaaaacattcgatattgtaatggtgattaaa

SEQ ID NO: 1214 - DNA, 24353 bp, synthetic construct
  source 1..24353: mol_type = other DNA
  misc_feature 1..24353: note = Synthetic
gaaggtcttatggattgtaaactgcttttgtaagggaagaataagggctacgcgtagtttgatgacggtaccttatgaataagcatcggctaactccgtgccagcagccgcggtaatacggaggatgcgagcgttatccggaatcattgggtttaaagggtctgtaggcgggctggtaagtcagaggtgaaagcgctcagctcaactgagcaactgcctttgaaactgttagtcttgaatggttgtgaagtagttggaatgtgtagtgtagcggtgaaatgcttagatattacacagaacaccgatagcgaaggcatattactaacaattaattgacgctgatggacgaaagcgtggggagcgaacaggattagataccctggtagtccacgctgtaaacgatggatactagctgtttggtttaaggattgagtggctaagcgaaagtgataagtatcccacctggggagtacgttcgcaagaatgaaactcaaaggaattgacggggcccgcacaagcggtggagcatgtggtttaattcgatgatacgcgaggaaccttaccaaggtttaaatggagactgacaggggcagagatgcctttttcttcggacagttttcaaggtgctgcatggttgtcgtcagctcgtgccgtgaggtgtcaggttaagtcctataacgagcgcaacccctgccattagttgctaacgagtagagtcgagccctctaatgggactgccggtgcaaaccgagaggaaggtggggatgacgtcaaatcatcacggcccttacatcttgggctacacacgtgctacaatggccgttacagagagcagccactgcgtgagcaggcgcgaatctataaagacggtcacagttcggatcggagtctgcaactcgactccgtgaagctggaatcgctagtaatcggatatcagccatgatccggtgaatacgttcccgggccttgtacacaccgcccgtcaagccatggaagctgggagtacctgaagacggtcaccgcaaggagctgtttagggtaaaactagtgactggggctaagtcgtaacaaggtagccgtaccggaaggtgcggctggaacacctcctttctagagaagaccgatttaattattaatggttaataattaacgattaatggacttatggtatatttgattctttaaatcttgctgtcaacaaacataaataggtacaagttaccagctaagaggcaaagaaaagtaataagttttttaccttttaccttttaccttttacctaagaaagcagtctcatagctcagctggttagagcgctacactgataatgtagaggtcggcagttcgagtctgcctgggactacaagcaaaataagcttaaaaagaaggaaatttctaggagtgagctagaggaaggatcctcttacctcttaccacatatctcttacctagagacagggggaattagctcagctggctagagcacctgccttgcacgcagggggtcaagggttcgaatcccttattctccacaacacacccacaagttccctctccttgggagagggttagggtgaggaaccgtacattgacatattgggataaaaagcataagagatcaataatagattattgataatctaacgaaaaaaaataaaaagaatcaaagagaacgagaggtacctagataattgtcaattatcaattgttaattgtcaattgactaggactacaagcgcgaaaagttatgtaagggcgtatgggggatgcctaggctctcagaggcgaagaaggacgtgataagctgcgaaaagttgcgtgtattggcacatacgatatgatacgcaaatctccgaatggggcaacccagtacattgaagatgtactacaccgtaaaggtgggcaaacctgctgaactgaaacatcttagtaggcagaggagaagaaaacaaaagtgattcccaaagtagtggcgagcgaaatgggaatagcccaaacccatattgttacggcaatatgggggtagtaggacccagatataggttgtaaagctggattagaagtgtttggaaagacacaccatagagagtgaaagtctcgtataggtacagttttataaatcttatgggaatcctgagtaggtcggggcacgaggaaccttgactgaatcagccgggaccatccggtaaggctaaatactcctgagagaccgatagtgaactagtaccgtgagggaaaggtgaaaagaaccgtgaataacggagtgaaacagaccctgaaaccatacgcttacaagcggttggagcagctttaggctgtgacagcgtgccttttgcataatgagcctacgagttactgttaccagcgaggataagtatttcagatacgaatccgcagcgaaagcgagtctgaatagggcgcaaatagttggtagtagtagacgcgaaacctggtgatctacccttgggcaggttgaagcgctggtaacacagcgtggaggaccgaactggttgtcgttgaaaagacttcggatgacctgagggtaggggtgaaaggccaatcaaactgggaaatagctcgtactccccgaaatgcatttaggtgcagcgttgatgcgagtttaatagaggtagagctactgattggatgcgggggtttcatcgcctaccaattcctgacaaactccgaatgctattaaatgctcatcagcagtgagggtatgggtgctaaggtccatatcctaaagggaaagaacccggaccatcagctaaggtccccaaatatatgctaagttgaccaaacgcggtctgactgcactgacagctaggatgttggcttggaagcagccatacatttaaagagtgcgtaacagctcactagtcgagcggttgggcatggataataaacgggcataagcatattaccgaagctatggggtagtacagaagtacctaccggtaggggagcattctataggcgtagaagctaaagttgtgagacatagtggagctgatagaaaagaaaatgtaggcataagtaacgataaggcaggcgagaaacctgcccgccgaaagatcaaggtttcctcagctatgctaatcagctgagggttagtcggggactaacgcgcacccgagcaggggaagtggatgtacaacaggttaatattcctgtaccattaatctgataaaagtgacggaacgagataactaccgcgtactgacggaatagtacgttaaaggagcagttatagctttgatagtacactgaggcttcggtcgaggtgatagagtggtgacaacgtttccaagaaaagcgaagattaatgcccgtaccgtaaaccgacacaggtgattgggaagagaattctaaggcgctcgagagattcatggctaaggaactaggcaaaatagacctgtaacttcgggagaaaggtcgcctatctagcgataggccgcagtgaagaggtccaagcgactgtttatcaaaaacacaggactctgcaaaatcgaaagatgaggtatagggtctgacacctgcccggtgctggaaggttaagaggagagcttagtggcaacacgaaggtttaaattgaagccccagtaaacggcggccgtaactataacggtcctaaggtagcgaaattccttgtcgggtaagttccgacctgcacgaatggtgtaacgatttggacactgtctcggccatgagctcggtgaaattgtagtatcggtgaagatgccgattacccgcagtgggacgaaaagaccctgtgcacctttactatatcttcgtattggtcttggataagtgatgcgtaggataggtgggagacttagaagcagctattctggtagttgtggagtcgttgttgaaataccaccctttgcttatctgaggtctaaccctgcagagtgcaggggacaattcgtggagggtagtttgactggggtggtcgcctccaaaagagtaacggaggcttctaaaggttccctcagcacgcttggtaaccgtgcggagagtgcaatggcataagggagcttgactgagagacctacaagtcgatcaggtacgaaagtagagcatagtgatccggtggttccgtatggaagggccatcgctcaaaggataaaaggtacgccggggataacaggctgatctcccccaagagctcacatcgacgggggggtttggcacctcgatgtcggctcgtcacatcctggggctggagaaggtcccaagggttgggctgttcgcccattaaagtggcacgcgagctgggttcagaacgtcgtgagacagttcggtctctatctactgtgggcgttagaaatttgcgtggatctgactctagtacgagaggaccgagttggacgcaccgctggtgtatctgttgtcttgccaagggcatagcagagtagctaagtgcggatgggataagtgctgaaggcatataagtacgaaacccgccacaagatgagatttcttttaagggtcgtgggagatgaccacgttgataggttacaggtgtaaaggtggtaacatcatagccgagtaatactaatcacccgtagacttttcgcgcagcattcttttttatagataagagttaagagataagaggtaagaaagtgtaaaactacttatgttttatcaattatcaatctcttaagaagttgttagttacaaatatgttttttatccctatatgttaaaaatatgattaggaattggtattttaggataagatataaaaaggagttttaaaaagctcttatcttttacctcttacctcttacctaaaacgatttaaggtggttatagtcaaaggtctcacctcttaccattccgaacagagcagttaaaccttttagcgcagatggtactacacttgttgtgggagagtatgtcgccgccttcttataaagagcaattctgataaagaattgctctttttttgttgttaattaatttctactttaaaaactttttagcttcattcgcaataacaataataagttcattgctaactccattacttaattgtcgagtatgaataagaatacgtttgttatccttactaaaatgtaagttataccaatttttattacctacatctcttgtttttccctcccattttacattaaatgtttgttctaagtcaatttggtaacgtcttggataatcattggctgctacaattacaatagggaactctttgaaaaaaggcattgcaaagagaggtttacgctcttctatagactgttttctaagggcttctatatcctcatttttatagctttctttagtagggtagtcgctgaactcggtgatgaaaaactccttttgaaagttgattttctcaagtttttcaccttgtaaaaatagctgttcgtagagtttttcgtagtttaaataggtgctacttgtaccaccattgtaaggttttccttctttccttatatctcttttattaaactgattgccataagcatataagggattttcgtgagagatgggacgctcaccatcgtaattaggtacttcattggtagagagtatgtgttcccattgagatacattactttggaagagctcttctttcttcttttctaaattttcggtagtctcttcttggggaatgtgtgcggcttctttgccgattactaaaactttaccgttagggttgccataccctacaaatagattgttggctttgcagtaggctactgcctctttgaatgcttgtgtgtacatataatttaagtttttaaaaatgttatattcttttctgataatactcttaggtacttttttttcataataaactgtttcccataaaccattttcgagataagtacgaatgtatttttttgtttcattaccattttcgtcatattgagtgcaagaaaatacattctcatcatatctatcatagtctaaggaatcgtcaggttcttctttatatttaacatctctaaagaggagaatattatttttcccttctaaatcagtagtatagcactccattttttttcgttcaatatctttaaagagaattactgttttttctctatctgcattgatagtggtacgttctacttttccgtcgaaaaatttgtagatgatagttttttcaactctgaaatctttgtaatagatttcaaaaaactttatttctacgattctaccattttcctcataatgaatcacttctttattgcctttttcgtgatacactattttagcacctgtttcatcatactcaataagttcatcggtgtctgattcttcttctttttcattagggtcgtaatttatagttttaatatctttaccccaattctggatatattgcaaaagtttcccatttttatcatatctccattcttcgctatagccacagctgtcttttattcttctctggagcattccattttcgtagtagaagaattttcgagtgtgtattacactatcttcaatagttgccgtccattgggttaattgttcttttgtgttatattgaaaattgaagagaatatttctgaaagcgaaagtatccaagagataagatttgattagtcctttttcatcatacacaatttttgatttatgagtgaatgttgtaaaatgacgtaaacttctgtcaaatattttctttacgtatggagggttaggggcataacgtgcaatgcgaaggcagtaatctaataattctgcaaaaaagtaagtgccataacctctcttcttttctaaaaattttcctatttcaacagtattatcttcagtattagttactgcctcatactctttataaactatctcaatagttttgttagcaaggtgtttattagctggaatattctctatgtaaaaagaagcatttttattgctcatattgttattgttttaaaaagttattatttacagaatagtacattcttttcttacgatatggctgggctttccattatgatagaaaatagtttcccattctccattaggagagtaattgcgtatgagtttatttttttcattcatattcaatgcaagaaaaaatgttttcgttgtatgaaacttcattactttcttctttctgcctcgtattctttgtaagtagtttgtacttttttgttagcaaagaaagtattaggctccattatagggaggtaaagcgattcgaggcttcttaagttgttattttgtattttcattgttgtttgaatggtttaattttgcaaacgtttggtaaaaggaggttactttaaaagcaacctcctcagttgtttttaacctcgtttgtaccaagaggtaccattgttattagaatagtacaaacctttgtcggtttgagctaaaagttcatttccagaaactaataagtcctgaaaagtaaaggaggttgctgtgtaacgagggtaccaagtgcctccattgttgtttgaacgttcaattttttttgcattagtgggacagatacgaataaggtcttttcccatagtgaccattaaactcataattaaatatagtttttagtgagtgcctactctaaatggttttcggcttccccaatgttttacaaaaatagtttgcgggcatcccgttttacttagctcgttgcccgaccaaaggcatagtgtaaagcaaaaggaacgcccgcatacgcgaacgcttccgtctttactttctgtacactattgaaaaattggtcgtatttcgagcttagaaaataaaagcgaaacgctactaatatgtttattttgtgtttatctggtttttactataaaatatgttttatgagtttctgccagcaaatatacaaaataaaatgataggtacgtccttttgccttgtttttttatttcggaagcaaaaatataataatagggcgcaacaacttgtcgttttgaaaaaactttatacttttgttgaaaaaatattgaaaatgagtttatctaaaatgttttcaaggcatcgttttattgttgaacgattgcgtatcaaaccctgtactagtgaagaattagagaatgcttgggagagaagtatagagaatacagaggagcaacctcttgctaaacgtactttacaacgtgatattcaaattattaaagaagtttaccatataattattaagtttaacaaatctcttaaagcatacgaaatcacagaagataatgattcctatacccaaaacctcttcgaggcatttgatgtgttcagagctttgcaaaattacggtaatctttctaaagttattcagtttgataggcgattgcctgcggggacggagtatctctcacccttgcttagggctattaaagaacatcgtcagctaaagttgcactattataagttttgggataaaaaccaacaaccggcggtgcgtacgatagagccttatttgctaaaagaggcgcaaaggcgttggtatgtgttggcgtgggatgtggagaagaaagcgctacgggtgtttggcttggataggattacccgtttagatgacagcaaggacattaaatatcagcacactgtacctgagggtgtggagtgttttttcgacgatagttttggggcgtgggtagatagtgagcacacacaagcggaagaggtggtgcttgcctttaaaaaattgctcaatgattcagtttttatgcctaatccggcggaatacctcaaagcgatgcctctgcattcttcgcaagaggtagtgagagaaactgacaatgagattgtactcaaactacgcttaaaaattacaccagactttgttagggagatacaatcgtatggtgatagagtgaaagtactatcggataatgtgttaatttacaaagaatagtgtgatttcgatgtaaaagatgttagtgaatgtttggaggtaggtatgtgagagattatgtctcagaatgtcgtagcacgataggcaatacgaggcacacgggtaggagataattagcaaaaggtgagaagaattggcaggagaatcttgtacgattgttatggaaaaggtgtataagtagttaagagttaaaagttttttgaatggacaatgaatagtaaaaaaaatgtagggtaggagaggtatttggaatttgaggtttattcgaagaaaagacgaaggaaagacgaacaatgaacgaaggaaagacgaataatgaacgaaggaaagacgaacgatgaacgaagaaaagacgaacctaagatgaatttaaagtgaagctaaggagaaggaaagaagatgtaatgatgaattttttggcaaggtaagaaggaagatgtaagtggaatgcttccgttgatgaggagaaaacagcatattaacaaatctgatagagaaactcagaaggacttggagagtaataaaaaaagatattttatgagagtagttattcagcgtgtaactcacgcatcggtggatatagataagcaaacagtagcttctatcaataaaggtttattagtattggtaggtatagaagatagcgataccaatgaggatatagcgtggttatcggctaaaatagtgaatttacgcgtttttgacgatgaaaatggggtgatgaatctttcggtaaaagatgtaggaggagaagtgcttatcgtgtcgcaattcaccttgcacgcctctactaaaaaaggcaatcgccccagctatataaaggcagcacgtccagaagttgcaattcctatctatgagacgtttataaagcaagtggaaagtttgttaggaaagcgagtgcccacaggacagtttggggcgatgatgcaagtggccttctgtaatgacggtcctgtaactattcttatagacacaaaaaataaggaataaaaaaagccccgaagatagtcgaggcactagatgttttcacaacggaatcatccttattgtgaattgctttcaaattctgcgacaaaagtaggtataatatttttaatgtgcaaatatttttatataaaaaattttattacatttgtcttttctaaaaacattataccaatgaaacacatattaggcttagatttgggctcaaactctatcggttgggcttttgtacaacaagattttgaaaacaaacaaggaaaaattattgctactggtagtaggattattcctatggatcagggtatattaggtgactttgagaggggaaatacagtttctcaaactgccgaaagaactgcttatcgcagtacacgtcgcctgcgagaacggcatttacttcgccgtgagcgacttcatagagtacttcacatattaggttttttacctcctcactatgatgctcaaatagactttaccaaaagatatggtaaatttatagataatgctgaacccaaaatagcttataacaatgggaattttatctttatgaatagtttcaatgagatggttgaggatttcaaaaaacaccaacctcagttattctacaagaaatctaatggcgaagagagtaaaatcccttatgattggacaatttattaccttcgcaaaaaagtactctcacaaaagattacccaacaagaattagcttggcttatacttcacttcaatcaaaaaagagggtactaccagttacgaggggaagaagaaacagaaaaccctaacaaagaagttgcttttcactctttaaaagttgtagatgtagaggctgaagctcctaataaaaaaggtgagatttggtatacaatccgtttggaaaatggttggatataccgtcgcacgagtaaaattccattggacgactggaagggaaaaacacgtgatttcattgttactaccgaccttaatgatgatggcacgattaaattagacaaagaagggaaagaaaaacgttccttcagagcccctgacgaaaacgactggaatttactcaaaaagaaaacagagcacgatattgatttttctgggaaaactgtaggtgcttatatctacgaccatttgttgcaaaaccctaatcagaaaataaaaggaaaattagttcgtactattgaaaggaagtactataaagacgaactaaaggctattttggctaaacaaatagctcttcaaccagaattgttcactgaaaccctattggcggactgtataagagaattatatcgcaaaaacgagactcaacagcaaaatctactatcaaaagatttccttcatctgtttgtagaagatatcattttctaccaacgcccattgcgtagcaaaaaatctactattgccaattgtaccttagaaaaacgttcgtatatagataaggaaactaatgagcgcaaagacactcctataaaagtatgtgccaaatctaatccttactaccaagagtttagagtgctacaatggctgcaaaacttgagaatttacgaaatagaaaccgaccgtgaggtaactgctgagtttatagaaacagcccaagactatgaggctctcttcaacttcttgatgtctcaaaaagaaatagataatgaaagtttactgaaatactttttacttgcaaaaaatcctcaaattaaagacaaagcagctaaaagcgagctaaaaaaatggatcactacttatcgctggaactatgtgtatgatgtggcggataactcctccaaaaaataccctatgaatgaaacaggctatgaccttcagcggtatttgcaaaaagtagaagggctccctgccaattttctaacctttgatacaacatatcgattgtggcatttgttatattcggtgaaggataaagttgaatttgagaaagcattaaagaaatttgctcaggaatatcaattagacgaagcatcgtttgtagatagtttcaagaacttcaaaccctatcctaatgaatatggtagtttttctgaaaaagcaattaaaaaattgctccctctgatgcgttttggcaatcattgggactttaatcgcattgatgtatctactcaaaaacgtatagatgacctcatcaatggagtggcgaatgaggaaatccgtaccatcattagagaaaaagcagagaagtatcagctcaatagtgagacctgctttcaaggcttaccgctttggttggctcagtatgtagtctataatcgtcacgccgaagctaccgatatagaaaaatggacttcagtgaatgatttagaagtatatttagaagatttcaagcaacattcacttagaaatcctatagtagagcaagtagttaccgaaactttacgcgtagtaagagatatttggcaacaatacggcggaggacaagcgaatttctttgatgaaatacacatagaactgggtagagaactcaaaaaaacagctgaagaaagaaaacaactttccgataaaaatcaagagaatgaaaataccaacctacgtattaaaaaattacttgccgaattaaaagaagatgcaagcatacaaaacgtgcgtccgtattcgcttgtacagcaagaactgcttaaaatctatgaagaaggtgtgttcagtagtacagatgaaatagaggaagatattcagaaaattcgcaaaaaagctgaacctaccacccctgagatacaacgctacaggctctggttagaacaaaagtataaatcgccttatacgggagaggtgatttcacttacaaagctatttactgaggagtatgaaatagaacatatcattccgcaaagccgttattacgacgatagtttatccaataaggtaatatgcgaatcggctgtaaataagctaaaaacaaatcaattaggattggaatttatccagaatcatcacggtgagaaggtgcgcataacagctaataaagaagttactatcttcacagaagaacaatacaaagagtttgtgaagaaacattacgctaacaattcagctaaacagcaaaagctccttttgaatgagatacctgaaaaaatggtcgctcgccagctgaatgacactcgttacatcagtaagtatatttcagaaatactttctaaaatagtgcgttcagatgaaaaagatgagggggtaaactctaaaaatgtaataccttgtacgggtaaaattactactgccctcaaacaagattggggacttaatgatgtgtggaacgagcttatacttcctcgttttgagcgaatgaatcagcttacccaaacacagctatttacctcatataacgacagacttcaaaaaaatctccctactgttccaatagaatatagccaaggttttcaaaagaaacgcatagaccaccgtcatcacgctatggacgccttagtgattgcttgtgctacgagagagcacatcaattatatgaataaccaacacgcattggataagagtaaggataaaaaagaaaaacaacaatctcgcatagaccttcgtactatcctctgtgagaaaaagaataataactggcagttcaagaaaccttggagtactttcactcaagaagccaaagaagcccttgaacatatagtagtgagttttaaacaaaacctaagagtgattaataaggctaccaactattatgaaaaatgggaagagaaaaatggtgtacttgtaaaaaagaaagtaaaacaagagggaactaattgggctatcagaaaacctttacacaaagaaactgtttcaggtaaaattgtattggatagaaaaataggtaaagataaaatacttacagctacccgaaaagcagtagatataacctttacagaaaagattatcagtagtattaccgatacgggcattcagaaaatattgctcaactatctgaaatataaaggaagtccagaagtagctttttcagcagaaggattagaagaactcaacaaaaatattgcccaatacaacgatggcaagaaacatcagcccatttataaagtgcgtatttttgaggaaggaagtaaatttcctctcggagaaacgggcgctaaagctactaaatatgtagaagcagccaaaggaacgaacctcttttttggagtatatcaaggcaaaggaaaacgcacttatgcaacgatccctctcaacgaagtaattgaacgacaaaaacaaggacttccttctgttcccgagcgcaatggaaaaggagaaccattgttgtttagcctttcgcctaacgatttggtatatgtacctatggaaggagaaatcgcagagacaatagattttaataatctcagcaaagaacagaaagaaagaatttataaaacagtgagttttacaggaaatcagtgtttttttgtacaagaaacagtagcatctcctattgtaaataaaatggagtattcaccattgaataaaatggagagagatattctaggaataatgataaaagaagtctgtgtcaaactaaaagtagatcgcttaggaaacatcatcaaagcatagaactctttttaaaaaccaataaacatcctttaaactatgttataccgttctatttacatcggcaatcctgcccatttgaagttgaaggataagcaactcaaaataacagaccccactatccaaaccgtaaaagggagtgtgcctattgaagatttgggcttgctgatgctcgaccattatcaaattaccgtttcacatcaattactgcaagaattgatgaagaacaatgtggtgcttatcagttgtgatgaaaaacacttacccttaggagcaatgcttcctttcggtgggaatacccaatattctgaacgagtgaaaacacagttggaagtgagcgaacctcttaaaaaacaactttggaagcaaactatagagtgcaaaattcagaaccaagctaaggtcttagaacatttaggaaagtatgctgacccgatgtataattatctaaaagaagtaaaatcgggcgatacgaccaatatggaaggtattgcagcgcaacactattggaagtaccttattgattatgattttcttagagatagatttggtgaatatcctaatcagtttttcaatttcggatatggagttttactcagtatcgtagcccgcgcattggtagatacaggtttattattagtattaggaattttccatcgcaataagtacaacccctattgtttggcaagcgacataatggaaccctaccgacccatagtagatttattggtaatggaatggctcacaacacatcctgaagtagaagaactcaacaaagaaagtaaagctcatatacttcagatggcaacccgtgatgtacagatagaaaagaatacccaccccttgatagtagcagtaaagaacacagcttcttctttatacaaatgctatacgggtgaaaagcgactgatagcttatcctgaattatgattatagccgaacgatataatgcttatagaattatgtgggtattagtattatacgatttgccaacagaaacgaaaaagatgcgtaaagaagcacagaactttcgtgataaactcataaaggacggttttacgctctttcagttttcgatgtacgtaaggcattgccctagtagagagaatgcccaagtgcatatcaatcgtgtaaaacaaaacttacctcagtatggcaatatagctattatgtgcctaaccgataagcagtttggcgatatggagttcttttactgtcagagagaaacagtagctcccgaaacttacgtgcaattagagcttttttaagaagaataggaaagtgaaaacctcctcttttgcctttgtttataaggtaaaagaggaggtttttcagtactgtttttaagcaaaactgattgatatttaaactcttaaaaggttgagggttgttatcaatcgcaaaactacaaaatttgaaagcaattcacaacagccaaaatgctcaaccattacatctctgggttgttatcaatcgcaaaactacaaaatttgaaagcaattcacaacaaggcttaatatacttctcatacttaccttgttgttatcaatcgcaaaactacaaaatttgaaagcaattcacaacaatcattaaggtaaaaattacataaatcttgttgttatcaatcgcaaaactacaaaatttgaaagcaattcacaactaaaaagtacgagaaagcacgagaagggctgttgttatcaatcgcaaaactacaaaatttgaaagcaattcacaacaagaattatcaataaaggttacatactctggttgttatcaatcgcaaaactacaaaatttgaaagcaattcacaaccgcattcttatcgaaagtatctctaaccagttgttatcaatcgcaaaactacaaaatttgaaagcaattcacaacttgggcaatagctgagagagatttctgtttgttgttatcaatcgcaaaactacaaaatttgaaagcaattcacaactaaaagaggggcaaaatcctgtgcgctgaggttgttatcaatcgcaaaactacaaaatttgaaagcaattcacaacgggtcggtttggcgtatgcgggtgagctctgttgttatcaatcgcaaaactacaaaatttgaaagcaattcacaacaccctacaagtgtagcaatgtgaacaaatagttgttatcaatcgcaaaactacaaaatttgaaagcaattcacaacagttattaattcttctctcatacccatacagttgttatcaatcgcaaaactacaaaatttgaaagcaattcacaacagatttctctattcctaacacctgaacattgttgttatcaatcgcaaaactacaaaatttgaaagcaattcacaacacaaataaataagttaaaaacttatttaaaacaatatatttataaatattcggtagttttataaatatggggcattccttttatttaaagacctgtatagttttgggcttctaataatttttttgtagttgcagggtctaaagctaaagattttacatctacactatccctcatttttgaatgcaatacatataatgaagtttccttaacatagtcttttatagatattttatccatactatatgacatacgtgtaatagaagaaattcctacaggtatttcacacatattatagcctgtatcatctttaggagtgaaatatatgtattctggcatattatattctcctctttggagaaaaaatttacttttagacatctcctctgcttcttttataagctttttaattttactcatttctgttttaaattcattcctagaactcattaaatattcccaattgccaaacgtatttctcattaactcatcaattgagtcatactcattttttgagtaatagtctttgttattaggaaaatcataatagtaagcgttaaacaactttaccattttattttctgaaaagctttctttttcagaagaattgatattcgtactatttgtactactattagagcaagcaactgatagcaaaacaatcattgctataataccggttttttcaattagatttttcatactgttgacatttaatttttcggcaaagatagtataaaattaaatacaaacagttgttatcaatcgcaaaactacaaaatttgaaagcaattcacaatacaacgttatgatttttatttgtttttttagatgataattcttacctttgtaccctaatttaatattaaaaattatgggtattatcgcaacacttattattggagccatcgctggatggttaggaggaactatctacaaaggtagtggattaggtcttataggcaatatcattattggtattcttggaagtatcgtgggatattggcttttaggagatgtgtttcacgtctcacttggaggaggatggattggtgctatcttgacaggagctattggagctattgttattttattcttgataaatttgatatttaaaaagaagtaataaggaaggaagagcacatattaaaaatgaaaaaaccccgaaaatatatattttcggggttttttagtacttcttttttagaattacctacttgcgttagcaatccaggtttttccatctgtagtatacaaaatgttcaatgaagaggcgttgattctaatgattttcacgccatctttcaagtcgatgtttactaaagtgttatctccttcttttttgaagctaacacctttaaggtcaggaataccgtctgaaaaacggaaataatagtcatttcctgttttaacaactgtcacggctccattatcagcgaattttttctgttgactatcggagtaagagattttacctttgtaggttcctataaaaaggtcattgtctgctgggtcatcattcttgctacaagatatacaagaaaaagctactagtgataaacaaatcactgatactaaagcaataatttttttcatacttgattcaatttaaaaaattaatattaaagtttgttgcaataattataccattggaatgctttatgcaatttttaatagttgttatcaatgggaaaactacaaaatttgaaagggattcgcgactatgtggctgtacaactgaatgtctgtaataagagttagtgtttaggcgaaattataaaatttgggttcatttcatatgtgttttgatattattgaataattgtaaagtttgtatagaatcgccataattcaaaaaaagtatttgatttttggagtgataaatcttaatgtaaggttttgtattaacacgtaaagaaagtttatatacatctcctttttcggttttaaaaaatccctttttgatgatacctacatcaaacccgttagttcgcaaaacaaatttaggtaattcgttaacaagagttattgaatcaatatctttcattttaatattaaaatgataaagacctgaattctcaattctttctttgctaacctcaatatcactttctctcattgcataataaagaaaaatacacacagccccgattaagaaaagaacaatgtaaaaatcttttttagaagaagcttgtttttttataggattaaatcgcagtacggataaaatgggaataagcaagcctaataatatcgaaatacaaatatcccagacaagggaacgagacaaaaaagtaaaaaaatagaagctaatccacaaataataaagacattacgcagatacagcgtataatttgtgttttttaaagattctttctcttcatcagacaatgtgttatagcctgataataagttaggaaattttgagattaggaatcccaataatatataaaacagtcctaaaatacaatttaaggtatccataaaagtttagttttatacgttaataatacaagaaataatacaggacaaagataaacataacaaaatccgtttaaacttttggcaaagttacaataaataattagaagatgagggaattaggaaattagagaattagaaaatgagggaattagagaatgaggaaattagagaatgaggaaattatagaatggagtgtgaggttgtattagaggaatgaggctgtgcctcagaaattaaacaaattttaaacaaaatcaatgctacgccttgtaaaccagcggagggattgtcagtttattcaactttgccaaaggtcgtagcatgacgggtgattaactttggcaaagtttgagatgaaaaagcgatgtgttgggattgttaggagctttcggaaggaaacggaagaaatcataaaaagactgggagggtttttgatgaaaaaatgctatgaggagggtgggggtagcttatagagagcttataggaagcttatacgaatcttggacgattggtatagaaagggtatgcaaataattgattaatagtgtaatacaacaaggctaaaaatgttaaaaacggggtttcgaggcgaaagaaagaggaagaggtgctaggccttaggccataggcaatagggggagtgtgacggaaaaaataatgaaatgacgaatgacgagagacgaatgacgaagaaaatgtgatgaaaatctctcgcggtgcacatacccagctgtcgctggctaccttcaaagggggaatgtggagacggaaaaggcgaaaaaatgacgagtgacgagtgacgaatgacgagggggcgagtgacgtgaaagagggaatgtagcgagagaaaacagaagggtgaagggggaaatgatagagttttcttttatgtatcttgtatatattacaaaattcattatttttgcggttgtaatttaattgttttttcaagatgaataaaatgaaatgtttatttttaataggcgtactttcggtaatgaatgtttgtgcgcaagattttaaagtaaagaagggtgaacttctatcaaatggtactcccgttgctaagattgagaaaaaggacggtaaatatcaatttagtgacctttcgaatcatttgttgtacagggtggttcttacggctgaaacggcacaaggtaatttagctcctcaccgttggatagagttttcaaatgctaatggggtaattcgggaagtggcaattccggataaattgaaatttactttttcgggtgagaagtacctgcttgactgtgtgtttaaatcggggactggaatgctcacagaaaagggtattgaccctgcggtggtaacggctttttttgagagtactcatcgtccgttctcagagaaatgggacgctgtgtttgaacaagagcggaatactattcaaacggaagataacttggctacggctgataaaatttcggtacagggagatgcgattcttaaaaacggcaagcaaataggcattattgtgcgcaaagtgcaaaacggagatgggggtattgttatcactgattttacggtaacagatatcaaaggtcacgtagtggctactgcgcatcatcattcgtataaaaacgaagattatttcgttataaaaacctacgaccaaaaagagtttctggtatttgttcctcttaccaaaataggggtggctgataaaagaattgtgaataggctttatgccaatggctatccgtttggcgatatgactgaggcttttagtcaatatttagaaggtagaaagaatgctatagaccagcaaaataaaaaaatgttggaggaagcgaaaaagcaaacggtaaatatttacgatgctccgggttatgtgatagatgctaaaggggataagaaagaggggcttattacgattgagttccagtcggtaggagcgatacttaacaaagagcagaatgtatcagaccttacttcatatggggcaacgatgaaactcaaaaaggaaggtgagaaagacgcttattttaaagcgaaggacggtgtgaaattctgcatagatgagcgttgttttataggttcaaaaagtgcagaagacggcttttttgctcacggaggttcacagttaaacgtactttcgggggctgctcagttctttgaaattctgtatgataacaacggcaattacgtgttggcacacagcagatatcctgaggattactatttaaagattaagggagctgacaaagcggtatatttgggagataaagcaacttttggttcgaagagtgcggataaaatacaaaaaatattggctaaatatatcaactgtccttcgttagatgttactaaatacaacaccaaaacgaaagaaggaatgatacagttggtagatgattatacaaagacttgtaaataggatgtttttgggcaaaaagtaaaatgttttgtaatatttttgggtgtaagtattgccgataactaaaaaaatagtatctttgcccttgtaaatattatcagaataagcaataaaaaggaataccaatatggaaattcaaggacgaattataaagattagtcctacacaaaccgtaggacaaaacggcttccaacgccgtgatgtggtgatttctactgaggaacaatacccccagtatatcccttttgactttgtacaagaaaaatgtgtacttctcgacaactttcaggtagggcaattggtacgcatcagtttcaatattcgcggtcgtgaatgggtgaacccacaaggtgaaactaaatatattgtgaacttacaaggatggcgtattgaaaatgctgaggtggcacaaggagcctatccccctccgcaagggcaatattcaccacaggggcaacctgcttatccgccacaaggatatgcacaaccacagtatcagcaagcgcctctgcaatatcagcaagccccaccacaataccaacaaacgccccctcagtatccgccacaagcccctcaacaggcttttagtgcaccagaccccgcacagggagcttctgcccctactgaggaagacgatttgccattctaaagaatgatatacttaacgaacgataaaacatcttttccttcccccgatacggcttcggaggaaggaattgttgctttaggagggagtcttactcctgaacggcttattgaggcgtattcggagggtatttttccgtggtataacgaaggagagtcggtagtttggtggtgtcctgacccgcgttttgtactttttcgggagaaattgcatatcagcaagcatatgcgtaagatgctacgcgaagcaccttatcgcgttacttataaccgttgttttactgaggtgatgcgacagtgcgctactgttccgcgcaaagaccaagacggcacgtggattcaccccgaactgatagaagcctatacaggcttgcataaaagagggatagcacactcggtagaggtgtgggaaggagatgtgctcataggaggtttatacgggctaaaaatgggtaaaatcttttgtggggagagtatgtttagcaagcgcaataatgcgtcagaatacggctttatcatctacctgcaagcacaccccgatatagcattgatagattgccaaatatacagcgagtatttagagcgtttgggagcagaggaaatacctcgcaaagagtttttaacgcttttaggtaaggcatatgaagaaagagaaaatcgaaaaataataacttaaactgtatgaatatgaaaccttttacattattactatttacgttggctcttatgagctggggttgttctaaaaaagaggaggttaatgagaaaccttggaaattggtatgggaagataatttcgacaggggagatattttctcgacaggagtgtggacaaaaatgaaccgttggggagacaactgttgcaacacaatgagcaaagacccgagtttgtttgagataaaggacggtaagatgattctcttaggggtaactaataaaaatttaaaaaaagacccttcgccttacctcacagcaggagtttggacgaaagggaagaagtttttccaaaaaggaaagatagaagtgcgctgtaagctagagggaacacaaggagcgtggcctgctatatggttggttactaaagacactaaatggcctgaagacggaggggagatagatcttatagaacgcttaaattacgatccttttgtgtatcacactgtgcattcgccgtttacatataaaaagaaagcaggaccaaaaaactctacttctttccctattaatcctgatgactacaacacttatgcagtggattttgaaggagatgtgatacggttttacgtaaacggactgccttcatttgtctactcgcgtatgcctggtaaggagagtgaaaagcaattcccgtttgatttgcctttctttttgattattgatatgcaactgggaggtgaatgggtaggcgaagtaaaaccgtttgataaacccgtgagaatgtatattgattgggtgcggttttatcggaggtaaacgaggtataaaaatgattgttttaattactggagcttcacacacaggtaagacttttttagctcaaaagctattagaaaaatataaatacccatatctatcaatagatcacttgaaaatgggattaattcgcagtggttatactaaacttaccttagaaaatgataaagcacttacagattatatgtggcctattattcgtgaaatgattaaaacagccatagaaaacaaacaaaatcttatcattgaaggagtatatattccttttgactgggagaaagattttacaaaaaaatatctcgaggatattaaatgttattgtcttgtaatgagtgaaaactatattaaaacccactttgatgatataaagaaatatgcaaaagtcatagaaaaccgtttagatgatgattggtgtacaatggaaagtgttttagatgataatgcacagtttttagcccttgcaaagaaacacaacactaattttatactgattgatgataaatataaagtaaatatcgagctatgatgaactataaaatttttgttttggagagacttagagaggcagagaaacggtatagttatttgctaatggtgcgacgggcgactaacagcaagtagctgagggcgcctactcctatacatattgccattgcaaat

SEQ ID NO: 1215 - DNA, 24353 bp, synthetic construct
  source 1..24353: mol_type = other DNA
  misc_feature 1..24353: note = Synthetic
gcagtccttcggccttacaggggggagatgatagtatgtatattttattacccattttacatcttgcttttgactttcaatccgcaaccataaatccgcaatccgaaatcattgctcactcttcgtccgttctcaaagcttcaaggactgaaaaatcctcaagcgtggtagtatcaccgctgacggagccctgcgtagcgatctcgcggagcaggcggcgcattatcttaccgctgcgtgtttttggcagcgcttcagtgaagcggatctcgtccgggcgagcaagcgcgccgatttgttttgtgacccaaagtttcaattcagcattcagttcttcgctgggtttatgcttgctttcaagcgtaacaaaagctgatattgccgagcccttcatgtcatcaggcttgcccaccacggcggcttccgccaccttggggtgcgataccagcgctgattcaacttccgcagtgccaatgcggtgaccgctaacatttatcacatcatcaaccctgcccattatccagaagtaaccgtccttatcgcgccgcgcgccgtctcccgtaaaatacagcccggggaattccgaccaatattgttttttataacgatcatcatctccccatatagtgcgcagcatacttggccagggatgctttatgacataatacccgccttcattcgctttgcatggcttaccttccctggaaaccacctcaggcattattccaaagaatgggagcgtagccgtgcccggtttggttggcgttgcgccgggtatcggtgaaaccatgatcgcgcccgtttctgtctgccaccatgtatcaacaatcgggcacttacccttaccaattactttgtggtaccacatccatgcttcgggattaattggctcgcccaccgtgccaagaagccttaaggaatcaagcttatgcttcagcggccactcctcgccccatttaatgaaagcgcgaattgcagttggcgcggtatagaatatattaactttatacttatcgataatttcccagaatctatcgggattagggaaattgggcgcaccttcgtacataagcgttgttgcgccgtttaacagcggaccgtaaacaacgtatgagtgtccagttacccagccggcatcggcggtgcaccagtaaatatcttcgggtttaagatcgaaaacatatttgctggtcaaatatgtttgagttgcatagccgcctgttgtgtgcagaatacctttaggcttgccggtcgtgccgctggtgtataatatatagagcggatgctcgctatcgagcggttccgcggggcagtcatcatccacacccatcataagctcgctgtaccaatggtcacggcctaagtggaaatcaatgtgatgaccagttctgtttacaacaattacgttttctattgtgggacatccgggcatagcttcatcaacgttagctttcaggttaacaatttccccgcggcggtagccgccatctgcagtgatgatcatttttgcctgcgcgtcgttgattctatctatcaatgctgatgctgaaaagccgccaaacacaatcgaatgcaccgcgccgatacgtgtgcaggcaagcattgccacggcgatctctggtaccatcggcatatatatgcaaacgcggtcacccttttcgattcccatttttttaagtacgtttgcaaatttgcagacctgccgatgcagctcctggtaggtccatgtagcggtatcgccgttctcgccttcccaaattatcgcggctttggttcttttccagctatcaaggtgtctatccaggcagttgtagctcatgttaatttttccgccaacaaaccattttgagtgcggcgctttccactgcagaaccgttttccattttttgaaccagtgcagctccgctgctgcttttgcccaaaacttttggggcgcttttactgattcattgtacatttttttatactgcgccattgatctaatgtgcgcctttttggaaaattcagcgttaggtttaaatacgcgtttttcagtttccagtgatgtgaattttgactgatccattttacttatatttatgatttttcaattttttatgttaagaaaggcaaaataattttaatttgtttaagttgcaatttatatagatgttataaggttaatatttaaaggaataatgtcaccccttactgctaaggcagtcaggcggggtttcatctccaggtaattcaaaaggctacaataatttcatcccttcgggattaagacagggctctcatttttcttcgttagaattgacatcgttgaggttaattggaagcaacatccccatcggaaatttttgttaggggtgaatcaaagttcaaatgcggttgtacggttagcagaaatatcctcccccttcaaagggggaattagaagccgatgttgtttgttttggtcagttttctgaactggcatagttgtgggagtaccaaatttttagaattatcgctcccctctccttacaggagaggggctgggggtgaggtttagtaagaaatatcctcccccttcgagggggaattagaagccgatgttgttagttcgtgacagttttctgaactgacataggagtgggagaaccaaaattttagaattaccgctcccctctccttacaggagaggggttgggggtgaggttatataaaaagcaacatccccatcgaaaattttgttagaggtgaatcaaagtttaattgcggctgtacggttagcagaaatatcctcccctttcaaagggggaattaaatattgattcagaagaggaattggttgtagttagaatcaaatccaactccgaaggagtgaaattattgtagtcaaaacctacgagttgggtaaggtttatagagcctgaagggaatatagcctgagatccccgctttcgcggggatattataaataaggaacaaggataaatttatcaagttcaataaagagaataaatttttagttttgcagatatgacatttttaaatccgttattattatggggtttggcagcggtatcaattccgatattgatacacatattcaatcttaaaaggacaaagaagattgaattttctactttgatgttcttaaaggaaatacagcagtccaaatacaaaaagatcaagcttaagcagctgttgattctgttatgcagaatagcgttcataattttcctggttatgatgttcgccaagccttttgattccggctttttaggtacacccggtgaaaaagcaaagagcagcgttttgataatacttgatgattcattcagcatgcaatccagagataaaagcggcaatgactttgaaagcggtaaaaagaaggttacagagatcattgacgccttaggtacaaacgatgaactattttttacgacagtttccgggctcaacgctgcgcgttctactgttccctacaaagaattttcattaattaaagatactctgagccagctaaaaacatctgaggttacccgcgatataaacgaagtgctttattacgccgagagtattctgaattccgcatcaaatactcacaaagaaatataccttgttacagatgggcagttaagttttcttaagaaagatcttattccccaaagcgggttcaaaggaaaagataatttgcacttttctgtaattctaaccggttcaagagatgccaacaatatctcgcttgatacggtgaatgtagtatcaaagatcttcgaaaaggcaaggcccgtaaagatcaaagcgaagctgaacaatcacaacaacttcaactcagttaacaaaagcgtaattataagttacggaaatcacaaagaagaaaaggttctggatatccctgcaaatactaccgttgaaacagagttcatgatcaagccggaggcggcgggattttcttcaggcagtattgagcttgtgcagaacgatattgcagatgacgaaatttcaggtgataacaggcagtatttttcattttacattcccgaaaaagtgaatgtacttttggcatcaggctcccaaatggacgccgaatatgtgaagcttgttcttacaacatccgcccagatatcagccagcacggaaatatcaaccctgtttaacatcagggagatcaacgcttcggatatatcaagagaagacctcggttcatacaacagtgttgttattatcaataagccttcattttccgcgggcgaagttgacaaactgaaagagtacattgatgcggggggaggcgcggtgatatatcccggcgcgctttccgatatttcgaattacaataataccctgatgaaagaacttgacctgccgtatatcggcggaaagtattattcagaaactccagtgaaatttgagaaaattgattatgaccatccggtgtttgaaggtattttcaggagagaatcagataaaaataaccccggcatagaatcacctgaactaatttctggcttcagcctttcagggggcaaaaacgctttatcgatagtaacgcttacgaacggaacgaactttatggaagagtattccagggggaaaggtaaacttatcatgttcgcctcagcgccagatatgagcgcgggtaactttcccgttaagaatttattttcgccggttaccataagaagcatactttacacatcaaatattaacggcataaggcccgcaattgcaggcaaagattactatgcggagctgaaccggtacgagatgaaaagtgatacgcttctgataagctccgcaggagagaatgtgcctgagttcatagtgacgaacgaacagacacaactgctgaacctgggaagtacactaaacaacaccggaatttattctgtgattaattcgggcagagatatacttcgcgtacctgttaattttaatgctttggaatctcaaacaggcaggatgaaacccggtaatattgaggtattgtttaatgatacttacgcactgaatgctaatgttgtttcaccagaggaagtgctaacggcagcagtaattgatcttagaaccggcaaagacctgtggcaatatttcctgattttggcagttatattcctgataattgagtatttactttcaagatcaataatgaggaataaataaaaaatttataactttttaataagattttttttgagtatatttaagtccttaaaaataaggcgattacaagaaaattataaaaataacaggagaatcaaccaaatgaggtccgtaaaagttttatctgtatttttgatcttatcggcagtattattttacttcgggggctgttcctcagcagaacagacaactgcgaaattagcttataaccagggtgactataaaaaagctgaagaagaatttttgaaagaaactaataataaccctacaaacgaagaagcatggttctatcttgcaatgtcccgcgcgcagctcggaaaagctgacggtgttaaaaccgctatggataaatacagaggcatcggaaaaaatacattcagaacagagcttaccgaagcctggggcactatgtatgacagaggttacaagcagtatgaagacggcgaaaaaatagccaaaaccggcgcagataatgacgctgttaagaagttccaggaatctctgaataattttgaaattgctttggctttgcttccggatagcgcatttgttaaagataatatcgccgctttaaacggcagaataaatacaatacttgttaaaccaacaattgataaaggcgttgagcttgaaaagaacggcgactttgccggtgctatcaatgaatacaacaatggcttaagcaaggttacaaagggttcaggcgcatatgaagttattatctacaatatttcacttgccaatttaaaatggggtgagcagttaagggaagccaaccctgatgacgcatcatacaaagataaatacaatgcggctttaccttacctcgaagagttgacatcatcaacagataaagataacaaacttaacgcatacgaacttttgatccaggtttacgcaaacttaggtcagaatgaaaaagcacaggatgctattaagatgcgtgaccagttaaagaacgataataattaattttataaatgcagcaggatccccaaatacaaaatacagtaacacagaatcatcctgtgcatcctccaaagaaggataattccggcagatggttctggggtatatttttaagtttactgtttttcgggatgataattgttgcgatcagctttttcgcattcgcttccgccataaaacgtgacggaggcgaatttgtttccggcggttcaggtgataagattgcgatagttgaaataaacgatgtgatagtatcatctgaaaagaccgttgagcagataaaacgcttcagggaagataaatccattaaggctataatactgagggttaacactcccggaggcggcgtagccgcttcacaggaaatttacgaagaagtaaaaaagacccgtgacggcggaaagatcatcgttgtatcgatgggttcaatagcagcttcaggcggctattatatagcagtaggttcaagtttaataatagccaatccgggttcacttaccggcagcattggagttatagcgcagttcataagcattaaggatctcgcagaaaaacttggaatttctcagactaccattaagagcggaagtttaaaagatgccgggagtccctttaaaaccatgaacgattccgacaaggcatatttccaggatgttgtagataacagtttcggtcagtttcttgatgtagttgccaaagagcggaagatggataaagagacactgctgaaatacgcaaacggcagggtttttaccggcctgcaggccaaagagtatggattggttgattcactgggtacatttgaagatgccatcagaattaccggtaaaatggcaggcattgaaggtgaacctagaattgtaaaggaaaagaaaaagttctctttctttgaagaagtaatgggctcaaagatagaagatgttactgatattaaaggtaagctatttgatgaacctatattgcagtataagtttcagccataaatatattacaataaaataccggattttaagttaaattatatattataatttatgacaagagcagatatagcgaataaaattgctaacgcaacaggattaagcaaggttgaaacagaaaccgttgttgaaggtttcattttatgcgttattgacgcgctgagagaacaggaaagcattgagatcagaggttttggtacgtttaaagtaaaggaacgtaagccacggattgcaaggaatccgaaaacaggcgctaaggttgagcttggcagaagatttgttccgatgttcaaggtatcaaaagagtttaaaaagacggtaaatgattcactgcttgaaaagtataatgagaagtaatcagaagctggcaaaagtcaatcccgctaagcagaaacgcgggactgcaaaaagcgcagaaagcaaaagtaagaaagcaaaaaagataaataagatataaaaatataaagtaaaaatttaataataatcataaagcaaggagcaatttcatgccaagcggtaaaaagagaaaacgccataaaatggctactcacaaaaggaaaaaaagactgagaaagaacagacataaaaagaagataaggtagtttttttatagtttttgaatttcagttcatattagggcggagagttttttctctgccctttttttgaggcttaatgtcaaatgccagaatccaaatgacaaatcaaataccatttgatcaaataatgccacctcttactgctaaggcagtcaggcggggtttgggaatttccatttcattggactacaataatgtcaccccttcggggttttgataaaattcagcaagtatccaaaaacaatatcactctttgcggctcaatcatttatcaaaaagtatacgcaacgatacttaacacaaaaatcgaaaatggagaatcccgcttacgtggggatacaaaaaaaagcccaaatgcttttgacatttgggctttgatctatgttataagtttattcgaaaatagagatccccgcctgcgcggggatacgaataaggctatcttcttacttggtaattcggtgcttccttggttacaataacatcgtgggggtgtgattccttcagacccgcattggttatttctatgaacttggcgttcttctgtaattccgcaatagtaccgcatccgcagtaacccatggcggctcttaagccgcctaccatctggtagatcacatcgcttaggggtcctttataaggcaccctgccttcaataccttcgggtaccagcttgcttagctctgactccggatcctggaaatacctatcaccactgccggctttcatcgcttccagtgagcccattccacggtacattttaaatacgcgtccttcatacaatactttttcgccgggtgattcttccgtgccggcaagaagtccgcctaccataatacaatcagccccagctgctattgctttgggaatatcacctgtttgttttatgccgccatcggaaataattggtattttatattttgccgctgctgatacagcgttgaatactgccgtgatctgcggcatacccacacctgcaacaactcttgtggtacagattgaacctgcaccgataccgactttaacggcatcgactccggctttgataagatcaagcgttccctctgcggttgcgacgttacccgcaattacatcaatatcaaaattcttctttatttcttttacaacgttaagtacaccctgtgagtgaccgtgcgcagtatcaacaaccacaacatcaacgcttgctttaacaagcgcggctaccctatcaagcgtatcggatgcaataccaaccgcagcgccgcaaatcagcctgccgtgtgaatcctttgccgcaaacggatgcttcttccgtttgatgatatctttgaatgttatgagaccttttattttgccgtgtttatcaaccacaggaagcttttcaactttgtgcttctgcaaaatacgctccgcctgctcaagcgtagtaccaaccggtgcggtgacgaggttttccttcgtcattaattcagacaccttggtgttttgatttggctcgaatctaagatcgcggttggttaatacaccgattagttcgttctcatcgttgattatcgggaaacctgaaatcttataacgctccatcaagcggttggcgtcgccaacggtttggttaaccttcagtgtgatcgggtctaagatcataccgctctcacttctttttaccctgtcaacttcagatgcctgcttttctattgacatatttttatgcaaaatgcctataccgccttcgcgcgccattgcaatggcaagctcagattcagtaactgtatccatagcggctgaaagtatcggggtgtttaaagtgatgtttttggttaatctagcggaaatatttacgtccctgggtaagacctttgattttgcgggaacgagcaaaatgtcatcaaaggtaattgctttttcgattatttttgtgtgtgccatagcaaatatagctaaaaaatgtttgaattaaaaacccacagattttggcacaacaatttaactttgagttgtattgttcttttaagaaacaaaaccaaaagtctgccacaaaggctcaaagaattgattttgaaaaaatagacaaacccttaagttgacttgaaataaattaaataaataacaaagtttaaattatagggggtggcatttagccgatttggttaacgtgctggccttttttttatgtattaaatcaaaaatcttaaaaaatggaataaaaaaagcgacctgaaaccgatgaaggaaacagaccactttaaatgttttcacaacggaataatccttattgtgatttgctttatttgttcatttgcaagataataaataatctaataaaatacaaacataatgaaaaaaatacttggactagacttgggtacaaattcaattggttgggcattaattgagcaagactttgaaaatagacaaggaaaaatacttggattagggagcagaataattccaatgagccaagaccaattaggagattttggtaaagggaattcgatatcacaaactgctgaaagaacaagaatgagaagcgtacgcagactaagagaaaggcatttgcttagaagacaaagactgcttagattgttaaatatattaggctacctaccagaacattatgccctagaaatcgacttcgaacacaggttaggacaatttttacctgaaaaagaaccaaaaatcgcttataacaacaaacaattcatttttaagaattcctttagcgaaatgctggaagactttagaaaacaacgccctgactatttaaaagatgaagctggcaatgaaaaattaataccatatgattggacaatttattttttgcgcaagaaagcgcttactgaaaaaatagaaaaagaagaattggcttggatattgttaaatttcaatcaaaagcgcggatattatcaattgcgaggagaagaggaagaagaatttttaaataaaatagttgaatttcattcactcgcaattaccgatgtaaaagcagatgatcagcaaaaaggcaaatcagaggtttggtacagtttagtgctggaaaatggttggatttaccgcagatcaagtaaaattccattatatgactggaaagataaggtaagagatttcattgtaacaacagaactaaatgatgatggaacagtaaagaaagataaagaaggaagagaaaaaagaagtttcagagcacctggagaagatgattggacattgctaaaaaagaaaactgaacaagaaattgaacaagctaacgaaacagtaggagcttatatatacgacactttgcttcagaacccgaaacagaaaattagaggaaaattagtacgaacaattgagcgcaaatattacaaggacgaattaaggcaaattctaaagaaacaaagtgaataccacagtgagctgcaggatgaggaaatctataacgattgcgtaagagaactctataaaaataatgaaacacaccaacttaccttgagcaaaagagattttgtacatcttttcttagatgatattatcttttatcagcgacctttaaaaagcaaaaagtcatctataaccaattgtacacttgagtatagagaatttacagataaagaagggaaaagacaaatacagcatctaaaagcaattcccaaatcacatccagcatatcaggaattcagactatggcaatggatttacaatctaagcatttacaaaaaagatgatgacaccaatataaccaaatcagttctacagaatactgaagattacgaaaaactattcgaatttttaaacaacaggaaagatgtagatcaaaaagctgttattaaatatctgctggctaatacaggattaaaaggcaaagatttaaacaatgaaatcattaaatacagatggaactttgttgaagataaattgtatccatgcaacgaaacacacactaatattaaaaacaggatagaaaaagtagttaatattggtaatgattttcttactgctgaaaccgaacaacaattatggcacattatttactctgttactgataaaactgaatacgaaaaagcattaaaacaatacgctaaaaaacataaattagatattgattcatttgtagagaatttcatcaaatacccacctttcaaaagtgaatatggaagttattctgtaaaagctatcaaaaaattgctaccactaattcgtttaggcaaatattgggaatgggataatattgatcataagacaaagcaaaggattgataaaattataaacgcagaagaagattcagaaattagagttttagttagagaaaaagcaagtaaaaatgaattaaagaccccgaacgacttccaagggttacaactttggctggcaagttatattgtatatgaccgacattccgaagctacgagtaacgataaatggaactcactggaagatctttcacaatatttagaagatttcaaacagcactcactacgtaacccgattgttgaacaagttataacggaaacacttagagttgttaaagatatttgggctaaatttggaaatggcgcaaaagattactttaatgaaattcatgttgaacttggaagagagatgaagaatactgctgaagaacggaaatcgatcacaaatttagtcgtagaaaatgagaatacaaaccttaggataaaatccttacttgctgaactgaagaatgatccgaaaattgaaaatgttaggccacactcccctatgcagcaagaaattctaaaaatttttgaagatggtgttttaaaatcgaatattgagctacctgatgaaattttaaaaataagtaaatcagccctaccaacaaattcggagttgcagcgatataaattatggctggagcagaaataccgctcaccctatacaggtaaaatcatcccattgcataaattatttacacctgcctacgaaattgaacatattataccgcaaagcaggttttttgatgatagttttaacaataaaataatttgcgaatcagctgtaaataaattaaaagataacctgcttggtttggaatttgttaagaaacatcatggtgaaattattgaattgggtataggcaacgaatctgttaagatattcagcgaagaagaatatttggattttataaagcaaaattacttaaataatcgctcaaaacgtaataagctactacttgatgaaataccagataaaatgataaaaaggcagttaaatgacactcgatatataagtaaatttatttctgcgttgctttcaaacattgtgcgatcagcgcacaatgatgacgggattaattccaagaatgttatacccggtaatggaaaaattacttcccgattaaaacaagactggggacttaatgatgtctggaatgatttgatactccctcgctttcagcgaatgaacaaacttacaaacactactgattttacaacctacaacgaaaagtatcaaaaagaattaccgactgtccctattggtctttctaaaggttttcaaaagaaacgtattgatcatagacaccatgctttggatgcgttagtgattgcttgcgcaacacgcgaccatgtgaatttattgaataatttatatgcaaaatccaatgaacgctttgacttgaataggaagctgcgaaaatttgagaaagtatcttataaacaacccaaaaaaggcaaaacagttgaaagagaagtacctatggattttattaaaccatgggagaattttacagaagatgcaaataataatttagaatctatcattgttagctttaaacaaaatttgagggttattaataagacaacaaacaaatatactaattggatagagaaagatggtaagaaagtaaaaggagttgtatcgcaaactaaaggtgatagctgggctataagaaaacctatgcataaggacactgtttcaggggaggtaaaactggcatggataaaagtacccaaagggaaaaggctaacagcaacaagaaaaccaattgacattacttttgatttaaaaacaattgaatctataacagataccgggattcagaagattttgaaaaactacttaattagcaaagaaaataatccagaattggcatttacacctgaaggcttagaggagatgaataaaaacattttgatatacaatgatggaaaattgcaccagccgatttataaagccagggttttcgagttaggaagtaaattcccgcttgggcaaattggcaataaagagagtaaattcgttgaagctgcaaaagggacaaatctcttttttgcaatttatattgataacaaaggcaagagagattacgattctataccacttaatattgttattgaaagacaaaaacacggtttaaatgctgtgcctgaaacaaatgaaaaaggatataaattactatttcatctttcaccaaatgatttggtatatgcaccaaccctagaagaaatacctgaaattggccataaacaaatagatataaattatataaaaaaagttaacagggtttataaaatggtgagttcatctggcaaacaatgctttttcataaagcatgaagtttccacacctattgtttataaatctgagtattcagccttaaataaaatggaacgttctattgatgatttgatgatcaaagacgtttgttcaaagataattgtcgatagattaggaaacgttatatatacataattgataaaaaaaacattatacatcggttcgccggctcatttgaactgtaagcaacagcagttgataattgatataaagcctgagcaacttgaaatggactttatcgattatgataattatgatgattggtatgaaaaccgaaacaagtttatagaaaaaacagcagaacaaggcacagcgaagaggcatacaatacccatagaggatataggcgtagtaatagccgatcactatggagttactctctcgcaatatctcctttcagagctattagaaaataacgctgctgttataatatgcaacaggtcacatataccaacaggtatgttcttaaatcttgaaggcaacacacttcaatccgaaaagttcagagctcagataaactcaactattcctttaaaaaagcagttatggcagcaaactgtacaggcaaagatctacaatcaggcacaattgctctcaataaacggagtaccggtagataatatgctaaaatgggttaaagaggttaaatcaggtgacgccgggaatcatgaagccagagccgcggcattctactggaaagccatcttccctgataatattgatttttaccggtcaagaacaggtccgcccccaaacagcctgttaaattacggttacgcaatattaagggcaataacagcccgagcacttgttgcaagcggtatgctgccaactcttggcattcatcacaggaacaaatacaacgcatattgccttgcagatgacattatggagccatacagaccatttgtagataagatagtatgcgaagtgaccgataacgggaacgaacctgcagaacttaacccggcaattaaaaaacggcttcttgaaattgcaacagcggatatatttatagaaaaagaaaaaagtcctttaatggtaggtatgcaaagaacgacatcatcgcttgcgaagtgttttgaaggcaaaacaaaaaagatcatttatcctgaatttatacaatgctgaaattagacgaatatagaattatgtgggtactcgtattctttgaccttcctaccgagactaaacgggacaggaaaaactacgccagatttcgaaaatctattatgaaagatggctttgatatgttccagttttctatttatgtgcgacacagtatgagtaaagagaacagcgatgttcacgttaaaagagtaaaatctgttttaccgccaaggggacatatagggatattacgcattacagacaaacaattcggcgaaattgagatattttatggtaaaaagaaagaagaagtaaaagcgccgccccagcaattagaattgttttaagcgttttctataataaatgcaaagcttatagaaataaaaaagccgtttaatatcaattagacggctttaatctttggcgatttttttgacactcaaatagctgtaagtaccttgttttattagacgatacaagaaacagattgtatcaaatatcgtcaaagaacaaattgaaagcaaatcacaacttaagccgcttgcgcctggtgtaacattgattgtatcaaatatcgtcaaagaacaaattgaaagcaaatcacaacatgacctcacggacataaattttaacaagcattgtatcaaatatcgtcaaagaacaaattgaaagcaaatcacaacggcttggtagatatatactgaaatttcccaattgtatcaaatatcgtcaaagaacaaattgaaagcaaatcacaacaaacaggcctgtagtatatatgagcaaagaattgtatcaaatatcgtcaaagaacaaattgaaagcaaatcacaactaacgttgggttggtgttaatgctttccttattgtatcaaatatcgtcaaagaacaaattgaaagcaaatcacaacgagttattgatcaacttcttatctgatttattgtatcaaatatcgtcaaagaacaaattgaaagcaaatcacaacagttgcggatcagataatactgtatctaaattgtatcaaatatcgtcaaagaacaaattgaaagcaaatcacaacatggatatacaggcttcttcgtgtcagcttattgtatcaaatatcgtcaaagaacaaattgaaagcaaatcacaactaaaagcgattcattacagaaagttgcgctattgtatcaaatatcgtcaaagaacaaattgaaagcaaatcacaaccaaaagaattcaagttcgttcagctgcattattgtatcaaatatcgtcaaagaacaaattgaaagcaaatcacaacatatacgccggtcgtatcccacacctgcgaattgtatcaaatatcgtcaaagaacaaattgaaagcaaatcacaacagtaatgcgttgatgattttatctgcctgcattgtatcaaatatcgtcaaagaacaaattgaaagcaaatcacaactctattgcgacagcatctgcatcaataaatattgtatcaaatatcgtcaaagaacaaattgaaagcaaatcacaactgaagttaaaatcaatattgtaagtgacgaattgtatcaaatatcgtcaaagaacaaattgaaagcaaatcacaaccaagaccaacaggcagttcgctatagttcaattgtatcaaatatcgtcaaagaacaaattgaaagcaaatcacaacaagcagggattgcagaggctctaagccttcattgtatcaaatatcgtcaaagaacaaattgaaagcaaatcacaacgctcaacggcagattgcttgacgataaagcattgtatcaaatatcgtcaaagaacaaattgaaagcaaatcacaacagttaacggttgatattccctccttccggattgtatcaaatatcgtcaaagaacaaattgaaagcaaatcacaacctccaaatggtttaaaccatttttctcggtattgtatcaaatatcgtcaaagaacaaattgaaagcaaatcacaacataaattctgtggctgaagttaagcagagtattgtatcaaatatcgtcaaagaacaaattgaaagcaaatcacaacaatctgatttgtatatgcaagtgaaccaatattgtatcaaatatcgtcaaagaacaaattgaaagcaaatcacaaccaggattatttacaacggcacaaataccgtattgtatcaaatatcgtcaaagaacaaattgaaagcaaatcacaactgattccgtacctgccataatgctttacatattgtatcaaatatcgtcaaagaacaaattgaaagcaaatcacaactcgtggtgtcatgagaatttataaattaaaattgtatcaaatatcgtcaaagcaaatattaaatcctatgcgggattttcgagggcaagattgcgttcttcatcatcgtcggtttctttgtactttttaagatcaggatttgcggctttatgcctggatagatatgtgtaaattgcaggtacaataaacagtgtaaggaatgttgagaaaatgagtccgccaacaatagcgataccaagcgatacacggctgcctgctccgataccgatagcaattggcagcgcgccaagcgcggaggcgatacttgtcatcataattggtctgaatctctgcacagccgcttcatcaacggcttctttgacactaaggccttcttcctttttctggttcgcaaattccacaataaggatcgcatttttggtaacgagcccgatcagcataattatcccgatttggctgaagatattgagtgtcatcccgaacacccaaagcgatagcagcgcgccgaagagcgcaagcggaactgtaagcagaataatgaaaggatcaataaaactttcaaactgtgcagcgagcaccaggtaaataattatcagcgcaaaaacaaaagtgaacaataagcttgaagaactttcttcaaaatcctttgactgcccggcaagcgccgtgttaaactcttcaggtaaaacctctgccgcaacgcgccgcatagcggcaataccatcaccaagggtataacccggcgcgagaccgccggaaatagtagcggatgaatacctgttataacggtaccttgttgtgggagccgcctgttcggttaaactgaccaggttatccagctgtatcagctggttatttttattccttacataaagatacctcaggtcatacgggttatcacgtttatctcttgtaacctgccctaatacctggtattgcttgccttcctttataaaatagccaaacctctggctcccgaaagatatctggagtgttgatgccacatcactgaaagatacaccaagatctgaagctttttgtctgtcaattgtcagatttatttcaggtttattgatcttcaaatttgcgtcaacaaaagtaagttcaggctgcttattggcttcttcaagaaattttggcatgaattcttcaagtttttcatattcaggagcctgcagcacaaactgaataggctgtccgccaaaccggccgccaattgttggcggctgcgaggggaatgccctgatccctgatatctggtttatttctttggcaagtttatcatatatctgctgctgagttctttccctttcaccgggcggcacaagatacatgttaataaacccgttgttcacctgtccccctgccccaacatttgtgataggggtttgaatttcaggcgttgatgtaatcacaacatcgctcagatcatccatatacttctgcatgtactcaaatgttgcgccttcaggcgcggttgcctggatcctgatattagaacggtcttcaagtggagccagttcgctttttagcgaggatccggttatatatataagcacacccacaatagctataataataaacgcagcccacctgatcttcatgaaaccaatgagcatttttctgtaagtatcaattgtctttacaaaaaagggttcggtcaaactatagaatttattatgcttggcacttgctttcagcagtcttgagctcatcataggcgtaagtgttaatgccacaaatgcagatacaagaactgaaccggcaattaccacggcgaactctttaaagagcttacccgttgtcccttctatgaacattattggcagaaataccgccacaagcgcgatagtaattgatattacagcgaagtaaatttctttggagcccttataagctgcttcaatgggattcatcccctcttctatctttgagtaaatgttctcaagcacaacaatagcgtcatcaactacaagccctatagcaagtatcatacccacaagcgttaacacgtttatggaataccccataagatacataatgaagaatgcagagataattgatgtcgggatagcgactattggtattaacgttgaacgccagtctctaagaaaaaggaaaattataagtataacgagtccgaatgctatgaatatggtctcttcaacttcgctgatagtggttctgatatactcagaaaaatcgaagccaatttcaatgctgtaatcagcggggatatctttttttaactgctcatatcgttttttgaattcatctgaaatatcaattgcgtttcctcctggctgcattgtaacggctacgcctacaccaagtaaaccggcgcgcttcagagagcctctttcgttttccggtccaagctcagcatatccaacatctttgaacctgatcactgtcccgttggtttctctgacaatgaggttattgaactcttcagcatcttttaatcttccgagcgtacggatcgtcagctcggttttatcaccttcaattctgcctgaagggagctcaacattctccttttcaagagcagttctcacatcaagcggagtaagctggtacgcagcaagtttttcggggtcaagccacatgcgcatggcatatttacgctccccgaaaatacggactgtgcttacaccgggtattgtctgaattctttctttgataacatttgttgcgaaagcgttcacttcgaggatattcctggtattgctttgcacatacatgaagattatgggtgagtcatccgcatcagatttctgtactacaggcggatcaacatcggtgggaaggttcctaagcgccctggaaacgcggtcgcgcacatcatttgaggcatcttcaagattccgctccagggaaaactcaatggttatctggctttgtccttcgcggctttgcgatgttaaactttttatgccatctataccattcaatgattcttccaggggttcggtgatctgtgtttctataacttctgaattcgcgcccgggtaaccggtggtcactgtcacaataggcggatcaacacttggatattcgcggacttcaagaaaggtgaatgcaacaattccgaatataatgataataagcgaaaatactatcgaaagtacgggtcttcgtattgatgttgcactcaggctcataggctaatttaccttctccacttttacaggtgaattttcttttaacctgaggatatttgttgttactatagtatcgcctgctttaagctggtctgatcttatttcaataaaagcctctgtccttgtccctatctccacatcagtcaactttgctttgccatcccttataacataaacgctttgtcctttcagtttagggatcaaagcttcggtggggatcataatagcatctttgttttcactgataaggaatgtaacattggcaaaagtacccggcattaattttctgccggtattattggtaacagcccttagaacaagcgacctggtattgttttcaacttttggttcgtacgcgtaaacttcggcttcaaactcgccatcgagtccatctactttaaatttgatcctttgacctttctggaaaaggtagatataacgttcggggatcgagaaatccacttttactttgcttacatcctgcatggttgtaagtacagtttgcggtgtcacatatgctccgttgcttacgttccgcagtccgatgatgccggaaaacggagcgcggacatatgttttggatatatcgatacgggtaatggaaatttcggcgcggatctgttcaagggtagcttccatgatgtcgtattcttcctgtgaagttaagcccttttctatgagctgcttttcgcgttcgagtttggtaactgcaagcctttcatctatctgctgcctgcgcagcttcgcagtaagatcgtcagcatcaagtttaaaaagagttgagccctttccaacataagtaccttctttaaaatagatcccgcgaatcttacgggatatttcgcttctgatctctgcttcttcgttggctataatgttacctatagctttgatatcattatcaagggtcgctgtttttagcacaaaaccatcaacactaattgtctggttctgctggttaggtccttttttctgatcgggtttatcagtgccggcagtgaactttggaatgaatataaaaccaagaatgacaagtattatagcaggaaccgcaattattaatgtttttttcaaatgaatatcggaatatttatcaaaaatacgaaattttagctactaaagaaatgggtatcagactaactaccattaaataatggcatttaaagcattgaagttcctattgttacaaatatttacaaacataaagcccttaaaactgtgtattttttaaaagcatttaaagttgtaatttgagaattataacataatcatattaatatgaaattagataacaaaacagcgataatcacaggcggggcaagcggaattgggcttgaaagcgcgaagctgttcatttcagaaggcgcgaatgtgataattgcggatttaaatgaatccgatggaaaacccgcagctgaagctttgggcagcaggtgcagatttgtaaagaccgatgtttcagataaatcatcagcatatttttgcgttatggaagcacttaagagattcggaagcctggaaattctagttaataacgcgggaatcacaagcgatgcttcattgcataagatgtcatctgagcagtttgagaaagtaattgatgtgaatctaaaaggcgtattttttatgacgaagtatgcggcagcacaaatggctgaaaacaactatggaaggataataaatacttcatcaattgtggggttatatggtaacttcgggcagacgaattacgcggcctccaagagcggggtgattggaatgacaaaaacctgggcaagagagctcgggcgaaaaggaattacagtaaatgctgtcgcacccggatttattgatacaggaatgctcaacacagtacctgcaaatattctggataacattaaacagcgcacaccattaggcagacttggttcacccgcggacatcgccaaggcatatcttttcctggcatctgatgatgcggcgtttattacgggaataacactgagtgttgatggcgggttggtttggtgaatttagttacatgggcaggctgcaggtggtatgctagaaataatagaaaatagaagaaggaattttaaccgcgcaggattagcgttacctttcttttataatatcacccgttccgggtttatctcctttctggattaacggaatacaaaaatttcaccgcttcgcggttttgcagatagcaatagattttaaccccgaaggccatggactgccttgcagtggtgatattattgtacaatgatatcatctgttctataagtcgaaaagacttttaattaaaatgagacgccccagccatgccataggcaggcgcagcggggcgtctgtacaaataaaaatattttaaaaaaaaagacgcctcaccggggcgtctctacaaaagctggatatatcatactcactgtaaaagcagagtctctgcgtattttgcaggtctctgcgtaaatatttatttagttaaaacaagtttaatggtcttggtaaaattaccggctgtaagtttagcgaaatatgtgccgcttggcataaaattgggtttccattcagcttcatatttaccggcggtaatactgcctttgaagagctccgcaacctgcctgccgcgaatatcaaacactgccagcgaagcatcacctgcaactctttcggctatatcaaacttgatcttagttgccggattgaacggatttggataattttgatgcagttcaaagcttcgcggcacttctgtgcctatctgctgaataccgattggatcgatgatctcgaaattaagcatcataccttcatcttcatgctcaaggttgtgacaatggaagagatacagacctttatattctgtgaatttaacaagcacttcgactgtttcaccaacaccgatatttattgtatccttccatcccttatcagaaggagcgatgtttgtgttcccatttcttgaaagcagctgccattgtgtttcatgggtatgcattggatggtagtcagcggtttggttgactatcctccacttttcaagtgaattcagtcttgtctgccagtctatacggtttatatcaaacgtcaaaccgtttattttatgcataggatgcgaactgcccattgttaaagtgaacgtccttgtctgtacaacatcagccggattgtaatatgtaataggattaaaagcaccgggtacaacaccgcctgatgtgttgttgtttacaacatcaaacctgatgatatcaagggctataccctgtttataaggcagagtaccgccgaaagaatatgccagtgacctcaatgtgacatttgagccgatggtgtttcctgaaaaatcaacaagtatttcaacacgctcaccgggagcgagattaaattcagttacctgcacgggcgcatcctttaaaccgccatctgttgcaataatgttaaacggcctgctatctgaaaatgctattttatatacacgcgcgtttgaaccatttagcaatctaaacctgtacaatgtgcggctgacttcgaagtatgcatttggagtcccgttaaccagtacggtatcaccaagatatccccaagtgtgttcaggggaac

SEQ ID NO: 1216 - DNA, 24344 bp, synthetic construct
  misc_feature 1..24344: note = Synthetic
  source 1..24344: mol_type = other DNA
ttcccgggcatgcctggtggtggcggttctgaccatgcttcatttgtggcggccggagtaccgggaatttcattaggctccctgaactgggggtattttgggtatacatggcacactacaaaagatacgtatgacaaaatcgtttttgatgaggtgaagaataatgttatactgactgctgcattagcgtatatggcttctgaagatcctgaattctcaaacagagaaaaaagagtaatgccacaggatgacaaaggcgaaaccataaagtggccggaagtgaaagagccgagaagaagttctaaggattacaaataagaattctattactaacagaatcatcagtataaaaggttgcctaataaagcaacctttttctttataatcgtttctgattttatacttggagctatagaagctatgcacttaccagtataatgcggtgaccggagctgaaaatgggatgatcaccacctttgccaattcaggctatcctggtgatgatggggcaggccttcagggtacgattggctatactccttatacagctgtttatgaaaatggggcatggaagaaaatacctaaaatttaatatgaactattttaaataaatcactatatttggataaataataaaatagattttcatagacttcagtaaaaagaaactgttttcgtttcagcttcttttttacaatacttctttttctggtcatttgtacaatttgtgtacatatggctaaacaaaaataagagacagcctcgctttgagctgtctctttttgcattctacaatagggaatgatttttaacaaataaccaaacctaacaggtttcaaaaacctgttaggtttatcttatatcatttttttatcaatgtaaatgatctgcttcccaatttttgatctgcttttgaacttcttcttattgtacatatctgcctgtataaattgcaataaaaatacatgtgaatgcaaaataatgtagggtagagatttttaattttaaaaaccttataggaataaaaaacacatcaaattatgaaaaaaaatatctcgaatcgggaggaccctgttctgggtacaagcggatctccagtgaacctgaatgtttattttgtgaaatcgggagagaccctggaaagtatttcatgggatttacatctcgaaaaccctaattatctccgtgaatatcataatgcacgatgcagccctttagatatagttccggaaaacggaacattaagacttctgcaaaagcttcacattcctgtatctgataaaatactaaggattaacagacagatccgggagaagggagaaagcctatgctatcttcttcccaatgggaaaattccattgaatatcaatctgatcaacggagattactttgtaaggcagaccgaaagtgatgatgcgatacaaaaatatgagtatgcttataaactgcatttcagttatttcaaaacaatacaggacaggcattatatccatttctcaatgagcagtttccaaaaagacggtgaagaaccggaagagaaaatcaatcatctggcggcagatctggtgaaaataatgtatccggtaaccttgatcctggatagctcaggaaactttgtagcagcagaatcttataaagaagtaaaagaaatgatccgtgaaatagaggctttgaaagcttatcatgccggagcttatgccgcttcccatattgaccagatgaaacaaaatatatcagattcacagaatatgtataggggcttaaagaagatactggcactgcaatttgttttcaataaattttaccaggcagaataccgttcagaagataccacattgccttatcgggatgagttttcatggcttgctcctgcttctcccattcaacttgaaatgattcataagaccttgttgcagacagatcctcagtttgttgaacttctgcaaactggcaagtccgtagattatcgtactgctcaggaattattttatacagatttcgagtatgatgaaagtatcagacctcattcagattctgtaaaggccaaacatcaggcaaaatatattttagatagtaaggacttttctatacagaaaattaaagcagagtttgatcttcagatgcctgattataagaaaaaaatgacttttgagttagaaaaacaaccttgataccaatacaaatacgatgatgtcagaaaatttatcagctcatgatggcaaacactttgtcattcaaaagggcaaagctcaatgtaatcagggaaatcagtttccccacttcagagtaacatcccatcaaaaacactattggaatacccaggatgccatagccgatcatcttgccgtaaccgaagatgatatacagtttgatcctcccgggccaagttttggagcctgtagattgaaacctacatcaggaggctatctgccatgcacttttgctgctgcaggaaagtggcaaaaagtgtatgaaaaaaccaaggtcatgaataagagctgtatttctgagatttctgaactgatgtgcagtaccggtgggaaaatcacaataaaggaacatggccagacttctgtgatgaaccggcagaatataacacaggcagatccgggaacctatcagatgattaatccattcttagacctgaaggaatcacaaaaggagctggaagaccctgatccggtttatgaataattttgaaaaattgagaggtatggcaaagttaactattacagggaataccgagcccagagtcggaaatacagagatatattccctttctgtagcagatggtcttacgttgttgaatcctgtgtcttttccgttggcaaagatacgctggaacatccatgtacaggataaaaaaggatggcggataacgaatggaaatttgaaggaaggcgaaatggtttcctatacatttacgaataagagtctcaaatacaaggctctgaagattgaagttgtcagaggaaaggataggggagatttgtatatcaggccacaggctgccgaaagccccaaaatagtcagtgtagaattgctggatattaattccaggcggattcccaaaggaaaacttctgcattataccgatacgataatagctaaagcctattgtgtagggatgtttgggcaaaaagtttcgtttagtctttgggaagatgacgccataggtaaagggcatgacccggtggtgaatatgatgaataagatcaatcagattcctgtcatcggtgaggtggatcatgaaggggttgccagggttgttttcagattgtcatcttacacaatggctattcagatcgccaatatgggagttgcaagaggagataaaaacgaaggtaaaacccacgaatattatgtgactgcagaaaaggtctccaaacatattctaaagaccagtccgaacgtaaatgtagctaatcctacctatatccctccggcatctgaacaatccagtctaccaaagcatattcctcccggaaataacggatcaaaacaagattggccgaaaccgaaagaaaatacagccaaatttccacaaaccccggaagcccagcaacaggctgaccctgaaggaaacatcctgagtgccgaatttacagatggtatgggaaaacctttgaaaaatgcaaaaactggaaatatcgtttccattaaaataacttcccaaaatatgaaagggaagaatgtaaaaataaggatctgggaagaagatctgtcccgttacagcaatgatcttttgtacgaaatatccgtaaagttggcttatgataccactaacttcatcaatgggattactcttaccaaagaaatgtatactaaaggaaacgggtggggagaaggaccttcgcaggaatatttcatagaagtagaacatctcaatacttctgtaacttccagagtgatcccgataagtccggatgctgaacctgtgaaagtagatcctaatgattctcctgtgatgattaaggagccgaaacgggagaaaaaagttgaaaaagcatctggttgtatttgccagcaatatgatctagtctggggtaataagattggttgtaatgaaagaaaaaaggttattgaggttgccaaaaatctgaatatcgatcctaattggttaatgacggtgatggcattggaaacaattgaaacttttaggccatctatagataatggtgttggatatgttggattaatccaatttggaaaagaagctgctaaaacgataaagactacgcaagatcaattgatcaaaatgtcttttatagagcaaatggactatgtacagaagcatttagtctcccataaagcgaagtacaaaacattaacagacttatatttagcagttttatatccaagtgcttgtgggcatggttccgaaaaagactatgtagttttgcatggagcagcatatagaaataatccattattctttaaagaaaaaggtgaatgggaatgggcatataaaacaaacaataagggaaaacaaataaaatataaaaaagcaacagatccagatggaaatacctatgtgtgggaggttgcagcagcagctcaagaggtttataatcgaggattagatataaaagaaaatcaattcagctgtggagtaaataaagaagaaaaattccttaatgggaaatgtgcaaaagattgctcacaatgttttgaatatgcagacgtagtgagtaatcctaaagttaatgatcaaagtggtaataaaaaccataatcggtatcataaagcacaaagaacacgttcagatgggtcaaaatattttcatacaggaacagacattctttcgattgttggaacggaagttcactctatgatgtgtggtgagataattcacacccgctcagaattaccacaaaatgatagagtaaaaggttatgaatcttctacaagttatggtaacaccgttacaattaaatcaaaagataaagatggtaaaacagtatatactttttacgcccatttatctaagataaatgttaaaattggccaaaaggtaaagcataatgaaattattggtctgtcaggaagtacaggtaatgctatgcacatagaagtacagcatagacacattcatgtagaggctggaactgattatgaaatttatagcggtgggaataaatgtaaacttaaaaacagaataaaccctgaaaattatatgaaatctaaatttgataacaaaggcaatactttatgaaaaatattaaaatcatactatcaattttaatcactttttgcttaatatcatgtaatggacaaaataaaaatgaggaacaaccaaagtccttagaggttaatgatggagttccaaattttttggataaaagattttttagttcttatgaattagatcctaataatacttatccaacatacttttacagaaactctaaaatgggagaattttctgttatttttcttgcaaagaataaagaacttcaggaagaatggaaaaattatgatagtaaaaataatattatgattgaggaaggggctacaaatgaacaattgcgacaaataaatttgttgataaaaaagaaattggagcctcatattaatgattattataggctagccgaatacattgctccacaatacattaaaaaacatgattacatttttccatttattaaaaagtattatctctttgaagatgttaaaaaaagatgggaatatataggagaaaaaaaaattaaagaaggagaagaaagtgtaataagtattgatgaactaaacactatggtacatcgcaaaaattcaaaagagaataatttgaatttaccagttaattccatttctaaaaattggtatggtaaatactcattaagcctaaatgaagatagtgaagactggagagatattcatgaaattacattaaaaatctcaaaagattctattacttatatggcagaagggtttcaattgtacgaattctatacattaatcataaaagaaaataaagaaaacaggatccgtttgagctttttaaaagcacttgatcatactgaaaatgctgtatatctgaaaaaaacaaaagattttggggttattacttttattggaggccaatatctttggagctgtccttatattgatgaaaggtttgcagaaagaaaaaagaagacttacccattaaaaaaagaaaaataaataaagacattttttcaggcaactgcttcctcagaagctattgattttcctgatttgaaaagagtttcaaaccatctttaaacttttctccttaagaagctcttttatttcaggcattttcttttccttgacaatatacgttttgcagatcttattgttgaggttcatgctgaaatttttttcgatagattcatccgcccaggtttcattgatgggtggataatattctatcaaaacaggccagaaattgaagagagacaatacatttctctgtaaagactttaagaagtccggcgtatttccaaaatcatcgatgactcttattttgaaaagttttttgccaagacttgctccctggtatgtttcccatagcgttcctgaaataatgacaagaggaatggaatataaaaatcccataaaggctgtataagaaaatacatataagaaaataactaaaaaagggagaaagtcgatcattttagccaacagtctttcccattggtagttcttataccaagggttgcatgggaattcatattcaacctggttgtatattctgtttccttcacgatcaaactcacgggtagccctgcggataatccttttctctttaagttcagatattttcataatggttatagtggttctttattttcagatcaaaaccagtaaaagcttacacatagagtgccaaatctgaaaaaattgaaactgcaggctcataatgatccgtattcagtttcccgaagccgtatgtacagaagataaaaggaagattattggatgcggaagaatcataatcggtttgggtatcaccaatatacaccgtgtcttcagctgatagatgatttctttccataatgagtttaatattctctgattttggctttgtggtccgtccgtgagattcaaaatcggtgaaaagatcattgagtttataatagtctaaaaacgcctcaatatatccatcctgacaattacttacaataaaaagacgatggtcacgagcaagaattttcagagttttttccacattttcatataaaattccaccttgagtacgaagaacggtattctctttttttataatttcagaaagagtttctttcacctgctgatcagaaatgcccggtacaatatctttcagaatatctttagccagaagccccatatactgatccatatcttcaggctttaattccctttcgatgaattgatgctgatgcagaatgtcattccatatccctatgatggttgctctgggatcccataatgtcccgtccagatcgaaaattaagtttttatatttcaaaatgtgatatttatattattcgttagttaggctggaagcaggaagttggaagttactgttcgccttattacagttgatcatgaataaaattgccattttcaaaatataataaagccagatcctggtatttacgacttaaatagcttccttcttcctgcttctggcttcctagttcaatcaactatagaatcatgcttagctgaacccttttccttgcttcatccacttcagttacttttacccttacatgctggtgaagctttaccacttcgttgacatcagaaacaaagccatctttcagctgggaaatatggaccagtccgctttctttgattcccagatctacaaaacatccgaaagcggtaatattgttgacaattcccggaagaatcattcctgcttttaaatccttaatgctttttacattcggatcaaactcaaatactttcgcggcttttcgagggtccagtcctggcttttcaagctccttcagaatatctttgattcccagaatcccgatttctccagttatataagactccggttttatcgaagcaattttttctttattggcaatcagttcattggttttaatccccagatctttggccattttttctacaattccgtaagcttcaggatgtactgccgaattatcgagtggatttttagcatttgaaatccttacaaaagctgccgcctgttggaaggctttctcgccaagccttggcactttcttcagttgctttcggtcttcaaaagccccattttcagcacggtaattcacaatattctccgccattttctctccgattccggaaacatagctcaacagcgacttactggctgtatttaaattgattcctaccgagtttacacatttcatcaccgtagaatccaactcgtttttcagttgagtctggtctacatcatgttgatattgtccgactccgatagatttcggatcaatttttacaagctcggccagcggatcagaaagtcttctcccaattgaaaccgcaccacgcaccgtcacatcatatgttgggaattcatctctggcaattttacttgcagaataaacagaggctcccgcttctgaaaccacaaaaacctgtaatggcttatcaaaagcaatctttttaataaagaattccgtttcacggctcgctgttccgtttccgatagaaattgcttcaatattataggcattcaccatagaacggatctttttcatcgccattccgctttcattttggggagcgtgagggtagagggtttcattatgcagcagatctcctttttcatccagacataccactttacagccacttctgtatcccggatctatggccagaattcttttttcgcccaaaggtggggccaatagcagttgtcccagattttcagaaaagatctcaatcgctttctggtctgctttttccttagcctcctgcaatgcttcattagaaatggcaggttccaaaagccttttatagctgtctttgatggcaagtgctatctgctcagaactttcattattcgatttaatgattgctttctctatgaaatcgatcgcttcatctttgtcaatccctacattcgtcttcacaaaaccttcagcttctgctctcaacatcgccagaagcctgtgagaaggagttctgctaaggttttcttcccattcaaagtattgagagaacttttgggcatcttcctcgtcttttttagcctttacaaccttagaagtaactacggccttacgctgaaatatccgacggaggtttttacggacatacatgttttcattgatccattctgccatgatgtctctggcgccttgaagtgcttcttcctcagaggccacttcattgttcagatattttgaagccagaaacagaagatcattattcttctggctcatgatgatcttggctaaaggttccagtcctttttctttagcggcatccgctttggttttcttacgctttttgaaaggcaggtaaagatcttccagctcctgaagatcaaaactgtcttcaattctttgttgaagttcaggcgttaaagcatcctgctcctctatagattttaaaatagattcctttctctttacaatctcctcaaactgtttgctgattttcgcaatctgttcgatctgggtttcatccaggtttccagttttatcctttcgataacgggcaataaaagggatggtacagtcttctgctaataattgtaaagtattgttgatgctcttttcagaaatattgagctgcttctgtataaatgctacggtcgtcattatttgtttttcggatagctaaaatagggtttttaaaacgaaaaaaggcgagttgccccgccttgaatgttttcacaacggaataatccttattgtgaattgcttttcaaaattattattacaaatatagcagaaaaaatctttaatagaattatggaaatccgtaattcggatgttttttttatttctatttttatgtagtatcaaaaattagaatgatgattaaaaatatacttggattagatttaggaaccaactccattggctgggctttaataaaacaagattttgaaaataagtatggcgaaattttgggaatgggaagccgaattatcccaatgtcacaggatattttaggcgaattcgggaaagggaattctgtttcacaaactgctgcaagaactggttatagaggcgttagaagactacgtgaacgatttttgctaagaagagaaagacttcatagagttttaaacgtattaaattttcttccgaaacattatgcttcgcagattgattttaaaaaacgatttggaaagttcaaggaggaaactgaaccgaaattggcttacaataatgatgggtttcttttcaggaactcttttgaagaaatgcttactgattttaaaaatcatcaacctcaacttctagcgaataacaaaaagattccttatgactggacaatttattatctccgccaaaaggcactttatcataaaatacaaaaagaagaactggcttggattcttttgaattttaatcaaaaacgtggatattatcaattgcgaggtgaggattttgaagacgaaaagaacaaagtatttgtcagattgaaagtagacaagattgttgattctggagaaaacattaaaggaaaaattctttatgatgtatattttgaaaatggatggaaatatgaaaagcagattgtaaaaactgaagattggataggacgtacgaaagaattcatcgttacagaatctattttaaaaaatggtgatacaaagagaacatttaaagctgtagattctgaaaaagattggattgcaataaaaacaatgactgagcaggaaatcgaaagatctcataaaactgttggaacatatatttacgaaacacttcttcaaaatccaaaacagaagatcaacggaaaacttgttcgtactatcgaaagaaggttttataaagaagaactcaaacagattttagaaaaacagaaagaatttcaccaagaattgcagagtgatgatttatatagtgattgtatacgtgaattatatcgaaataacgaggctcatcaattgactttaagtaaaaaggaatttgtacatttttttatggatgatattattttttaccaaaggcctttgagaagccaaaaatcgtctatttccaattgtactttggaattcagaaagtataaagatgaaaatggagtagagcatacacagtttttaaaagctattccaaaatctaacccgtattatcaggaattccgtatctggcaatggattttcaatttgaatatttataaaaaagatgatgattctaacattacaaaagaacttttaagcacaaccgaagattttgaaagtctatttgagttcttgaataatcgtaaagaaattgaacagaaaccattacttaaatttctcttagaacgaaaagattttaaaggaaagttattaagtgtcgaaatcgaaaaatatcgttggaagtatgttgaagataaaaaatatccttgcaacgaaaccagaacaatgattctgtcgagattggataaggtagaaaatatttctattgattttctgacaagagaagtcgaacaaaaaatttggcacatcatctattctgtaaatgataagatcgaatacgaaaaagcattgaaaacttttgctgtgaaaaataatcttgatgaaaattcttttttcgaggtgtttaaaaaatttccaccatttaaaagtgaatacggttccttttctgaaaaagctattaagaaactgctgccttttatgagattgggcaaatactgggattacgaaaatatcaatgagtattcaaaagaaaagattcaaaaaattattagtggggaatttgatgaaaatatcaagaatagagtgagagaaaaggcaacgcatcttacgacagaaactgattttcaaggtttgcaattatggttggctcaatatattgtttatggaaggcattcagaagcatcaatgaatgataaatggaattctgctgatgatttggaaaagttcttaaatgaatttaaacagcattcgcttcgcaatccaattgtagagcaggtaattacagaaacgcttcgggtggtaaaagatatttggttgaaatacggaaatggagctaaagatttcttcagcgaaattcatattgagttaggaagagaaatgaaacagacaaaagatgaaagagcaaatgcaacaaaaagaataacagaaaatgaaaatacaaatcttcgcattaaagctttactggcagaaatgatgaatgataattctgttgagaatgttcgcccatattctccaatgcagcaagaaattctgaagatttatgaagatggaattttaagatctgaaatagaaattgatgatgacattctgaaaataagtaaaacagcccaaccttcttcatctgatttaaaaagatacaaactttggttggagcagagatataaatcaccttatacaggacagatcattccattaaataagctatttacgccagaatatgagattgaacatattattcctcaaagtagatattttgatgacagttttaacaataagatcatttgtgagtcggcagttaataaattgaaagataattatattggtttaggatttattaaacagtttggaggcacaatggttgaatgtggttttggaagaagtgtaagagtctttgaagccggagaatatgaagagtttgtaaaaaagcattatgccaataatcggggaaaaagaagcaaacttcttttagaagaaattccagataaaatgattgagcgccagatgaatgacactcgtcatatcagtaaatatatttccggtgttctttccaatattgtgagagtggaagatggtacagatgaaggggtaaattccaaaaatcttgtgcccggaaatggaaaaataacatcacaattaaaacaagattggggtctgaatgatgtttggaatgaattgatattgccacgttttgaaaggatgaatcaattgaccaattcaactgattttactacctggaatgaaaattatcagaagtttttaccaacggttcctgttgagttttcaaaagggttttcaaagaaaagaattgatcatcgccatcatgctttagatgctttgattattgcttgtgctacaaaagatcatgtgaatttactcaacaatcaatctgctaaatcggacacgaaacgatatgatttgaaaaagaagttgatgaaatttgagaaagtaatatacaagcatccccaaaccgatgagagaatagatagagaagtgccgaaatattttttgaaaccttgggaggattttacggttgaagctaaaaataatttagagaaaatcattgtaagctttaagcaaaatcttcgtgtaattaataaagctacgaattattatgaaaaatatgttgagaaagatggtgtgaaaatcaaagaaagggtagagcagactggaacgaattgggcgataagaaaatcattacacgaagaaaccgtttcaggaaaaattaaattatcgtggttagaaactagcaatggcgaatttataactgctacaagaaaattattagactcaagctttacttttgagaaaatcaaaaaaattacggatacaggaattcagaaaatacttacaaattatcttaaaacaaaagaaaacaatccagaattagctttctcaccggaaggaattgaagacttaaataaaaatattgaaaagtataatgatggaaaatcacatcaaccaattatgaaagttcgattatatgaaaaaggaaagggacgatttgttttaggacaaacaggaaataaaataaataaatatgttcaaggttctccaaatttattttttgcaatatataaaaatgagaatgggaagaagaattttgaaagtattcgtttagatatagttattgaaagattaaaacaaggcttacaagctgttcctggaacaaatgaaaatggagttcctttatatgaaagcttatctcctttagatttagtttatgttccaacagaaggagagttggaatcaccccatcttcttgatttcagtaaattaaataaaactcaaattacaagattatataatacaaatgatttttcaggtgtaacagcttattttagtcagaattcttttgccagacacatttatccaaaggaaatggatttaagctggaacgtaaagaaacaaaaactttctggttcattcgattctaaaacagcttcttacaataagacacctataaaagatatttttattaaagtgaaagttgaccgtttaggaaatatttcaaaagataaactatgatcacccgttccatctatatcggcaatcccgcttatcttaaacttaaagatgaacagatgtatattttagaaccttctacaaatgagatgaaagggaaagttccagtagaggatttagggttactgatgttggatcatttccagattacgatctcgcatcaactgattcagaaaatgatgggaaacaatgtggtagtggtgagttgtgacagtcatcatttgccgcacggaattatgcttccgctttatggacatactgaatattccgaccggattaaagatcaattagaagtcagtgaaccactcaaaaaacaactttggaaacaaacggttgaatgtaaaattgaaaaccagaaagaggttttaaaaagattggggaactattatgaaccgatgattaattaccagaatgatgtgaaaagtggtgatataaccaatatggaaggtattgcagcacaacattactggaaatacctcattagtctggattttttgagacagcgttttggagattcgcccaatcaatttttcaattttgggtattcagttctcaggagcattgtggcaagagcgattgtggagacgggattgcttcctgttctaggaatttttcataaaaataaatacaatccttattgtcttgccgatgacctgatggaaccttatcgcccttttgtcgatttattggtaatgcaatggcttgcaatccattcagaaacggaagaactaactaaagaatttaaagctttcatcttacagattgcgaccaaagatgtgaaaatagatggtaaaaccagaccattgttggttgcggtaaaaacaacagctacatcactgtataaatgttatacgggagaaaagcgcctgatctcttatcctgaactgatatgaattccgaaaggtttaatgcataccgaattatgtgggttttagtattatatgatctcccaactgagaccaaagtgaatatgaaagatgcgaaccgttttcggaaggcactcattgatgatgggtttactttatttcagttttcgatgtatgtacggcactgtccaagccgtgaaaatgcggaggttcatattaaaagagtaaaatttatgcttccaaaagctgggaaagttgccattatgtgtattacagacaagcagtttggtgacattgagatcttctttgccaggaataaagaagaaccaccaccaacgttccaacagcttgaattattctaatttttaaattctaaataaacaataaatccgttgaatttcaacggattaaattttgaggctgtgactaatcacgaagataataaattttgaaagcaattcacaacgatttgtccggcattagcaggcataaaaatgctgtgactaatcacgaagataataaattttgaaagcaattcacaacgtgtatacgctaaacgtttcctgatactctgctgtgactaatcacgaagataataaattttgaaagcaattcacaacagagatttgattcattagattctcatccctgctgtgactaatcacgaagataataaattttgaaagcaattcacaacgtgtagtattcgctttcattgaattcaaatgctgtgactaatcacgaagataataaattttgaaagcaattcacaaccactcatcctgtatcttttcaccgattatagctgtgactaatcacgaagataataaattttgaaagcaattcacaaccagttgtacccattgtctcgtttatttgttgctgtgactaatcacgaagataataaattttgaaagcaattcacaacgatacctggttcaggtttaaaagtaataacgctgtgactaatcacgaagataataaattttgaaagcaattcacaacgaattggtttaacgccacctgttctgcctcgctgtgactaatcacgaagataataaattttgaaagcaattcacaacagaaagtctgtagtttcaatgtcaagtactgctgtgactaatcacgaagataataaattttgaaagcaattcacaactcttttgttgttgtgctgatttctattttcgctgtgactaatcacgaagataataaattttgaaagcaattcacaactaacaaggtccacagcgtccagatgtaactgctgtgactaatcacgaagataataaattttgaaagcaattcacaacgggcctcttctctttccttgcgttcagcctgctgtgactaatcacgaagataataaattttgaaagcaattcacaactgaacgggtacccatcaataagcattaactgctgtgactaatcacgaagataataaattttgaaagcaattcacaaccggttgcgctcagtactgtaaatggttacggctgtgactaatcacgaagataataaattttgaaagcaattcacaacccacaacccaaacaaataaattatactgaagctgtgactaatcacgaagataataaattttgaaagcaattcacaactatttgttttcagtgatctattaatatctagctgtgactaatcacgaagataataaattttgaaagcaattcacaaccaggtctattgcctcctttggatcgtcagggctgtgactaatcacgaagataataaattttgaaagcaattcacaacaggacatggaccatccagtcgtctgggccggctgtgactaatcacgaagataataaattttgaaagcaattcacaacaattcgcatgattttagcaaacccctgtatgctgtgactaatcacgaagataataaattttgaaagcaattcacaacactgtgggcaaacatgacttgtttcattaggctgtgactaatcacgaagataataaattttgaaagcaattcacaacataaatatgaaatttatagtaagaaaaagtgctgtgactaatcacgaagataataaattttgaaagcaattcacaacgcatcggatagagcttgccacgccttccgggctgtgactaatcacgaagataataaattttgaaagcaattcacaaccggaaagaacggtcctgggttccgtggttagctgtgactaatcacaaaaataataacaaaaaagaccatctactaaatggtcttaaatttatacccaattttttttatacacacaattggttagtcggaatgcatacataaggctttcctttgatacagcattttcggtatccttcctgaaagcagtcttgaatgcatctttctattcctccttgaattgatttcaatccggttcttgtaatttttcttaaattttccatgattattagtattttatgtatagtgaatttaagcaattattttgaataactgtcctctttgtttcaaaaaggagatttatggttttaatttacaaatcttagttaatcagtgagttattgaattttgagaaattgacaatcttcattaattacgatttctttggatttgaaatttctgccatcatagttggcgataagcagataaaaaatacaggtaaaagacatttaatgatcaattaaaagaatgataaaaggtaaaaaaatgatatttttaaagaatgaaaagctaaaaaatgtatttcttgatgtatgttaaggagacccaaacagagtttttctacttttgtacccgaaaacaatgaataaactttttaaacaattcaataatatgaaaaaaattagtgtaatcgcattagtagcagtaggattgctggcagcatcatgtaatagcaaagaaaaaacagatacagcagtagctactgagcaggctgttgcagaaagcaaaggagaaatgctgacagtagatgctgcaacttctatggtaaactggaaggctttccacaaaggaggatttgcgcctcgttggggaaccctgaatgtaaaatctggcgatttaagcattgaaggtggacaggttgtagcaggtaacttcaatattgatatgacttctatcaaagttgatccggcttcagtaacagaaaaagataaaaaacctgaagaacttgaagctcaccttaagagtgctgatttctttgatacagagaaaaatcctgtttccgattttaaaattacaagcgtagcagatttgaaagaagcaccgaaagatgcggtggcaggagctaacaaaacagtaagcggaaaccttacattattaggaaaaacaatgaacgttactttccctgctaaagtagatgtagccgataatacggcggctattcaggctaaattcacggtaaacagaacagactggggaatcaagtttggtacttcagaagcagatcctgcagaatggatgatcagcaaagatatcgagatcaatatcgatgtaaaagctaaaaaataagttattaagtctttaataacgaaagctgtcttagtcaaggcagctttttttttatccggttatcggggtaggagggccaacaaaacctggctttttaattttaagcctgctttgcttatgtttttatattttgttgataatgctgtttttgtgatgtttaatttggtttttatttattaattttagccaattcttaattatttaaggataatattcaaaactatataatcatgacgaaaatttatctttttttattattgttatgggcaataattctgaacgcccagccgcttacatggacaaaaatttctcccacaccgcctccgggcattccttatcgttctgcaatttttctggggcaaaaaaaacttatttgggctactttctgtgatggatcaatcccctttaaagaaccaacagcaatgagctattcaataagtgcagatggtggaaatacttggtcaaccaaaggatatttcccttttgcaatggcaagtactaagccttatggctttacttttatgggatttacccctctttcaaccagtatgggactttatttgtgcgcaatagaagattcttatgcaaaagtttttaaaacatcagatggcggcatgacctggaagactacagcacaatttgatacctatccttattccattcacttttttgatgacaaaaatggaattgttgtatgtcgggaagatgcttcccaaaagctaaaaatttatagaactacagatgccggagacagctggcaaaaagttgatccggcttatattccttcaacgatcggatatgagacaggggtgggtctttttggctttgtttcctcttataaagatactttctggtttggtacaaatagcgggcggatttttaagaccaataataaaggactcacatggactgtggcttcctctccctacatctatggtggtgtgacaggggtcttcgcagatagcatggggccttttactcttgaggatgaaaataatgcttatatggtagaatataactccgggaagcttcatagaacaacggatggcggattgacatggaccactcagggaaagatagaaaccggcagtgccaatttccatattataaaagtacccaatagtgatattcttttggctgccggagaaaaaacaagatatagcctggataaaggcctgacctggactgagattgatgatgatcctaaatttggaatttatagcaatagttccgggtttacaacaagccttagttattataaacttacaggaattattgataaaacacctatagaaaccggaacacctggtgacaataaagatgaagatgaatttggtatttatcccattcctacaggaaattacctgtatataagatcaaaaacacctattgatagttatattatatgggattctgcaggcaggctgattcagacaggaggggccggaaatcagattaatgtttcatggtttgcagaaggaacttatcatattgaaattcatcatgccggaaataccattatcaagaaatttattaaaaaataaaacctttacagtctgcacaaaaaataaaagtgatctctggaggtcacttttttattaggatatttctgaaataatacagccggaatcaattgaaaatccacgaattctgaatacgtacacaatattcgcttcccagatataaaggattgccatgtttttcagaccagaacccgttcagagtatctttattcaggcaacggtatactgctacacctttatatattgtatgatcatctccttcatagttgaagttgaggaccagaatctggtctttatagaacccggttccgttttgtatatgatcaccgatgatccattgggcaacaatccggttgttttcatcaacagataaagtcagtataccactataagaatactgatcagattcttcctgattgcttcctttaatagaataagttcctgccagatcatgtaccgtcattgatttgttttttttggatggcaaatgtaagaaaatcttattttgataatgcttaaaaaatctcaaaacccggatatgagcctgcagacttttctatctttaaattaaactctatttttgcagcaaattaattgtagatgtttccttttctgctgatcgctaaccttattacattcggagtctttgggtttgacaaatggcaagccaaaaaacaccagtggagaatttctgagaatgctctcttagggctttcccttatcggagcgataggagcagcctccggaatgatccttttcaatcataaagtgtccaaaaaatcttttctggttaaattttttctggtgctcttaattgatgttgtattgctgtatcgattcatcagacattgatacaggcagatattcgttcttcaaaagatgttttttagaaaaaagaataaatacaatatacttctgcattaattttattgtaatacaaacaaaataagtgggtagaagaggcctccaccttatattttttcagacgttttttaagaaaataatctaattttctcattatgaaattgttaaatattgcataaactttttaattaattcatttaaaatcactatttttgcacccgtaaaaatcctatatgcaaaacattagaaatattgcgattatcgcacacgttgaccacggaaagacaactttggttgacaagatcatccacgctaccaacattttcagagaaaatcaggagagtggggaattaattatggataacaatgatcttgaaagagaaagagggatcaccatcttatccaagaatatttctgttacttataaagacacaaaaattaatgtaatcgatactcctggtcacgccgatttcggaggagaagtagaaagagtattaaaaatggctgacggagttattttgttggtggatgcgttcgaaggaccaatgccacagacaagattcgtacttcagaaagctttggaattaggactgagaccgttagtcgttatcaacaaagtagataagccaaactgtcgtcctgacgaagttcatgacaaagtatttgatttgttcttcaaccttgatgctacagaagagcaattggatttccctacattctatgggtcttcaaaacaaggttggttcaacacttcattagagcagactgaagatattttaccattattggatggtattttacaatatgttcctgaaccaaaagtaacagaaggtaaccttcagatgcagattacttcccttgatttctcttctttcttaggaagaattgccatcgggaaagtgacaagaggtgagatcaaagaatctcaatggatcggtcttgcacaggcagaaggtaaaattgtaaaaggaaaagtaaaagaactttacgttttcgaaggtttaggaaagaaaaaagtaactgaagtaaaagcaggagacatctgtgctgttgttggtttcgatgctttccagatcggagattctttcgtagatcttgaaaatcctgaaccattggaaagaacagcgattgacgagcctactctgaacatgacgttctctatcaacaattcacctttcttcggtaaagatggtaaatatgttacttcaaatcacctgaaagaaagattaacaaaagaattagagaaaaacttagcattaagagttcagcagactgacgatgccaacactttccttgtattcggtagaggtattcttcacttatctgttttgatcgaaaccatgagaagagaagggtacgaaatgacaattggtcagccacaggttatcttcagagaaattgatggtgaaaaatgtgagccttatgaatctttggtagtagacgttcctgaagaatttgcttcaagagtaatcgatttggctactcagagaaaaggagatcttcacattatggaaactaaaggagagatgcagcacatggagtttgaaattccttcaagaggtttgatcggactacgttctcagatgttgactgctactgcaggtgaagctattatggcacaccgtttcacagaatacaagcctttcaaaggagctattcctggaagaaacaacggagtattgatcagcaaaactacaggtcctgctacagaatattctattgctaaactacaagatagagggaagttcttcgttgatccgggtgaggaaatctacacagggatgatcatcggtgagcaaaacaagccaggagacttagtagtaaacatcgtagaagcaaaacagttgaacaacatgagagcttccggaaaagataaagatactggtgttgctccaaaaatcttattctctcttgaagaatgtatggaatatatccagggtgacgaagccattgaggtaacgccgaacttcatcagaatgagaaagaaaatcctttcagaagaagaaagaaaaagagtggaaagatcagcgaaagcttaatcattcacgatttacattcaaaatatatagaaaagcctcgaatttttcgaggcttttttctagaaaacaggaaaaaatgtttattttttcaaaagaatataccaagtaataaaatataaattaaagtagttttgcagctatgagaatgaataaattaaaacttatcgttttattgggcgtttttgcatcatacactacctcatgttctgttcagaacaacgtgacgaaaaccccgcctgctaagaatacaacaagacctaataccaaccctcctaagcctaaagacccgacagcggtacctaaaccaaccgctgggaatacggcagatgaaaccttcagaaccacccttccggaaatcaaaagagaattcagaggagcatggattgccagtgtagctaacatcaactggccttccagaaacaatctgagcgtagaacaacagaaagcagaagccatcagtatgcttgatatgttgaaagataataacttcaatgcggctattttccagatcagaccttcagcagatgctttatataccagtgatattgagccgtggtcttatttcctgaccggagaaacaggaactgctccttatccaaactatgatccccttcagttctggatcgcagaagcccataaaagaggcctggagcttcatgtatggctgaacccttaccgtgcccaccataccaacggtggtacagtgaataaactttcaatggccaataagctttcagatattgtcgtaaggttgaaaaatggcatgtactggtttgatcctgccaacccgaaaacacagggtcacgtgtctaatgtagtaaaagacatcgtaaaaagatacgatattgatgccattcattttgacgattatttctatccatatgctacttataataaaggggcagatttccctgataatgcaacctggaatgcctatgtaaccagtggaggaaccctgtcaagagcagactggaggagagataatgtgaataaattcgtagaacgtatttataaagagattcacgcagaaaaaaataatgtaagattcgggattagcccgttcggaatctggaaaccgggatacccggcagggattgtaggatcttcacaatacgatgagctttatgcagatgccaaattatggctcaataaaggctgggtagattatttctcaccgcaattatactggccaatcgattccaaaggacaaggttttgaagccttatta

SEQ ID NO: 1217 - DNA, 24344 bp, synthetic construct
  misc_feature 1..24344: note = Synthetic
  source 1..24344: mol_type = other DNA
agtgtgttataataccaattgaattcctcaatgatatactttaattaaatcataagacattattctgtttttgtaagtatgtttggtacatttgcaccttcaattttatacattatattatgaatttaaaaggtaaaaacgccatcatcacaggtggtggaagaggtcttggaagagctgttgcacaagcattagcgaatgaaggcgtaaatatagggatcacaggaagaaacgaaaattatcttaaaatagcagccaacgaactgaaggaaactggtgtaaaagtcgcttacgcggttttcaacgtcgataacgaactggaagtaaaagccggcatcgaatctcttgcaaatacattaggtggaatcgacattctggttaataatgcaggagttggtgattttggttctattgaagagatgccgtctgagacttgggaacaagttatcaaaaccaatctttttggtgtttattatacagccaaagccgtttatccgtttttgaaagaaaagggacagggtgacatcgtaaatgttgcttccacagcaggattgaaaggtggacctaatatgtctgcttatgcagcttccaaagcggcggttgtttctctttcgcaatcgatgatggcggaatggagaaagcagaatatccgtgtgattacattgactccaagcactatagcttcagaaatgagtattaatggcggtttgacagatggtaatccggacaaagttcttcagccggaagattttgcagaatgggtgagagacatcttgaagatgaacagacgcgcattgatcgcgaacggttctattttctcgactaatccttagttagaataaagcaattctaaatatcaaccctttcagagtttcaaactttgaaagggttttgttttatattaagttctatttaagcatctgttataaggcttcgactccactcagcttaacaactttctcgatagatattaagatgtcaccctgagcggagtcgaagggtttttagcttaggaatggtttcgttatttaatctttgcgtttaaatacacttatccctatctttatcggaatcaaataaaagatatgaagagaaactcaattttagcaatgtctgctgttttctttgcagcacaaatcaccttagtcaacgctcaaaacaaatccgaagaaaaactcaatccaatcgttcaaagttttgttaatgaagccaatgataattcccagttggaaaatatggctttcgaacttttggacggcatcggaccgcgtcttgttggaacacctgagatgttggctgcaaacaattatacggctgataaactgaaatcttggggaatcgatgctaatcttcagcaattcggaacgtggaaaggttggcagcgtggaactacacacgtagatttggtttatccaagaaccaaaaccttgtctgcaacccaattagcgtggagtccggcaactaaaaaagcagtagaagcagaagtcgtaattcttccaaaagtatcttccaaagcggtgtttgataaatggttgccttctgcaaaaggaaaaattgttttgatggctcaatatcagaaaatcggtcgttctgatgaacagattaaagaatttgcaacaccagaattatatgaaaaactgaaagctgaaaaagagcaggctaaaaaagatttcgcaaattatatcaaaacaatcggttatgataatacaaccttgccagaagctctggaaaaagcaggagctgctggaattgccatttccaactggacaggaattcacagcaccaatcgtgtttttggagctaagactaaatctattccaatgtttgacatcgatttagaagattacggaatgttgtacagaatggctgaaaaaggggcaaaaccgagaatcaaagtagatgcacaatccaaagttttaccagaagctaaatcctttaacaccatcggaatgataaaaggttcggaaaaaccgaatgaatatgtgattctttctgctcatctcgattcctgggatggcgcacaaggtgcgactgacaacgggacaggaactttgacaatgctggaaacaatgagaatcctcaaaaaatattatcccaatccaaaacgtaccattgttgttggactttggggaagtgaggaacaaggtctgaatggttcaagaggttttgttgctgataatccggaaatcatcaaaggtgtgcaggcggttttcaatcaagataatggaacgggtagagtagtagatatcagtggacagggtttcaaagattcttatgcttatatcggaagatggctggatgcagcacctaaaaaagtgaaagaccaaatcaaaagtacttttccgggaatgccgggaggtggcggttccgaccacgcatcgtttgtggcagcaggagttccaggattttctttgagttcgcttaactggggttacttcggttacacttggcacacgaccaaagatacttatgacaaaatcgtttttgatgagttgaagaacaatgtgattctgacagcaactttagcttatatggcttcggaagacccagagtttgtaagcagagaaaagcgtgtgatgccgaatgatgacaaaggaactgctatgaaatggccggaagctagagaaccaaaaagaagcagtaaagattattaatctaaaagaaaattgatattggagtttagaaattagatttcaatcaaaaataaataagaaagcgacaatattttttgtcgctttttttgattttgaaatttagataggtagtaatggtcggaaatgtacatatacttttttctctcggatataataacagacaagcaaaaacaaaatcgccatagaaaaccaaatcatcagagaataataatccataatagaccttagcagaatctgattgtccagttgtgctttgaatactttttgtgttactagaggaacagttttctcttctaaaccattatttccgagataagccttaatctgattgattttatccagataatattgattgttataattgatataatccaagaatctgttgtaatgaaggttgtaatgataaacgctgaaatatttagtcaaaaaagtactggttgtgtatcctaaaaatcttataaccagcccaaatgcagcggcagaaggcgcaagataataaggaacaatactgatgataaacaaaatcgtaggaaccattataagtcccacacctaatccgtgtgcaaatagcggaatactgtagtagctttcatttcctgcattatccagcatctgtgtcatacaaatgtgataaatcatcaatgaaacaaaaccgcacatccagagccagatgacgttcgattgtttgatttgatgccaagccgccaaagccacaccagcaatgattccgatgagattaaagacaaacatatacgagatatgccttggatccatatgaagcacacttttgtaaaaactcccgacataggtaaaagagaatcgctcgatgtacataaagaacaagagcattgcgccccacagatattgtttttgtttaaagatagaaagatcaatataaggtcttttcaaggtgagttgacgaacagcaaataacaatgtcgccaacccaaccattaccgaaacctgaataattttaacactttcaaaccaataatattgttgtccatagacactcaaatagcccaatccaattaatattacagccagcaaaataaaactgctcatatccaactgaatcagcgtgtgtcgatgaaatactttggcagaagagatgcaagccaaaacaatgatcacgcttacggcaaacatcaccatcgatagtttatagacaatgtcaaaattatactggtcgatgaggtctgcggtaatcaggttgttaaaagatgtcgtacaaagcaacatcccgaaaaacaaactataagtaacttctttggctctgtaagatttcataaatctgatagccatcgacatatagagattcacggcactcgcaaaaagcatcccttgaacaaatctgacaatgaaaaccaccaacagaatctgagatgagaacagcagataacaacacagtagttggaacaactgaaactggataaagtattgcttagaagtgaagtaattataaaatctcctttccaaacaatagaatgatgcaaaccctgcatagtaaagcgaaatcgtaaactggatgtcatttggttctatgccgtaataacccgcagcaacatcctcattggccattggtaggaagaacataatcatattgggcagcagcaatgtgaaaagaatcatttttgccaaccaattcggaacccattctttgaataaagtcatcttttatgttggattaatgatgagggattgtgacagtcacattcattccggagagtattttggagcgccattctttgctgaggttaatgatttctatcttaacaggaatgcgctgaacaatcttcacaaagttccccgtagcattgtccggaggaagcaaagaaaaactagagcctgttgcgggagaaaatgctaatatctttccttcgaatttctcatcaggataagcatctaccgtgatagaaacttggtcaccaattccgaaatgtgaaatctgagtttctttaaaattagccataatccatttgggattttcatcattcacgatgtagcagagatggtctccaatatcaatcatctgtcctttttctattttacgtttcccgagtcgtccgttgtatggcgcggtaattacggtataacttacgtccagatttttacgttgttttacctcattcagtcttgatttttcggcaccaatgatggctttttcctgattcaggtcttctgctttttcttttgcaactctgtaatgttgttctgcttgtgataagtcacttttatagatattaagattagcttctatctgttccagtttttgcgcggtggcagatttctctttgtagagttgcttgtatctttcatattctagattttctttccacacttttattttagccgcttctatcgcttggtaagcctcttgggcttctgcttccaaggtttgtctttgctggttcaagacttgggtgttggcattttgtttctggagttctgcacctacttggttggcatccagcttatattctcgattatcgataatgaataaggtgtcgcctgctttcacgttgtcataatcattgaaccgtacttctcttacataaccactcactcttgcgatcacagggttgatgtattccaccacctgagcatcattggtagtttcattatgtaagaaatgatagatggagatagaggcttttatcataacaaaaagcacaaaaatccacgcgacagcagaagtgaatttgactaaggttttacgatgagatactttcattttatagggttccggtttcgtattttagagagtagtagcttttcaggatattcattttggattgttccagttcaaattgggcttgcacctgcaatagattagcgtccaataggtctgtgatgagagcggtctggttgaaataagcatttttcaaaatcctcgcattttcattggcatattgcaggttttgttcaaagactttttcgtgtttcagagcttcgtcgtattcgtaataagctttgtagattcgggttcgtatgttatcattggtgaattgatgatgaagttgggccgaactcaattctattttagcttcttgcacttgatgcttgttatggtagatactgctgatgtcataagacgcttgcagacctacaagccccaaactgtaccaattggggttgtagttataaaggaacacttgcggattggcaaattgaaaagaacctatcagccctattttaggataataattgcctttgtctagttttaatttggtttctgccacttgggtgtgttgttcagataattctgcatcgtagcctttttccagagctatttcgatgtagtcatctactgataaagctgttgtttcttcttcaatagacgccatttctggttcaatgatggttttgtcatcttcaccggttaagacattgatttgctgttgcaaaacgatgatgctattctcaatctcggtgagggtcatttttcttttgctaagttccagctcggtgcgcagaacatcactttccaggatgattccggctttatagatgtttttgatttcggaaagctgatgttctttttctgcaatatcgttttgcattgtgtttttccattggtattgcaaatgcaggtctataaaaagattggtggctttcagcttggtaaggctgatgagtttctctttatcggttaccgaaatatcagaaagaatcttcgccagtttgatttcattttttagtttgaaaccatcaaagagattcatatacagattggtctctgtgttgtaaagggtgtggatgatgtcgtgctgagcaggtttgtgaagaatcccgttgacatagacaggcatattggtggcgtgtcttatagaacctgtgatacttaaggttgggagctgattagattgagcttgtttaattttggtttcagccaattgtagtttcagttgttccagagcaatttccttgctgtgggtttccactttactaaagagctgaggaagcgttaattgatattcttgggcttttaggaaaggctgatacagacagactgatagtgctagaatagacccaattttattacaaaacattcagtgtttaattttaaaatgcaaaactaaaggcttttgtttgatgtaactttatacaaaatagactaatttttgttgattcttgccatttttagttacctttgagtatgaaattattggatatccttcaagagatagatgactcacccaaagatgtttatctggtgcacgagcggtttgagcggcattatgatatgcatactcacaagcgtgaccagttgagttttgtagaaggcggtgtggcgtatgtcacgatagagaatgagtatctagtggttccggcaatgcactttttatggattcctgcaggggtgcctcataagcttaatgtgtcacatcgcgccactcagttgcattctttttatttcaaaagttcagagaaggctttttacaaagatttgggaatctatcctgccaatcgactgattatcgaattgattaacttttcccaacgctggtctcatcagtttgtggactataatgagccttacgctgctgcacttttttctttgtatgacattcttcctttgatggcagagcagcaaatcaagcttcagcttcctacttccgaacatcccaagatagagcaggtcttgcagtatatccatcagaacttccatacgccgttgaccttgaatgaaatgactgagcagttctatatgagtgagcggagcttctgcagattattcaaaaaagagcttcatatttcttttattcagtatctcaagacatatcgcattatccagtcgattagttttttacagaagcggaaagatagctctatcgaggaaattgccaatgcaacgggttacgaatctctcgcggctttcagcaatgctttttacgaatatacagggatgcgaccgtcgcagatgcggaagatgattacttaaagctttggtaacagataaaaatagaaatgtcccaacaataggacattttatcatttaataaaagaagtattggcgctgggttttcatcagaaaaccatcgtcagctggattctctttctggcttcatccacttccgtcactttgacctgcacgtgttggtgaagctttaccacttcattcacatccgagacaaaaccatctttcagttgagagatatgaacaagtccactttctttaatgcctaaatctacaaaacatccaaacgccgtaatgttattcacaatgccgggaagtatcatcccgattttgacgtctttgatggattttacattcgggtcaaattcaaacactttggcggcttttcttgggtctagtcctggtttttctaattcttttaagatgtccttaattccgagaattccaatatcattggtgacgtatttttctggattaattagagtaatcttttctttattagaaatcaaatcctgggttttcaatcctaaatcttttgccattttttctacaattttataagcttccgggtgaaccgccgaattatccagaggatttttagcattatgaattctgacaaatgcagcagcctgctgataggctttctctccaagtctcggaacttttttcagttgtttccggtctataaacgcgccattttccgaacggtaattaacaatattttctgccatcttttccccgattcccgaaacatagctcaataaagacttgctggctgtattgaggttgattcccacggaattaacgcatttcattactgtagaatccagttcgtttttcagtaaggtttgatctacgtcgtgctgatattggccgactccgatagattttgcatcaatcttcactagctctgccaacggatcagaaagacgtcttccgatcgaaaccgcaccacgaacagtcacgtcatagcttggaaactcatccctggcaattttgcttgcagaataaaccgaagcgccggcttccgaaaccacaaaaacctgaatcggttgatcaaaagcgatctttttaatgaaaaattcagtttctctgctagctgtgccgtttccgatggaaattgcttgaatattgtacgcatttaccatagagcgtatctttttcattgccattccgctctcattttgtggggcgtgcggatagatattttcattatgaagtaagtcgcctttttcatccagacaaaccactttgcagccactcttgaatccgggatcgattgccaaaattctcttttctcccaaaggcggcgcaagaaggagctggcgaaggttttccgaaaatatttcaatggcttttttatccgctttctctttagcttcttgtaatgtttcgttggaaataggaggttctaataatcgtttatatgcatcttttatagctatggtaatctgtccggaacactcattattagatttgatgatggctttttcaataaaatcaatagcctcagctttctcaattacaatgttggtcattacaaaaccttctgcttcagctcgcagcattgccaagagacgatgtgatggaattcggctgaggttttcttcccaatcaaaatattgggaaaatttctgcgcagcttcatcatcttttttagttttcacaacttttgagctgataactgcttttctctgaaaaagacgtctgagatttttgcgaacatacatattttcattgatccattctgcaataatatctctagcgccttgcaatgcatcttcttcagaattaacattttgattgatgtatcttgatgctaaaaactgtaaattatcagatctttggctcattatgatttttgccagaggttccaggcccttttctttggcggtgtccgcttttgtttttttttcttttcttgaatggcagatacaaatcttcaatctcctgaatatcaaagctgttttctattttttgttttaattcctctgttaaagaatcttgttcttcgacagatttgagaatggtctcttttcttttaataatttcttcgaattgtctattcagcttagaaatctgctcaatctgagtttcgtccagatttcctgttgcatcttttctgtatcgggaaataaatggaattgtacaatcttctgaaaggagttttatggtggcagtaatactgttatcggagatgtttagatgttgctggatgaatgtggttgaggtcattaactagaaatattaaataaaagaaggcgagttgccccgccttaaatgttttcacaacggaataatccttattgtgaattgctttcaaaattattgtatcaaatatataaaaaaaattctaatccaatcgtgttttttataattatttctatgaaaatttattaatttaggaaactataataatacaaatatgaagagaattttaggattagacttaggaacgaacagcattggttgggctttaatcaaacaagactttgaaaataaacagggtaaaatcctggggatgggaagtaggattatcccgatgtctcaggatatattaggggaatttggaaaaggaaattccgtttcacaaactgcagaacgaactgggtatagaggtgttcgtcgtcttcgagaaagatatttgctacgtcgtgaacgattgtatagggttttaaatattattaagtttttaccggaacattttgccaacgagattgattttgataaacgttttgggaaatttaagtctgacaatgaacctaaaatagcttataatactgatggttttgtctttaaaaactcttttgaagagatgctttctgatttcaaaatgcatcaacctcaaattttaaaaaatgaaaaagacaaagataaattagttccttatgattggacaatttattatctgcgtaagaaagctctatctcaaaaaatagaaaaagaggaattggcttggattcttttaaattttaatcagaagcgtggatattatcaactgcgtggggaagaggaggaagaaaatcctaataaattagttgaattctactctttgagaattgtagaggttacagcagatgaacctcaaagaggaaaatcagatatttggtattcgctgatgttggaaaatggatgggtctatcgcagagcaagtaaaacgcctttgtttgattggaaaaataaaaccagagattttattgtaaccacggatctgaatgatgatggtagcatcaaaaaagacaaagacggaaatgaaaaaagaagtttccgtgcgcctactgaaacagattggactcttgtaaaaaagaaaacagaacaagaaatcgataattcccataaaaccgtaggaacttacatttatgatactttgctacaaaatcctaaacagaaaatcaaaggtaaattagtaagaacgattgaaagaaaattctataaagcagagctgaaacagattttggagaagcaagcagcctttcatcctgagttgcagaatgtggatttgtataatgattgcgtgagagagctatataaaaacaatgatgctcatcagttgacattaagcaaaaaagattttgtgcatttgtttttagaagatattatcttttaccaaagacctttgagaagtcaaaagtcatctatctctaattgtagtcttgaatttaaaaaatatgtagataaagatggtgtagagcatacacaatatctgaaagcgattccgaaatcaaatccttattatcaagaatttcgtatctggcaatggatgtacaatctgaatatttacagaaaagatgatgacgaaaatgtgactaaagaatttcttaattcttatgaagatttagaaaatctatttaagtttttggatgagcgaaaagagattgaacaaaaagcattgctgaaattccttttagaacaaaaagactttaaaggaaaagtactgacagcagaaattgaaaagtatcgttggaattttgttgaaggaaaggcatatccttgtaacgaaaccaaaacaatgattgctacaaggctaagtaaagtagacaatattgcagatgatttttttacaagagaaatagagcagcagatttggcacatcatctattcggtcaatgataaaattgaatatgaaaaggctttaaaatcattcgctagaaaaaataatttggatgaaatctctttcttcgaagctttcagaaaatttcctcctttcaagagtgagtatggttctttttcggagaaagcgattaagaaactgttgcctttgatgcgagtaggaaagcattggagttatgccaatattgatgaacattcaaaagcaagaattgataaaatcattaccggagaatatgttgaaaacatcaaagataaggtaagagaaaaagcgattaatctgaagactgaaagtcattttcaaggtttgcagttgtggttggctcaatatattgtctatggcagacattctgaagcttcaattattggtaaatggaattcggcagatgatttagaattgtttttgaaagagttcaaacaacattcactacgcaatccgattgtagagcaggtcatcacagaaaccttgcgtgttgtaaaagatatttgggtgcaatacggaaaaggggcaagagatttctttaacgaaattcatatcgaattgggtcgagaaatgaagaatactgccgacgaccgtaagaaaatcaccaatcaagtcacggaaaaagaaaataccaatctgcgcatcaaggctttattggctgaaatgatgaatgatgctaatgttgaaaatgtacgtcctttctctccaatgcaacaagagattttgaaaatctatgaagatggagtactgaattctgatattgaaattgatgatgatattctgaaaatcagtaaaacagcacagccaagctcctctgatttgaaacgatacaaactttggttggaacaaggctacaaatcgccatatacaggacaaattattccgttaaataaactattcactccagaatatgaaattgagcatattatcccacaaagccgatattttgacgatagttttagtaataagattatttgtgaggctgctgttaattctttaaagggaaataaactggcttatgagtttattaaagatcccgtacttcaaactgttgaagttggttttggaaagagtgttcctattttaaaggcagatgaatacgaagagtttgtaaaaaaacattacgctaaaaacagaagtaaaaaggcaaaactcttgttggaagaaattcctgaaaaaatgattgagcgccaaatgaatgatacacgttatatcagtaagtatatttcgggagtgctttccaatattgtacgtgttgaagacggtacagatgaaggagtaaattcaaaaaatattgtgccgggaaatggaaagattactacaactttaaaacaagattggggattgaatgatgtttggaatgatttgattctgcctcgctttgagagaatgaatcaactaacaaattcaacagatttcactgcatggaatgaaaatcatcagaagtttttaccaactgttccaatcgaattatctaaaggtttttctaagaaaagaatagaccatcgccatcacgctatggatgctttggtgattgccagtgcaacaaaagagcatgttaatttacttaataatcagtctgctaaatcagataccaagagatatgatttgaagaaaaaattgatgaagtttgaaaaggcagtttatactgatgctaaaacagggaaaagaatagaaagagatgtcccaacaaagtttttaaaaccttgggaaaactttactgctgatgctagaaatagtttagaaaatatcatagttagctttaagcaaaatctgcgcgtcatcaataaagctaccaattactacgaaagttataaagatgaggatggtaatattagattaggcagtgacggaaaaccaaaaaaagattttatttcgcaaaaaggcaccaattgggcaataagaaagccaatgcacaaagaaacggtttccggaaaagtacatttaccttgggtaaagctgcctaaaggtaaaatattaaccgctacaagaaaaagtttggatacttcttttgatatgaaaactattggaagtattactgatacgggaattcaaaaaattttaaggaattatttggctgcaaaaggaagctctgaattggctttttcaccagaaggaatagaagacttgaatagaaatatcaaacagtacaatgatggaaaagaccatcaacctattacaaaagtacgggtctttgaaatgggaagtaaattccaagtaggttattctggcaataagaaatataaatatgtggaagcagccaagggaactaacctgttcttcgcagtctatgaggatgaaaaagggaaaagaagttatgaaagcgttccattaaatattgttattgaaaggcaaaagcaaggattagatgttgttgatttaaaaggagataaagatttttatttaagtcccaacgatttggtttatttaccatctggagatgagttagataattcaaataacattgattttgaaaacctttctaagcaaaagaaacaaaatatttataaggtcgtaagttttacaggtaatagattatatgtaattccgtactatgtatctgttgctattttaaataaagtagaacacacccaacttaataaaattgaatttactaaggaaaaagaaatttgttttaaactcaaaactgaccgtttaggtaacatttcaaaagcctaattatgatcacccgctccatctacattggcaatcccgcttatctcaagttgaaagatgagcagatgaaaatactttgccctgagacaaaggtagaaaaaggaagtattcctgtcgaagatttaggattgctgatgttggatcattttcagattacaatttcgcataatctaatacagaagatgatgggaaataatgtagtgataataagttgcgacgcacatcatttgccacatggtattatgttgcctttgtatggtcatacagagcattcggatagggtaaaggatcaattggaagccagtgaaccgctcaaaaaacagctttggaaacagacggtggaatgtaagatcgaaaaccagaaaaatgtactgatgaaactgggaaattactacgaaccgatgattgaatatcagagaaatgtaaaatccggcgacattacgaatatggaagggattgcggcgcagcattactggaaatacctcatcagtctggattttttgcgacagcgttttggagattcacccaatcaattttttaattttggatatgccgttttacggagtattgtagcgagagcgattgtagaaaccggactgttgcctgtgttggggattttccataaaaataaatacaatccgtattgccttgccgatgatttaatggaaccttatcgtccgtttgttgatttactcgttatgcagtggctgaaaattcatccggataccgaagaactaacgaaagaatttaaagcacatattctccagattgcaaccaaagatgtgcgtattgatgataaaacaagaccgttgctggttgctgtaaaaatgactacctcatcgctttacaaatgctacacaggagaaaaacgactgatttcctatccggaattgatgtaatttttttatggcagctttatccgcctgtagtttatcctgagcggagtcgaaggataaaattcttcaaaaagagctccactcaggtcgggctgcaaacgttatgacaaacaaacaatagtcaccaaaaatgaacgccgaaaggtttaatgcatatcgaattatgtgggttttagtattatatgacctcccgaccgaaacgaaagccaatatgaaagatgcaaaccgtttccggaaagctttgattgatgacggatttactttattccagttttcgatgtatgtgcgtcattgtccgagccgcgaaaatgcagaagttcatatcaaaagagtaaaatttatgcttccgaaagccggaaaggttgccattatgtgcattaccgataaacagtttggagacatcgaaatcttttttgccagaaataaagaagaaccgccaccgaccttccaacagctcgaattattctgaattttatatcctaaaaataaaaataatctactgaaaatcagtagactattttttgaggttgtccttcatcacgaagataataatttttgaaagcaattcacaacagaaaaagcctgtgcctaattagcacaggcgttgtccttcatcacgaagataataatttttgaaagcaattcacaacacgatggaacaaagaaagcttggaaagaacgttgtccttcatcacgaagataataatttttgaaagcaattcacaacaaccggtaaaaatataattatgaaatttcagttgtccttcatcacgaagataataatttttgaaagcaattcacaacaaagcttcggtttggtttcatctagccagagttgtccttcatcacgaagataataatttttgaaagcaattcacaacgggggtatgatagtaaaaaaaataataaaagttgtccttcatcacgaagataataatttttgaaagcaattcacaaccttgaatgtagcattttccaatttcaaattgttgtccttcatcacgaagataataatttttgaaagcaattcacaactcaatcctaatacctttttcgtgtccaattgttgtccttcatcacgaagataataatttttgaaagcaattcacaactcaagaccttgaaagtaagtcacgaaaagagttgtccttcatcacgaagataataatttttgaaagcaattcacaacggttccaaataaagccattgcgccctgtgcgttgtccttcatcacgaagataataatttttgaaagcaattcacaacccaattaaacaacggttttcgttcgacgttgttgtccttcatcacgaagataataatttttgaaagcaattcacaacgcttcgtttatcgcggttaataatgacgctgttgtccttcatcacgaagataataatttttgaaagcaattcacaacttggctgtccgcccacattgtttccgctttgttgtccttcatcacgaagataataatttttgaaagcaattcacaactagtatcgtacatcgccgcgcacacgtcgagttgtccttcatcacgaagataataatttttgaaagcaattcacaactagttaaaggagatacaataaaagaaataggttgtccttcatcacgaagataataatttttgaaagcaattcacaaccgtggagatgcaacacgttttggtcattcggttgtccttcatcacgaagataataatttttgaaagcaattcacaactactttttcaaacaatgaaatttaatgtaagttgtccttcatcacgaagataataatttttgaaagcaattcacaacacgctaaagaagttatctatgttggtgtaggttgtccttcatcacgaagataataatttttgaaagcaattcacaacggcgcaagtgggtggaacagcgaataactagttgtccttcatcacgaagataataatttttgaaagcaattcacaaccgttgtgacgaacaaacattgacaattttggttgtccttcatcacgaagataataatttttgaaagcaattcacaacatgcttcctcaattgctcttaaaatactttgttgtccttcatcacgaagataataatttttgaaagcaattcacaaccatcagcccatttgccaattaaataagttggttgtccttcatcacgaagataataatttttgaaagcaattcacaactagttttagctaaaagaaattcggaaatttgttgtccttcatcacgaagataataatttttgaaagcaattcacaaccagttttgcactcgcacttatcgctttgttgttgtccttcatcacgaagataataatttttgaaagcaattcacaactgaaccgcccttcgataattcctaaatcgcgttgtccttcatcacgaagataataatttttgaaagcaattcacaaccgctgactggcggtttcatattgttggagtgttgtccttcatcacgaagataataatttttgaaagcaattcacaactcaaattgagtgttaaagtcctcatcttctgttgtccttcatcacgaagataataatttttgaaagcaattcacaacaatccttgattatgtaataatttaacccatgttgtccttcatcacgaagataataatttttgaaagcaattcacaacaatccggtcgtttggttctttaactttatagttgtccttcatcacgaagataataatttttgaaagcaattcacaacataaaccagcgtctggaaatgctaaacgcagttgtccttcatcacgaagataataatttttgaaagcaattcacaactgaatatttcaaagtccattggatgtcattgttgtccttcatcacgaagataataatttttgaaagcaattcacaacaattgttggtagatggattgattggggaatgttgtccttcatcacgaaggtaataatttttgaaagcaattcacaactatactggcgcaacaaaagaaagaacagatgttgtccttcatcacgaaggtaataatttttgaaagcaattcacaacaatgaagcttcagttttacgcctaagtttagttgtccttcatcacgaaggtaataatttttgaaagcaattcacaaccattcggtgtttgggatattattgaggaaagttgtccttcatcacgaaggtaataatttttgaaagcaattcaaaaatggattgtaagttttgatgcggaaggaagttatatcatgtgaggaaggtagtaatgtttaaataaatgctaactattagccattaaaaataacttaaaattaccgcaaactatttttgctgtataattttttttattctatttttatcacatccgatgttagtaatccaaaaccaatttttcagtaacataaaaaaacagcctgtaaagatatacaagctgttttatttttttcattggaaagaaaacttagtcaagaggttttcttccagaaataatattaaacaatactactacaacagcgattaccaataatatatgaaccagataacctgtactcattcctggtactacgcccagcattcctaatagccaaactacaatacaaatagcagcgactaaccataatagacttctcataattttattttttagtgtgattgatgggataatatcacatactgtgcctttttgtctcagttgtaaaaaaaatattttattgtctaggatattctaaaaggagagccaccggaaaatgatcactgtaaccaccgatatatcttgatccggagtaggttctcaaagggaattgactgtttttcctgtctttgttgcaaagtttggcgctattgaaaattagggctttgtgagagcctttttctatctcagaaatgagaatttggtcaaacaaaacgccttttttaccgtgaaatgtagaaaatacgttgtgatcaaaaagtatttcaaaaggatttttaactacagtattattttcatcgtctttgcagatttccttaattatattttggtcaggattttcgttgaagtctcccataataatgattttttcacctttcttatgtagttcaacaaagatcgaccttaattttttcaggatatgaattcggagatttttcttgatgtcaagatttctttttgaaggaagatgcaatacaaatacttggaatttttcattactaaccattacctcagcctgcaaaacatctctggaatcgaactccggattatcgtccagaggaaactttaaaaagctgaaacttcgcaaaatgcacttgtcaggatttagtaacaatgcaacgcttaaaccgcgagagtcgtcggatttttgataaataatttcatagctctgcaatggagaatgttgcgtggtcaaatcttccaaaacccgcaggtcgccaatttcagctaagccaataattgcaggcaactgacctagatcgtcttttataaaacgaaaagcctgacttattttcctgaccttgagttcatacttataatcatcccaattgtaaagaaagggattctggctggcattaggaggaaaaaaattctcgacattataaaacaggaatatttctttgttcatcagtgattgttaccattttttccggcgtgtgtaaataaaggtaatcactacaatcagaaccattaaacccaaagtaaaataatagccgtttttatgatgtagttccggcatattgtcgaagttcatgccgtaaacgccagcaatgaaggtaattggaaggaaataaacagaatagatagccaaaagtttcatcacctggttggctttctggtcagaaagagccagaaacatagaaattaggtttactgtctgcgcattcacgtggtcaaaatctgcaatcacatccttttgcttgtccagaagatccatcacttctacctcttctagattcagcgttttgaacttagagatccattctccggatatattcaggattcttgtgttgagtccagattttcttttcagcttataaaggcgtcttatctggttgctttggttggtgtttttaagaaaaatttcattctcgattgcatccataatttccagcagattgcggctttcatcatcaaaagttttgatgattttcagagccagcctcagcgccagatgatctctggatatgttctccggattttcttttttcaactcgtcgcaaacctcgtaaatgcttttgctttttgaccggtgtgtagtgatgattagtttaggaagcaggaaaatgcctagcttactactgatgtcgctgatgttgttcagcgttcttctttcaagatcagtagattcccttgccaggaaaaatttcacatcgcccacttcttcaaactttggaagatggttcggatctatcgtatcttccaataaaaggtaattaatatgatagcgctcgtgcagaaaacggagatcttcatccgtaggcgcagtcacatcgaaccattcccattgtgcagtcttatatttttgttcaattggcataaaacaaaactaaataaaatcttcctatcaattcaaatttttattggggcagctattccgtcctccattcccgcttttttcagttattgctaacatctttgtaaattttgtagacattttatccatcgcaataacagaaaaagagctccattcaggccgggctgcgtactattctgcctttttttataattcgcattgccggaaaataaatgcttgatattgagtattttattggataaaattctgtttgatctgctatttcgttcatatagttatgtaataaataaaataattacttttgcggaaaattttaattcataaaaatgtttaaaagtgtaattgctggtgttgggcattatgtgccagaaaataccgttaccaatgatgatctttctaagctaatgacaaccaatgacgagtggattacggaaagaacgggtataaaagaacgaagacacagaaaaaaccgtatagactcggaagaaacaacgtctttctatggtttcaaagcgtctgaaattgctctgaaaaatgcaaatcttaccgctaaagatatagattatatcgtttttgcaacactctctccggactattttttccctggttctggtgtgcttttgcaggaattgctaggatgtgatactattggcgctttagatgtaaggaatcaatgttctggttttgtctacgcaatgagtgttgcagacgcattcataaaatcaggattatataaaaatgtattggttgtaggagctgagattcattcgtttgggttggacttttcagatcgtgggcgcggcgtttccgttatttttggagatggcgctggtgcggttgtcctgtctgcaactgaaggggatagtgcaagaggcatactgtctgtcaatatgcattccgaaggaaaatatgccgaagaactggcggttaaatttcccggaaccaagctcggctggagtgatgtactgattactaatccggattctatcgcagctgaagatatctatccagtaatgaatggaaattttgttttcaaacacgctgtaacacgcttcccggaaactattatggaagcgctccaaaaagcaggaaaatcaattgaagatttagatttgctgattcctcatcaggccaatattagaatagcacaatatgttcagcaattattgaaattaccagatgaaaaagttttcgttaatatccaaaaatatggcaatacaacagctgcttctattcccattgctttgagcgaagcgattcaggaaggtagaatgaaacgtggcgatttggtttgtatgtcggctttcggaagtggtttcacttgggggagtgttttatttgagtattaattcaattcaaaataaaaaagagctattcgtttcggaatagctctttttttattgattgattttctgaacaactttgtcagacaattttttcaattgctccatttcttcgagattgaggttcattgcttttgctaattcaattgggatgcaacttgcatcttcttttagttttacacctttttcggttaaattaattttgacaacacgctcatcttccttgcttcgttttcgttccagataaccttttgattctaatcttttcaaaagtggtgtcaaagtgccgttgtccaattgtagaatttccccaacttgattcaccgtcacatcatctttttcccaaagcgtcatcatcgtaatgtattgtggataagttaacccaatatttttaagaataggacgataacactgcatgatttcgcgatgtaaaacataaacagaaaagcaaagttgtttgtctaattttaataaatcttccatattgagttttagattgaagtcctctatttaaagataaataattttgctccctttagtgttgggaaaacaagtttaatcgttgctcacagtcagcttaacttcgatatttcctcttgttgcattagaataaggacagacttgatgtgctttctcaatcaattcctgagcttgttccaaagaaaccccggggatattagcgtgcaattctgcttccagaccaaatccaccattctcgatttgaccaattccgactttggcagttacggttgtttcgccagtttcgattttgctttgtttgataaccaagttcaatgcgctgtcaaaacaagctgcatatcctgcagcaaaaagcatttcaggattagcaaaatcatcatttgctccaccaagaccttttggcattctcacttccaaatccaaaattccgttatcgctttttacgtttccgtttcttcctcctttggctgtagcgccaatgctgtacaatgttttcattttgttgatgtttaaatattttttgatgagacaaatgtatggtgtaatattatattgttcacaatataaattgaagtttacatcaaaatcaatcattgatgtaagctataatgtgttttttaaattcaattttagataaaatcataataactataatcctttccaaggatttttggcgattacatttattttgcaggaagttatctctaaaatatatttgtcttttgcaaaaattttgcccattgaataaatcaagattgataaaatggcagtttttaatcttgacttaaatattttttttaaaattttaaataattgaaaattagaattttaatgtttcttttgttagaaggatgaaacaaaatatttttttggcacggaatttacaatgtctcctatgtaaaatttaaaatttaaaaatatgaaaactttaaagcaattggtattaggtctaggaattttggctggtggagtagtttcagctcaaagtgctgatatgaccaatatgttcaaagtaggacttaatggaggtgtatctacaggtggtaatacatctgcaaatctaggagtagatctttcttatcagaatctgattacgccaggttttggtcttggtatcgcaacgggttataaccattatttcggtaaaaacgctacaattaataacgtaaaagtagataataatgacttcggagtaattcctgttgcagcattgtttagagtttatcctaaacagacaggattttattttggtgcagatctaggttacggtttcatcgtaggtgatgataaggtagcaacaagttctaatgcagcttatgctaatgtagatagaccagacggtggtttctatatcagaccagaaattggataccataatcgtgactggaacttctttgtacagtataacaaaactttcactggagacaaaggacaaatcgcagatcaagattacaatgctggagcaattggtgttggattcagctacaacattcctttaggaaaataatcatttatttagaaaagcatactgctttttataatagagcaattaaactatgacttaattaacgcctgcattaacttgtgggcgttaatttttttaaaaacttatcatacatcaataccaattgtagatgattctatttacatttgcattgttaaatttaaaaaatgaaaaaagcattattattaggcgttttgatcagtggattagcgtttggacagaccaaaaaattggcaagttctgatgtacactggtggggttataaaattgcaaaaacagaagcatcttcacacg

SEQ ID NO: 1218 - DNA, 24341 bp, synthetic construct
  variation 16041..16042: note = n is a, c, g, or t
  variation 16965..16966: note = n is a, c, g, or t
  variation 16888..16889: note = n is a, c, g, or t
  variation 16503..16504: note = n is a, c, g, or t
  variation 15887: note = n is a, c, g, or t
  variation 16118: note = n is a, c, g, or t
  variation 15810..15812: note = n is a, c, g, or t
  variation 16349: note = n is a, c, g, or t
  variation 15964..15965: note = n is a, c, g, or t
  variation 16426..16428: note = n is a, c, g, or t
  variation 17196: note = n is a, c, g, or t
  variation 15656..15658: note = n is a, c, g, or t
  variation 16195..16196: note = n is a, c, g, or t
  variation 17119..17121: note = n is a, c, g, or t
  source 1..24341: mol_type = other DNA
  variation 17042: note = n is a, c, g, or t
  misc_feature 1..24341: note = Synthetic
  variation 16657..16659: note = n is a, c, g, or t
  variation 16580: note = n is a, c, g, or t
  variation 16272..16274: note = n is a, c, g, or t
  variation 17350..17352: note = n is a, c, g, or t
  variation 15733..15735: note = n is a, c, g, or t
  variation 17273..17274: note = n is a, c, g, or t
  variation 16734..16735: note = n is a, c, g, or t
  variation 16811: note = n is a, c, g, or t
tttagtttttctatggtcagccccagactgttaacatccggagaaataccaccgtgcatgcataggttatcgccgattttttcaatcaggttcttacttctcagccatcgccccagttctgttttttcactgtataaatccgcataggaaaggtttagcttctccgcattcaggaaatatttctggtctacatatttaaagttgcctgccagattcataatgtcgtgattgcccaaaatagtatgaacgtagccacctttcagtttagcttcttcttccagtttataaagcaaccacattgtagcaggtacttcggttcctctgtcaaacagatctccgcaaatcaccagatgcccgtctccatagatccattcgtattttttattaataactttgttcgccagtaacagctctcttaatgcatcgaattcaccttcaatatccgagagtaccagcattttcttaggctgtgccgttacagagggctcattcgaaatattttgttttagttttacttcaaaatttttctccggtgcatccgaaaaactgatgcgcagttttatagctttcttgtttttttgaaggtaatgttcttttttctggttgccagcctcaatttgttgcacaagaatactgtcgcctttataggtgacatatggaccatcggatgaattaacaggtcttttttcctgtccctgaacggagcataaactgagagaaaataataatagtagtacagattttataggagaaaacatcatgatatagtattaatctgaacaaatataagggataatggggacttgggaatgggttatcggttgctagttgttggttaagtacgaagttagaagtacgaagttagaagtacgaagttagaagttagaaaaaagaaattagagatctgccttaagtgatttcatctggctaatcaaaagctcccgactatatcggtttttataattaattacccggatattttatagcatccgaaagttctataggattgttgttttttcttattgtaaactgtttttgtttcgtaagctcattgaaattaggtgtaactggcttaccagattcatcaacaaatttcatttttactttaccggttttggcttctttatatgggtcattataatagtccgtatatactttatttagctgatgaattgttacaggaatactcttaattagttttggattttttccatataagtcttcagatccttttagtattttcactaaactgaattcgtaattatttttagtgtcattcaaagcaacaataagtccgggaagtccattgaaaatataaggaccttcatgtacggggatatcagttgtaaaccaggctatccagtctctgcctttgtatgatgttgttgctttttgacatttcatttgtccgataacttttgaatccttggatagcttccaattaaatttcggaagcttttcagaagtctcaaacagatctaataaaatattgtaatatttctttacacttccagtctttaaatcttttttaacaaaaaaagcataatctctcgataccgtctttgttataatattatgggcttcgtttgtaacaattgtagaatcacttttatataatttgtatgaataaaatacagagttatcaatattgtaatccaataccatattcttagttacaaattcagcactagtagaatctgttttatatttcatatcgtaaaaagccctgaaactttgggcaggtaaaaaaccaactgtaataaaagtcagacaaattttaattaatttcaatttcataatattttattgtggtttgttttaatggatttttcgtccaatcattccaaatacctttgtatgggtcatatccacattttaaaggttttgataagggatttgaaggtttttcaagataagctcgacaatctgtgcatatatatcggtattcacaatctttacagatctcaatactatcctttgtaatatttctaacagggtctgcttctattaccgtgtaaagatcttcaatcaaaatattatttatatgaccaatttcatgatgaagagaaggacagttttttattgttccatttctggaaataaacaatttgtcctttaaacaattatttacattttttgatttcgagaagttttttatatcgattaaaaaataatcggtattaataatgccacataatctttcatctgtaagattcttttcatagtaaataacattaaaataaaaaggcttattgatgcttttattaaatggagaattataaaaatatagtatctgaactctgggatttttctcaatataacttatcagagcggaatttttatcttcatccatatagggaatcagaatttcaattgttctgatatttgatgatgacaataatgaaagtacttttttcaattttctgaagctataatctataaagcggatttgtataaattcggcaccgatagattctagtttcttatatacattttctatagagaatccttcattttttgagtgttcaataataacttcattgatcagtttagaagattcccactgaagacttttacggtgtgtacttttttcaacagatatatatccaaacttttcctctgtaaggaagtcgataatttctttactcttatcttcatataaaatagaaagatcatcttcaaaataagaatatacttcatttatatttattgagttcttagtatacaaatcacagagtaatatattctttgctccttttatgatctggcaatcctgatataaaataaaatatttactcttcatcatcaaataattttatatcaataaatggtgtgcttaccttatcataaagcttcactttcagactatttgtattatacctttttgaaaagatgtgatacttcttgctgttaggtatatttagagatatcttttttaaatgttctgtcagcttaggagttaaagtgaagtatattaagttaattctgtttttcataagattcataaagtgttttaagtgataaagcgatttctttatccagataagtattattaaaaacggaatggtatgtgaattgtcctgtagcattaatttcaaggaaaacataattgtcattattatcaataatcatatcaatagatgcacagtttagatccagatgctgtaacattttttgcaacttaatttctaccgatgttggcagagaatacacttcatatctacaatcaaaatggagggcatttactctgtgatcaacttcatttttattttcgtctataattctagtggtaaaaaatctgcctgtcaaataaaagattctaagctcaaattttttctcaactcttttctgtattagtgctggcggaaaaaaatcaggtatattatctatatgctcatttactaccttagtcctcatttgtatagattctccatttacctttaaatgcctacaattttcaaaaggttttgttattaaatcttttccattatgaagttttattatttcaataagatcggactttgaagtaatgacataagaatcgggtatgagtagtccgaattctttggctattttcatctgtagtaacttgttttctgtcgaaaagaaaggactggttagccatttgattttttttatctttcgtaattcgttaaaaaagaattgacaaaatgctgatgcttcataactgtaaaactgattaaaagactttgagattttctttgtcaaataatttcttgtaatctcatctatgttgggcgagtattttctaaaccatacgactttaaattcattaatatcaaatccttttattttgaataggttagtttgaaaatctacttctacatcattatacagctcatcattaatacgtataaaagaaagcttccattttattagccagtcgataacaaggtctgtagtcggttccgagtctcttgagataattaaaatcattcaatacatttaaaattatccattaaaaactgagctccatttttacttattttatctgaaattgttaatgtaacatcgttctttttatcacactgcaatgtttttgtataatacccttttgggtacgttttttttctgcctactgaaagatctatgaatgccatgaattgcattggattatcatgataagttgtaaaagcgtataataattttttagatgtatggaaactcaccacacctgttacttctttactttgcagtatctttttgtatttattcttgtcgtgtgcatgtacataagctccaaaaattagcattgtcatacgaagggagtcattggtgtatttataataattaccattaaaattacttccttcatatttaaaatactgatcaccctgatacaggactgtttctttcggaatagaattgtataatgcatatttgctgtatgaggtacagctatatacaaatagtaaaaagaatactaaggacatttgtttatacgtctttaacatatttcttataatatctttcttcataggttgacatttttaaaaatcattcaatgcatttaaaattatccattaaaaatttagcatcgcttcttgacgcattttcagaaataacaagtgttatcttgttcttattattgcattttatggtttttataaaatcactgtcagggtattttttttgacctacggaaatatcaaagaagtgttcgaatacagtagcattattatgataagttgtaaaggcatataataatttgttccggcttttaaaaggtattttattggttatcgatttatcagccatcatcttcttgtattgctgtatattttgtgcataaacaaaatctccaaacataagcatcgtaattttataatattcattggtataccgatagtaattaccatttgaataaaattcagatttttccgggatcgagttgtagaaagcatatttactatatgaagtacagctgacagcaaatagtaagaagaatgttaaggacatatatgtatatatccttaacatcccttttgtcataagaaaacctaataccatgggccagtgttctttcctggacctgatggatctgtaggtttatctccatcttcactaccatcgtcgtcatattcactttctaatgcagcaggccttggaactgtgattacaacctctttaatcgttaaggatctgtttccaccaacgattttagaaccaaatgttttggtgaatcctcccagttgtaattttttccgaaggttttcaattgatttgtcttttttcataaataaaatatttaaaatgatgtgccattattgacattttaaatttggtgatatttatttgtaaaaaaaagatattaacatagtttaacatttgtaatgtgctgatttgtaggtttttgtgtttttgttattttgatgataatgctttatgaatgtgatttttatttctaaactccctattcacaaattttcaaatagctatcccttcaatttgaaataattttatcttatttttgcccgaatattcattaatacggacattcatggaattaaattataagctagaggaacaggattatttacaattgtatatgtatgctgcttctaaaaatcaggttataaagcagcagcgacaaagggtgttatggcttctgattataatctacatcgtttgttcattgcttatgtttagtatgagtatggtttctttgtttgtttttatagcagctgctattactgttacgcttatttatatatattactatgaacgtaagcgctatgaaaagttttacttaaagaatataagaactaatcttaaaaacaggataggggttaactataaaactgtatttggccctcacgatattattctgacagagcctaatgctgaagcaaagtttaaatatcccaatatagaacttgttgaggaaattaatacctattatttctttaaaatgaaaaccggtgaaagattcattgtgcctaaaagtgctattcagaattctcaggaatttaatcagataatcagcagactgtctaaagattataatattcagttgtatcaggaactcaactggaagtggagataggagattagttattggttgtcagtggttagttgctggtgaaatgtgtaaccataaaatcgtattaccttattcacatattatagttgtaaaatcgtttaatcgtgtaactgtaaaactgtatatacgaattaacgattacacaaattcacccattcacctattgactcattgactcattgacataattataattgtaaaaccgtgtaattgcgtaactgtttaatcgttttacagtgtaaacaaattcacccattcaccccttcaccaattgacccattgatatagtatagttgtaaaactgtgtaaccataaaatcgtgtagttgtttaactgtttaatcataaaagcaaatttacgattgcacgaattcactcattgacatattcacatatttacctgttcataaatcttatttttttcttttggcttataatttgtagttgttttatcttgaaataagaaatatttactttattttaaatgattgaaataaaattatactgaaactaacttgtgagcatagtacgggttgacgtctaaaagcagattctgttaatatctacaacttgtaattgttctgattaataaaacactgatgaaatctcaagatgaaaaatctaactacaacaaagggcgaagcctggcaccggaggatatattaaaggctctgttggatgcattaaagaattacgaaacctcgggagagaagttttacgatagtgccgatctgaagcgtctgttgaatattagtgacagtacgctttaccgattgcggaaaaccaagagtattccttttatacattttggaaaaaagtacttttaccctaaatcgttttttgataagaaagccgaggggtaaattattgaattttaaacgcaaagaacgcaaagcttcattttcttttatgttgtttttaaggctcgccaagccgctaacacttagcaatgggcgctaacttaactatcttaacttctaaatgttgaaaataattttacctgtctgtgatctttgaattattaaatcttaaacgcaaagaacgcaaagtttcattttctttgatactgctttaaaggttcgcgaggccgctagtgcttagtaatgggcgctaacttaactatcttaacttctaaatgttgagaataattttacctgtctgtgatctttgaattattgaatcttaaccgcaaagatcgcaaagtttcattttttttaatgctgtttttaagattcgccaagccgctagcgctcagcaatgacgactaaaaacttaatttccttaacttctaaatgttgaagataattttatcgcaagataaaatttttgtgctctgaaagcagtgctgtatcaacatcacttttgtttctttgtggttaacgttctaatagtcctaagacttatcataacactaaggcacaagatctgtttatctgctttgctttttaaggcacgaattgcttcgcaatactttttgtttattatattttcagcgtcagttcgagtggaattattgaggtttaaacgcaaagaacgcaaagtttcattttttttaatgctgtttttaagattcgccaagccgctagagctcagcaatgacgactaaaaacttaatttccttaacttctaaatgttgaagataattttatcgcaagataaaatctttgtgctctgaaagcagtgctgtatcaacatcacttttgtgtctttgtggttaaccttttaattgtcctaagacttatcataacactaaggcacaagatctgtttatctgccttgctttttaaggcacggattgcttcgcaatattcagttttcaattgtggcagttcgagtgaaattattgaagtttaaccgcaaagagcgcaaagtttcattttctttgatactgctttaaagatttgccaagcggctaacacttagcaatgagcactaaaaacttaatttccttaatacctgaatgttgaagataattttatcgcaagataaaatctttgtgctctgaaagcagtgctgtatcaacatcacttttgtgtctttgtggttaaccttctaatagtcctaagacttatcataacactaaggcacaagatctgtttaccagccttgtttttttaaggcacgaattgcttcgcaatactctttgtttattgtgttttcaacgtcagttcgagtggaattatttgacgtgaagcggagaataattgtgtatcgagaattcttttaaattattgaggtttaaacgcgaagagcgcaaagcttcattttcttttatactgctttaaaggttcgccaagccgctagcgcttagcaatgacgactaaaaactaaactcacttaacttctaaatgttgaagataattttatcgcaagataaaatctttgtgctctgaaagcagtgttgtatcaacatcacttttgtgtctttgtggttaaccttctaatagtcctaagacttatcataacactaaggcacaagatctgtttatctgctttgctttttaaggcacggattgcttcgcaatattcagttttcaattgtggcagttcgagtgaaattattgaagtttaaccgcaaagatcgcaaagtttcattttctttgatactgctttaaaggttcgcgaggccgctagtgcttagtaatgggcgctacaaattactccgtagaatcttcgacttagagttaaataacttccttccaggttacatactagtgtactttagcagcacttttgtttcactcttgttcggggtttgttcgggaatacccccgtttttaggcaacattcccgaagcatcctcgaagcatccccgaacaaagccattaaaaagcattggatgtataggcagtaaaagcctttactcatggtgtttttcagtgttttcagacagaggattgtatcgtatttcagaggtttataccggtcaaaaccagtcaaatgcagtcataagctgtcaaaaccagtcacgaaaactgaaaaataacttttgaaaacaataagtctataccttggctctgcaaccaataaattttatttattatggcaacaattagtaaaggaatccttggtggattctcaggaaaagtaggcaccgtagtgggtgttaactggagagggatggatatcatccgaagtgtaccaaagcggtcgcgaaaacggccgacagataatcagatgttgcaacagtacaaatttaaactggtcgttagcttcctgcagcctctgcgcagtatccaggagttgtatttcggaagcccgcagggaagcctgtcgcgggtaaacctagcaacatcggaaacgctgaatacggctttggaactggtgaacgatgtgccggaattggtattcgaaagaatactgattaccaaaggcgagcttaccggatttcagaatctgaaaatcagtccggaaacggggagtatcctgaatctggaatgggaggacaacagcacacaaggcaatgctaaagaaacggatttgatgaaccttatctgttatctggaaacgcaaaatgcttttgtcatctttgaaggactggcagcccgtaagcttattaaggctactgcaaaactgccggatgtgtatcagggaaaggaggtgcatacctgggctttcctgaacaacgagaagaaaacacaggccagtaccagtgtttaccttggcaaaattactttaacctaaacaaaagatcacccgaaagggtggttttgttttatatgtaaagaagttttgagaaaaataaaataaaaacataaaaaatcccccgtattggaagacgagggggcttgaatgttttcacaacggaataatccttattgtgaattgctttcatttacaaagctatgtaaataaaattaatttcaaatacggaaaaccgtaaaaatgaataaaaaagtctttttatatttagtgggtatttgaaatgaagacaattatggttaaaaatatacttggattagacctaggaaccaattctgttggatgggcgttgataaaacaagattttgaaaataagcagggcgatattctagggatgggaagccgtattatcccaatgtcacaagatgttctaggggattttggaaaaggtaattctatttctcaaactgctgaacgtaccaaatacagaagtgtaaggagattgcgtgagcgttttttgttgcgaagggaaaggcttcatagagttctgaatgttttagattttctgcctgaacattatgcctcacaaattgattttaataaacgcttcggaaaattcaaagaagaaacggaaccaaaattagcttatagtaatgatggttttattttcaaaaaatcatttgaagaaatgatttcggattttaagactcatcagccagagctattagaaaataacaaaaaagttccttatgactggactatttattatctccgcaataaggcactttctcataaaattgaaaaagaagaactggcttggattcttttgaattttaatcaaaaacgtggatattatcaattgcgtggtgaagaagaggaagagaaccctaataaattgattgagttttattctcttaaaattgttgatgttctggcagatgagccgcagaaaggaaaatccgatatctggtattcattgattctggaaaatgggtggatttacagacgttcgagcaaaataccattgttagactggaaggggaaaacgagagattttattgtaacgacagatttgaatgatgacggttctgtaaaaacagataaagaaggtaatgaaaaaagaagtttccgtgcgccaggcgaaaacgactggactttggttaaaaagaaaaccgaacaagaaatagataactccgataaaactgttggagcgtacatttacgaagcgcttcttcaaaatccaaaacaaaaaatcaaaggaaagctggttcgtaccattgagcggaaattttataaagcggaattaaaacaaattctggaaaaacaaatggagtttcatccggagctaagacaagatgatttatacagcgattgcgttcgcgaactctataaaaataatgaagcccatcaactgacattgagtaaaaaagattttgtacatctttttatggaggatattattttttatcagagaccattaagaagccagaaatcatccatttccaactgtactctggagtttagaaaatataaagacgaaaatggaacagagcatatacaatacctgaaagctcttccaaaatccaatccatattatcaggaatttcgcatctggcaatggatgtataacttgaatatttacaaaaaagaggatgatacgaatgttacgaaggagtttttgaatagcaaagccgattttgaaagtctgtttgaatttttaaacaataaaaaagaagttgaccaaaaagctttgctgaagcattttaagatcaatgataaaacgcatcgctggaagtatgtagaagataaaaaatatccttgcaacgaaaccaaaacgatgatttcagaaaggttaaaaaaagtagaaaatatttctgatgatttcctgacaagagaaatggagcagaaaatctggcatatcatctattctgttaatgataaagttaaatatgaaaaggcattaaaatcttttgctgagaaaaataatctggatgaaagttctttcttcgaagctttcaaaaagtttccaccttttaaaagtgaatacggtgctttttccgaaaaagctattaagaaattgttgcctttgatgaggttagggaaatattgggatgacgatgaaattctaaaatatagtgatatttattttaaaaatattgaatatttattgggtgttctcaaacaaaaagataaaaatatttctgatgataatcgccaaaattggaacaaatcaataaacaataagttacgagaagagttagagattttccaaaatgcggaaatagaatcttttcaaggactaagattgcacattgctcagtatattctttatggaagacattcagaagcagcaatgttgggcaaatggaattccgctgacgatctggaagagtttctaaaagaatttaaacaacattcacttcgtaacccaattgtagaacaggtaattacagaaacacttcgtgtggtaaaagatatctgggtgaaatatggaaacggagctaaagatttctttaatgaaattcatattgaactgggtagagaaatgaaacttcctgctgaagatcggaagaaaatcaccaatcagatttctgaaaacgagaatacaaatctccgcatcaaggcgttattagccgagatgatggttgatagttctgttgaaaacgttcgtcctttttcgcctatgcagcaagagattttgaaaatctatgaagatggtgttttaaattctgatatcgaaatcgaagatgatattctaaaaatcagtaaaacagcccaaccttctccatctgatttaaaacgatacaaactctggctggaacagaaatacaaatctccctatacaggacagattataccattaaataagttatttacaccggaatatgaaatcgaacatattattccgcaaagccgttattttgatgatagctttagtaataaagtaatatgcgaagcggctgtgaataagttgaaagataatttcattgggcttgggtttataaagcaatttggaggaacaattgtagagtgtggaaacggaaaatcggtaacggttttaaaagaagatcaatatgaagattttgtaaagaaacattatgctaacaaccgaagtaaaagaaataaactgcttttggaagatattcctgaaaagatgattgagcggcagatgaatgatactcgctatatcagtaaatatatttctggtgttctttccaatatagtaagaacagaagacggaacagatgatggcgtaaactctaaaaatatagtgccagggaacggaaagataacaaataccttaaaacaagactggggactgaatgatatctggaacgatttgattttaccacgttttgaacgaatgaatcaactgaccaattctacagattttactgcctggaatgaaaatcatcagaaatttttaccaactgttccggtagaattttcaaaaggattttcaaagaaaaggatagatcacagacatcatgccttagatgctttggtgatcgcttgtgctacaaaagaccacgtcaatttattgaacaatcaatcggctaaatcagatactaagcgacatgatttgaagagaaaactgatgaagtttgagaaggtagcgtataatcatccccaaactggtgaaagaatagagcgtgaagttccaaaacagtttttgaaaccttgggaaacttttacggttgaagctaaaaatggtctggaaacaattattgtaagttttaagcaaaatcttcgtgtgattaataaagctactaatcattatgaaaaatatgtagaaaaagacggtgcaaaggtaaaaggaagggtggaacaggccggaacaaactgggcaataagaaaaccgatgcataaggagacggtttcagggaaaattgatttaccacgaataaaagtaccgaaaggaaagatattgacagcaaccagaaaaaaccttgatacctcttttgacctgaagacgatagggagtattacagatacagggatccagaaaatactgaaaaactatcttcaatataaggacaataatcccgaactggcattttctcctgaaggaattgaagatatgaataagaatattgagaaatttaatgatggaaaagttcatcagccaattattaaagtcagaatttttgaattgggaagtaagtttcctttaggacaatccggaaacaaaaaggataaatatgtagaagcagctaaaggaaccaatttgttttttgccgtatatgaagataaaaatggaaaaagaagctacgaaacgattccgttaaatgaggttattgaaagacaaaagcaaggattaacagtcgttgatctaaaaggggtgaatgatttttatctatctccaaatgatttagtgtatgttccgtcagaagatgaattagagaatgtttcaatgatagattataataaactttccaatgaaaaagtatataaagttgtaagttttacaggtaatcagattttctttgtgagacaggatgttgctacatctattgttaataaagctgaattttcatctttaaataagatggaacgagcaattggggggactatgattaaggaagtatttgttaaaataaaaattgaccgtttaggaaatatttcaaaagtatagttttatgatcacccgttccatctacattggtaatcctgcttatcttaaactcaaagacgagcagatgtatattctatgtcctgaaaccaaagaactaaaaggtaaagttccggtagaagatttagggttgctgatgctagatcattttcagattacgatttcccatcaattgattcagaaaatgatggggaataatgtagtagtggtcagttgtgatggtcatcatttaccgcacggaataatgttgcctttgtatgggcatactgaacattcagatcgggtaaaagagcagctggaagccagtgaaccccttaaaaaacaactttggaaacaaaccgtggaatgtaaaattgaaaatcaaaaagaagtattgaggcgtttgggaaactattatgaaccaatgacagattatcaaaataatgtaaaaagcggtgatattaccaatatggaaggtatcgcagctcaacattactggaaatatcttattggtaatggttttttacgggaaagatttggagattctcctaatcagttttttaattttggctattcggttttgcgcagtatggttgccagagctattgtggagactggtttattgcctgtgatgggtatttttcataaaaataaatacaatccttattgtctggcagatgatttaatggagccgtataggccgtttgtggatgtattggtgatgcaatggctccaaaccaatccggaagcagaagaactgactaaagagtttaaagcatatcttttgcaaatcgctactaaagatgtaaagattgacggaaagaccagacctttgctggtggctgtaaaaacaacagcatcatcactatataaatgttatacaggagaaaaacgtttgattgcttatcctgaactgatatgaaagccgaaaggtttaatgcttaccggattatgtgggttctagtactttatgatttaccaaccgaaacaaaggaaaatatgcgggatgccaatctatttcgtaaacgtctgttagatgatggcttttcgctttttcagttttcaatgtatatccgccactgtcccagtagagaaaacgcagaggtccacataaaaagggtaaaagtcatgttgcctaaagctggaaaagttgctattatgtgtattaccgacaaacagtttggtgatattgaaattttcttcgccagaaataaagaagaaccaccgccgacctttcaacagttggaattattctgatttttaaattctaaaaaataataaaatccgttgaaaatcaacggattaaattttgaggttgtgttatatcacaaagatatcnnnaattgaaagcaattcacaacagatttttatcagggcttgatatcccaatggttgtgttatatcacaaagatatcnnnaattgaaagcaattcacaacagagatagacggaaccaatatagcagccgagttgtgttatatcacaaagatatcnnnaattgaaagcaattcacaacatatacttgttttcgtaatatactcgggctgttgtgttatatcacaaagatatcnaaaattgaaagcaattcacaacgaaagggcgtcaggtgtttcataactctatgttgtgttatatcacaaagatatcnnaaattgaaagcaattcacaaccgcttcttttgttagttcattttctttgtagttgtgttatatcacaaagatatcnnaaattgaaagcaattcacaacaattcctcttctgatccctttttaaccgcagttgtgttatatcacaaagatatcnaaaattgaaagcaattcacaacgcctgggagatgtaataagagttcttgcgtgttgtgttatatcacaaagatatcnnaaattgaaagcaattcacaacttagctaactgagacatatttataattggggttgtgttatatcacaaagatatcnnnaattgaaagcaattcacaactttaataattacttctccgtagaatggtttgttgtgttatatcacaaagatatcnaaaattgaaagcaattcacaactgtcttgttgttatatactgcgtcccgatcgttgtgttatatcacaaagatatcnnnaattgaaagcaattcacaacaaatataacctatatatagcccccaaaacggttgtgttatatcacaaagatatcnnaaattgaaagcaattcacaactcggtcgtatgaaagccaacctgagtgaaagttgtgttatatcacaaagatatcnaaaattgaaagcaattcacaaccagtattagatctatccaaagctacaattggttgtgttatatcacaaagatatcnnnaattgaaagcaattcacaacaaaccactctttattttcttccgccagctcgttgtgttatatcacaaagatatcnnaaattgaaagcaattcacaacttcccgtaaaatggtaatacaatttggttagttgtgttatatcacaaagatatcnaaaattgaaagcaattcacaacacataatcgcctctatttattctgctcatggttgtgttatatcacaaagatatcnnaaattgaaagcaattcacaacgtcgtcatagatcacacatacagggcacaggttgtgttatatcacaaagatatcnnaaattgaaagcaattcacaacgtaaaataattcatgcccgacctccccactgttgtgttatatcacaaagatatcnaaaattgaaagcaattcacaactacagggatcacctcataaatccgagggtagttgtgttatatcacaaagatatcnnnaattgaaagcaattcacaacgtgtgataatcaaaatgatggagcgttatagttgtgttatatcacaaagatatcnaaaattgaaagcaattcacaactgtgtgactatcctggcaattatgggagtagttgtgttatatcacaaagatatcnnaaattgaaagcaattcacaacagcaacaataccaggctattgaagatgccggttgtgttatatcacaaagatatcnnnaattgaaagcaattcacaacagaaaggcaaaaaaccgactgaagaacaatgttgtgttatatcacaaagatatccaaaattgaaagcttacaataaattaaggtgtttttattgtaaattagatttacataatgagccttttgtggttaaccctgtttagtcgataaagatcattataaaaaacaaaacctttcagtactcctgaaaggttctttgtatggtttaggtttttaattttaatcatgcatttcgctttcgacatagccttcatcttcgatctggaaggtcgtatggctaattttgaaattactggtcgcctgatcggtgagtatccgaagcatttggttatgcggaatgctttgatcggagacaacatgggcgctcatcgcgttgataccagaggttagcgaccatacatggaggtcgtgcaggcttttaacacccggaactttttccatggtactgcgcagttcatcaatatctacatctttaggagtaccttccaataatacatgaatagcttccatcagaagtcgccatgttctcgggaagatcagtaaaccaatacccgcagagatcagcggatcagcatagtaccagcctgtggtcagcataaccactccggcaatcattaccccgacagaggtcagcatgtccgataatacttcgaagtaagcacctttcatattcaggctgtcgccagagctttttctaagaatcatcatcccggcaatatttactaaaaggccaattccggcaacgataagcatcgccttgctctgtacctccggtgggttcaggaagcgctgataagcttcgtaaagcacataaatggaaatcgctaaaaggacaacagcattgataactgcggctagtatctcggtacggtaatagccaaaagttttggaagatgtcgcttttcgttcaccaatccggatggcaatataagccagtaagaggcctacaacatcggtaagcatgtgagccgcatcggctaacagggccaaactattggtgataattccaccaatgacttcagcgataaggtaaagaccactgaaggaaagtacaatcagtaagttttttttgtgcttactggaggctgaggctgtttgtatattcgtttcactcatggtattgggtattacatttcgtagtataaaggatttctctttttctgcggtacattttgctcaccagtcatttccctcaggttgatttctatggtctgtgccagggaagtcatcggggtgtctactggggtgttttcaaacggatcctgcatgataatagctgttttttcaatcgcgataaagagggtagggatcaggatggtgattccaatttctatgattaacaaagaaagctgagaatcgtcgaatccaaatggcagaatggcagcaaatacatagatgagactatgtaccaaaatgctgtaagaacgtggaaatacggtatttttgattctttcacattttcccatgctgtcgcataaacgtgctaatgtttcattcagttgtatgagtctgaactcactgatcagccctttgtccgccaattgctttagctgcaaagaatgttcatccagtaatgcattgggaatattagcagcttctattctgtgatcgataagataatcctgaacacgatccgagaaagggagctttctgagggattccccaagagcatagttccagataatctgacgctgagcaaattcccggataatagtttcacttcctgagggaagtgtctgggtaatctgacgtataaatgtgcgggaatcgttgacaatagcgccccatactgttcgggcttcccaccatctttcgtaggattgtgaaatccggaaggccagcaggagagatacagctgtacctaccaatgcaggaatggtaagaggaagtgaaattttctgaaaagctggaagcaaatctaaaataccaatagcgactgcaaacatggagatcagtaataactgggatttgattaaattaatgaaataccagatggatattttcttttttagcagcatagtgtatttgttatggtttgtgatgtataaaataaaaaggtgtttttttaatgaaaaaatgtcagtccgggattttaatggaaatgacgataaatgataattatagcgtaataattaataatactaaacaatataaaattaaacttttgaaatcatattcaattataaaaatgattcaaaatattacacctggtttaccccggactgacgtgtttacattagcgtgtgtgtttttgggttaatgtaaatttattttaatgctcgtgctcgccaacattggtaagcttagcattgacaaagaaggctccttttacaacaactttggcatcaggtgcaagctgccctacaggcgttattgccgtatagcccatgtcggatgttccttttataacctctactttttcgaagttgacggttcttgcatgtgacttttcagcaggagcaacttcttttttatcttttgattctgcttcctcatgagcttccggctttttgtctgtttgtataaagacatagaatttaccatcagcttctacaattgcttcggttggaatagcaggtgtagtgctgtgatccagacttaccactccggtaatattcatcccgtcgataagcccggtcttgttaccgattacagtacagtgtaccgcaattgttttgctttcgttctcaaaggaagatccaatgctgtataccttagcatcatattctgtttcaggattattagtaagtttgaagtgtacaatctgaccaatacgcattcttggcaggtctttttcaaatacctgtaaatccaggtgaagcgaagtgttgtctataatttcggctacgggagcggatacatctacatagctgccaatctgtgctctgatattgctaattgtcccgctgattggagcggtaatagccaaacctgttctcatacttgcattggtaacagaagccggattaatacccatcatttgtagttgtcgggctaaagaagccttttgggtagacaatgttctgagttcggaagaagaactctgcaggttctttttggttcccgcatcgtttttatacaactcgttctgtcttttaaattcctgttcggcaaaagcaattctgctgatggtggtaaggtactgctcctgtacgcggatgtattccggattggtaatggtggcaataacctggcctttgcgaacatagtcaccctcaagaatattaagtgtttttataactccgctgaaaagagcagctacagttgctttattgttattgggaacacgaagcagaccattggcttttacagtagccgttagttccttcatttctattggacctgtagtaacgccgactgactgtatctggtcttcggtaaggctggcaatagtaggtgctgcctcttcatggtccttagctttagccgtctgttcggttttagcctcgggagcggcttcttttttgccacagctggtgaagattaaagaagcggttatcaggtagattatggtttgtttcagtttcattttattgattaattatagaattaataataaccacagattggtttacttgctgtatggattccagatatttcagctggatattggttgatgtctgcagagcgaaaaggtattctacataagaaatatctccggtgcggtaaccgagttgtgcggctttagcaattttttcggcattaggaatggcctgttgtacataataattgtactggtccacgtcctgtcggtattggcgcatagcagtgtcgaactgtgtagtcagctgttgctgttgcaatttggcgttgttttccgcagattgtctttggtattccagtgattgtattctggctttggtagcaccaaaagtaagaggaatgcttacaccaacgtttaccgaattaaaacggttccagccattgtagtatttttcaccaccattattggttgggtgcatacctgtaagagactggctggtcacgcctaatgtaaattccggtaagccctgagctttttctatttttttgtttttatcagcaatttccatttcctgataaaaagctcttaccgatggattattggcaattacactactgtccagtacatagtctatttttaaagggagatactcctctttaggagctacttctatagattctgaagtgttcagtaaggttttcagattcttgtaagcattgtccagatagacctggttctgtttaagcaataagttaatttctcccttttgagtctctgcagtacttatttcaattttcttgatatcgccggcattataccttacagtagcaatgcggataaagtcctgatagagattgtccaggctctccagtttggttttgttaaactgaaggtattcaatctggtaataataggaccttacctgtctcaacaattcatttatagagacttctttctcaatctgtctgcttttgatgttggactctatcagctcctttctcgccttgaagatcgtagggaagggcactgtctgagagatcgcaaatgaattgtcgaacttcggactgttgtattgccccagctgtgcggatacacttagctgtgggagctctttggctgtaggtcttagtgctttggaagtcataatattcaaatccttagacttcatcaacagattgttttcaacagccatttgtgtggcctgttgaatatcgatggttctggtctgagccttcagaccctgtcctgccaaccctgataacatgatgaatagtacaactacagtagtcttagttttcatctttagaatacggccctttactttttcactgaaaataatatataacatagggagtacaaatagggtaaggaaggttgctgtaatcagtccgccgataactacagtggccagtggtttttgtacttcagcacctgctcctgtagatatagccattggtaaaaaaccgatagaagccacggtagcggtcatcagaaccggacgcaatctggttttggttccttcaataactcttttcagaacatcggtttcaccttcttttttcagctggttaaaggtgcctatgagaacaataccattaagaaccgcaacaccaaacagggcaataaatccgattccggcactgatgctgaaaggcattccccgaatcaggagggcaaatacaccaccaatagcactcatcgggatcgctgtaaatattaaagcagcctgtttgaaggagtggaaggtgaagtacaataacatgaaaattaaaagtaatgagattgggacagcaatcataagtcggtcgctggcttctttaaggttctcgaactgacctccataggtaaagtaataaccggaaggtagttttatttctttatccagtttttgctgaatatcttttacaacgctggctacatcccgaccactgacattaaacccgattacaattcttcgttttccatcttcacggctgatttgtgctgcacctaatttgtaatcgatgttggccacctgtgaaagcggaatttgcaaaccggattttgtagagatcatcagattgttgacatcgtctatattagtacggcgaaggctgtccaaacgtacaacaagatcgaatcgtctctcgttttcgtagacctgtccggcagctttaccggcaaaggcagtactgaggacatcgttgacgtcctgaatgctgagtccgtagttggccatacgtgtacgatcgtattgtacattgatctgtggcaggccgcttactctttcgatctgaggagcggtagctccgggaactgtctgaataactttgcctactttatcggcatataccgcaagggaatccaggttttcaccaaatatcttgaccgctacatcctggcggatacctgtcatgagttcgttgaagcgcatttggataggctggttcttttcaaagaatacacccggaatagtttccagtttctcactgatctcatcagccagttcatcataagattttttagttttccattcgctttgtggtttcagaaccacaatcatatctgtggcctcaggcggcatagggtcagtagggacttcagcagcaccggtttttccgactaccatttttacttcatcgaagcttttgatgattcgtgatgcctgcatagaggtttcgatactctggctgagtgaacttccctgcggaagaatacagtggtaagcaaagtcaccttcctgcagctgaggtataaactcaccacccatatttttaaagatgataagtgtgccaaagaatataaaagctgtacctgctaccagccagtattttattttaattgctttcaatagtaaaggttgataaatactttgtagtttattcatcatcttatccgagaaagtttctttgtgggaaatcttcttagacaggaacaaagcactcatcatcgggatataagtcaaagagaggattagggcgcccagaatagcaaaacctacagttttagccattggtgtaaacattttaccttccacacccgcaagggtaaggattgggatatatacgataaggataataatctcaccaaaggcagcgctgcttctgattttggaagctgaaaggaatacctcttcgtccatttctttttgggtaagcctgtttaccgactttctgagaccgagatggtggagtgtagcctctacaataataacggcaccatctacaataagaccaaagtctatcgctccaaggctcatcaggttggcactaacgccaaaaacattcatcattcctaatgcaaacaacagagacaacggaatagcagaagctacaataagtccggctctgaggtttccaaggaatacaaccagtacgaaaattacaataagagctccttcaataagattcttctccacagtgcctattgctctttctaccagatctgtacgatccaggaatggttctataacaacgtcatccggaagagacttctgaatggtcgggatt

SEQ ID NO: 1219 - DNA, 24338 bp, synthetic construct
  misc_feature 1..24338: note = Synthetic
  source 1..24338: mol_type = other DNA
cacccgtttctttgatcatgaccgtaaagcgcagtatcctgctctgcatgaagtaatcaaagacacttattatgaaaagaaaatcaccgctttaatcgacgaagtgctggatgaattaggtcaggtaaaggacaatgccagtcctgaactgtctaaaatccgcatgaatctgtaccgcaagcggatggaactgcgcaaggtattcgaaagaatcctgcagaagttacagaaactcaattacctggcggatcaggaagaagccttcctgaatggtcgcagggtagtggccatctatgcggaaaacaagcgaatggtgaaagggatcattcatggagaatccgataccgggaagacgaccttcctcgagccggacgacaccattgaattgaacaatgatatacaatcgctcgaaagggaagaaagtagggaagtctatcgtattctgcgccagctgactagtcagctcagtcagtacagcgggttgctcaacagctatcacgacgtactgggcatatacgattttatccgtgccaaagccaaactggcgctggacatggatggcaactacccgatgctggtgccgcatgcgcaggtgcatctggtacaggcttaccatcctttattgttgttgtataatcgcaagaacagtaagcctaccattcctgtaaacattacgctggacaacgataaccatattcttgtaatcagcggaccaaacgcaggtggtaaaacggtgaccctgaaaaccgtaggtctcatccaactgatgttacaggcgggattgctggtgccggtgcaccccacctcgcagcttggcatctttaaacagttgatgattcatatcggggatacgcagtccctggagtttgagttgagtacctactcctctcatctgaaaaatatgaagtacttcatggagaatgccaatggcaagactttgttcttcatcgatgagctgggaagcggttccgatcctaacctgggtggggcctttgcagaagtcatcatggaggaactggcgaagaaacatgcctttggtattgtaacgacccactatctgaacctgaaagtgatggccaataaggtaaaagggattatcaacggagcgatgggcttcgacgaacaaaccctgatgccgatgtacaaactgatggttggtaagcctgggtcttcctataccttctctatagcccaacgtatagggctgcatccatcgctgattgcccgtgccaagaaattggtggatgaagggcattttcagttggataagctcctgaacaaggcggagcaggatctccagaaagtggaaacggaaaagaaagatcttcataaactcctgaaggagaatgaacggttgaagaaggaatatgaggaactggctgataaagagcgcaaaaatcagcagataacattcctgaaattgcagaataagattaaggaagacgacctgcaatatctgaaggacatggaacgtaagctcaagcaaatcgtggtggaatggaaacgtgccgagaaaaacgatgagcgggagaaagtgatgaagcaggcagagatcctgctgttccgtcgcagagaaaagcaggtgaatgagaagctcgataaaaaagtaaacgacaaattccaggaagtgggcggcgctgcccaggtaggcgaccaggtgaaaattttgacgaaccgtcaggtaggtaaactgattgaaatccgcgataaacgtgcgattgtgcagttaggaaaagtacctatcaacgtgaagctcagtgatctggtggtggtccaggaaaaagtaaacgaatagtaattgacgtttaaaattgacccagatggaagtagcaagcaaatcacccatacctgtatatcgactggaagactgtgctgatggttttccgtttctgataacgcgaatgaaaggctgtgagccgatggtgaaggattttgccattccgcaccggcatacaggatatagtattgatatagtggtgaaaggaagtattcatcagtcggtcgatttccgccagcacgaagtgcaggcgccggctgtcatgctgatggaacctgaccaggtacatctgcatgagatggcagatgattgtgagatgatcagtatttattttaccgatcagttcctggtatccgaactgcaaggagtggtaagttgctggcgttgtatttttaattccggagtcatacccttaaataatgaccagctggatgagttactctcttacgcactgctgattgagcgggagtatgagagtaaccgcatccgccgggaggagattatccgtaatctcctgaatgcctttataattgcctgtggtcgtatatctgagcctgttacccgcgataatatctggttacgtgtggagagctcacaatataatatggcgcgacagttcaaggtcctggtggatcagcattatcatgaaaaatcccaggtgtcggattatgccgaaatgttatatgtcacccctggccacttgaatgatacggtaaaagccctgatgggtagaaatgcgaagtttgtgattgacgagaaacgtatcctcgaagcaaaacggctgctgtattggggggagcattctgtaaaacagattgcctcgcacctgaattttgaagatgatgcttattttaatcggttttttaagaagcataccggacagacgccggcagtgtttcaacgagaaagccgtgaaaagtacaattaaacccgcaaaaatttaaatccatcataaatagaattttctatttttgcatcgtgaatttaatcaatgacgctgcccgtacgtcatgctaaaattgaaagccatgaaaatttgttagcggatagccgcacatctgctgaattgctttaattatttttttacaggagtaacatattgctgcacttgtacgtataacattgctgaattagttatacatgtgccaggtgcaattctatggctgcataacacccgcccgtaatcgttatgtaagtacttagcgcactgccatgcaatatggccctgtatcctcacgcccgaatgctgtcactggaactattgctgcgaagcgagatgagttgtattgtcttcgcacaggggattctatgcagtatcactaaaaacaacaacacatgaaaccattgagatcaatttttgcaaacctgccgtcaggcttactctatagtgcaatagttctttccgccatgtatggctgtggtacttcacaggctactccaggcgcagagaatcaggctgcaccattaccggtactccagttgagcaatgtgccagctaccacttaccgggaatacaacgccgccattgaagggcgtgtaaacgtagaagttcgtgcacaagtggacggaatcctggagaaaatatacgtagatgaaggagcttatgtgaaagctggtcagccgttgtttaaaataaacgaccgcttatataatgaacagctcagcaatgccagtgctaccctgcaagctgcccaggctaacctggagaaagcgcaggtggaagtagatcgcatctccccactggtaaaaaataatgtagtatccgatgtacaactgaaaacggctcaatctaactacgctgccgccaaagccgctgtggcacaggcacaggcaatggtaggtaatgcccgcatcaactccggatatactctcatctccgctccggtaagcggttatatcggaaggattccgtataaaaccggcgccctcgttggacgtgcggaaccacaaccactgacggtactctctgatgtgtcagaagtatatgcttacttctctatgagtgagcccgacttcctgaaattcaagaacaatacagaaggagctaccatcgcggataaagtgaaacacctcccgcaagtagaactgcaactggcggataattccatctatccgcagaaaggaaagatcgaaaccatggaaggccagtttgataaaacaatgggcgccgtaagtttcagagctactttcccgaatgcatccggacttttacgcagtggtaataccggtaaaatcaggattcctgaacagttcgaacaggcagtgctggttcccgcagaagcaacctacgaaatccaggataaagtaatggtattcgtggtggccgacagtaacaaagtatcaggcgtgcctatcaccgtgtctggaaaaagcggtaactactacttcgtggaaaaaggcgtgaaagccggccaacgtatcgtttacactggtctggaacgcctgcatgaaggtgcagtagtggctccgcagatgatgtcgctcgacagtctgctgaaagtgaagccgctgtaattaataacatgttataacggtaatggatatccgtagtctttattcgtatagccattgccgtaattacatcttttcccgcgttgtccgaatggataacacttaaattctattgcaaaatgttcagaaaatttatagaacggccggtattagccaccgttatatctatcatactggtgttactgggtatactgtctctctttcagttgccaatgacacagtttcctgatattgcgccacccagcgtagctgtaactgcttcctatccgggagcgaatgcggaagtggtggctcgttcagtagcaacgcctattgaggaagccgttaacggtgtggaaaacatgacctacatgacgtccacttccaataacgacggttccatgaccctcactgtttactttaaactgggtactgaccctgataaagcggctgtaaacgtacaaaaccgcgtagccaaagctactccgctgttaccagcagaggtggtgcaggcgggcgttagtacgcagaaacagcagaacagtatgatcatggtggtgaacctcatgagcgacaaggaagagtataatgagaccttccttcagaactacgccaagatcaatatcatccctgaaattcagcgtgtgaccggggtaggtcaggcaatggtgttcggcgccaaagactactccatgcgtatctggctgaaacctgaccgtctggctgcctataatatggcgccacaggaagtactgggcgctatccacgaccagaacctggaagcggctcctggtcgctttggggaaggtagtaaggagtcttttgaatatgtgatcaaatacaaaggaaagctgaataagaacgatcagtacgaagatatcattctgcgcgccaatgcagatggttctgtgatccgactgaaagatgtggccagagtagaattcggctcctttagctatggtagcgatacccgcgtgaacagtaagtatggtatcgggattgccatcttccagacagccggttcaaacgctaatgaaattcaggagaatatcaacaagctgatggcgaaagcgaaaactgttttcccagcaggcattgagaccttcaatatttatagtactaaagaatacctggacgagtcgatcgaccaggtgaaacacacgctgatagaggcatttatcctcgtattcatcgtggtgtttatcttcctgcaagatttccgttctaccttgattcctgctatcgcagtgccggtagcaatcattggtacgttcttcttcatgcagttatttggattctctatcaacctcctgaccctgttcgcactgattctggcgattggtatcgtggtggatgacgccattgtggtggtggaggcagtccatgccaagatggagcgaggtaaagacccgagatcggcgacgattacttccatgcaggagatttccggcgccatcatttccattacattggtgatgtcggccgtatttattccggttggtttcatgcaaggtccggtaggggtattttaccgtcagtttgcattcaccctggctatcgcgatcctgatttcggccttgaacgcattgacattgagtcctgcactttgcgcactgttgttgaaaaacaatcatgcgggcggacatggacatgatgcgcaggagaaagcagcgccaaaaggctttggcaaacgcttctttgcagcattcaataccggtttcaccgcaatgaccaataaatacacccgcagcctgcaattcctcattaaacataaatggatcaccatcggtggactcatgatcatcggcgccgctaccttctttatgatgcgtaaaacgccgactggattcattcctacggaagatcagggatttgcggtatatgcggtaaccatgcctccaggatcttctctggaacgtacccgtcaggtagtggataaggtggaaaagattatgaagaatatggaagctacacataattacctgagcgtatccggcttcaacttcctgtctaactccagcagttccacatccggcgtaggtttcgtgaaaatgaaaccatataaagatcgtggtaaggtgaaagatatgaatgccattatggcgatgatgcagcaacagctgtttggtatccctgaagcgagcgtattcgtattcagtatgccaacggtaccaggtttcagtaacgtggctggtttcgaaatgatcttgcaggatcgtagtaacggtccgctggacaaactcgccactactgcatatggcctgattggagagctgatgaaacgtaaagaaatcgcattcgcattcactacgttcaatacagggcatccgcaatatgaagtggaagtagacgacagaaaagctaaacagctgggtatttctgtatcagatattctccagacactccaggtgtattatggtagtatgtttgcgtccgactttaaccgttttggtaagtactatcgtgtgattgtgcaggcagacgcgaatcttcgtaaagaaccgtcttcactggatggcgtgtttgtgaaaaaccaaagcggacagatggtgcctatcaatacagtggtatcactgaaacgcgtatacggtccagaaacggtaacccgtaataacctctttaatgcggtgaccatcaatggtcagactaaacctggttatagtagtggtgatgcgattaaagcagttcaggaagtagcggataagtatctgccaagaggatatgcgtacgagtgggtaggtatgtctaaagaggagatcagcgctggtagccagactaccgtcatctttgtactgtgtctgatcttcgtatacttcctgcttgccgcacaatatgaaagttatattctgccactggcggttatcttgtctatcccactgggtattttcggggtatttgctttcatcaatatgtttggtatcgacaacaacatctatgtacaggtaggtttgatcatgctgattggattgttggcgaagaatgccatccttattgtggaatatgccgtacagcggcggaaaggtggaatgggtctggtagcttctgctatacgcgctgccagtctgcgtttacgtcctattctgatgacctccttcgcgtttattgcggggctgctgccgctgatgcgtgcaactggttcttccgcattgggtaacaggtctataagtacaggcgctgccggcggtatgttgacaggcgtggtgttaggggtatttgctgtccctgtgttatacgtgattttccagtatctgcaagagaaagtaggccgtaagaagccggtggtagtagaggaagaagaagcagagctggtacattaatcgacattcattgaaagaatagaaaaatgaaaagaagatatcatacaacttatttcatcgtgttgtctttagttgtagggcttgcagcttgtcgggttggtcgcaattatgagcgacccccgatggcgctgcccgcccagttcaacaatgctgcgccttcagacagcagtattgcagcgatggaatggagaaagttttttacagaccccactttacagcagctgatcgataaagccattaccggcaatatggatttacagctggccgttaagcgtgccgatgctgcccagcaatacctgaaacaggccaaattagcctggttgccagggtttaatggtcaggtgagcgctggtactaccttccctagtaaaaacagtctgaatgggatgaatatgagtcaatttggtatgggagatcatatcgaagactacaatgcatctatcagcatgggttgggaaatagacatctggggtaagatacgtcgtcagaaagaggcagcgttggctacttatttgcagacttacgaaggcgcacatgcggtgcagacttccattgtatctgcggtagcgaacagctattataacctcctgatgctggacaaccagttagagattgcccgtaagaacgtggcattgagcgataccattgtacaggtaatgcgtttgcagaaagcagccggcgaggtgaccgaactggctatccagcaggccattacccagcagcaatcagcccagttactggtgccgcagctggaacagggcattgccatccaggaaaacgcgctgcagattctgacaggcgaattaccaggaccaattgcgcgtcatgcacatctgcacgactttgtggtaagcgataatctgccggtaggtattcctgcggagatggtgagtcgccgcccagatgtacgcgcaagcgaaatgggcttggtagcagccaatgccaaagtaggcgtggcgcaggccagcatgtatccatccctgaatattactgccagcggcggattgaattccttcaaagccagcaactggtttaatatcccggcttctttatttggaatggcagcaggaagtattgcacagcctatattccagaagagagcgctgaaaacgcagctggaagtggctcgcattaccagagaggaagcggtgattcagttcagacaatctaccctctatgccattggagaggtaagtgatgcgctggtaaaactggacaagctgaaaactcgtcaggagctggctggtaagcaggtagctacttcccagttggccatccagcaggcgcaactgctgttcaagagcggtatggccaactacctggaagtgatcactgcccagagcaggtcactggaatcagagctgaaccaggcaaacatcgacagagaacgcctgtccgctatggtagatctttacaggtctctcggcggcggctggaaataaagatataggaagtacggaccaggtaaagagagatgaatcagcgatatctatgaaaccatggccaacagacaggaaaaataaacggcctggttcgtacatccttcgttaaacgtaagccaggagcggaaagggaagaaattttaaatttattttggaaatttgaaatccttttatacctttgcgctccactaggagagttggcagagcggtcgattgcggcagtcttgaaaactgttgactgtaacaggtcccggggttcgaatccctgactctccgcactttaagccttcgaatattattcgaaggcttttttgtttttggaatatctagaaggtggcacataccttttgagctgtaaagtgtaattccatcctcagtaataatcctggtgtcaattagccattaatatatttaaggcggattgacactatgcaaatcttctgttcaaaatcattgtaactatttctacctaagaagttaaacgcctttagaagatttctgaagctataatctccttatttcgaatccctaaacgtactgttcttcctgtttttacattcctataggcataagctcctcttcaaatgaatagaaatgctattcaacttgtctagtttttcaacttttttattttacaatggtttattgtgttctaagagcgctgacttttagatatatttattagaagtagttgtatgttcgcttgaatggattgtactgtctgttgatttatcgtaaaagaagttttccctgaaagggttccccaaatttttgaaatatgagcaagaaatatcaaccccaacttggttaaatggggcataaaaattccaatgttatttaaggtgctggagaaggagaaaaggaactgaaataaaataaaaaaaggcgagttgccccaccttgaatgttttcacaacggaataatccttattgtgaattgctttcgttaacgaatatactttttttattcaaacatgaaaaatattttaggtttagatcttggtcctaactcaatcggttgggctttactccatttggactgtaattccaggtatggtaacatcgttgattgcggcgtacgtattattcccatgtcccaggatatcctgggtgactataataaagggattaaggtgtctcagactgcggagcggaccaaatacaggagtatgaggagattacgtgaacgttatttgctccggagagaacgcctgcaccgtgttttatatctccttaaatttttgccctcccattatgcagatgaaatagattttcagaagcgcttaggtaagtttaaggaagggagagaacccaagattgcttatgataaaaatgggttcatttttatgtcatccttcttagaaatgatggaagactttcgaattcatcaacccgcattgctgataaatgaaaaaggagaaccaaagtccattccttatgactggactttgtactacctacgtaaaaaagcgcttacagccccaattagaaaagaagaattggcgtggctactcttgaattttaaccaaaaacgcggttattatcagcttggaggtgacgaggaagaaagttccctggagaagaatacagctttatatacgttaaaagtggtagatgtaatagctgaggaatcgaaaaagggtggtgatcagtggtattctcttacattggagaatggatgggtgtacaggcgttccagcaaattacccttatttgatttgaaaggtaagattcgagattttatagtaacaacagatttaaatgcagatgggagtgtaaagaaagataagaagggcggggacaaaagaagtcttcggattcctgaggataaggactggattttgttgaaaaagcaaacggagcaggagattggtaaatttggaagtactgtaggagcatatatctatgaaaatttattaaaagatccatatcaaagaataaatggaaagttggtagggaccattgaacgtgaattctacaaatcagagctgaagcaaatactggagaaacagatggagtttcatacggaattgcaaagtgaagaaatgtatagtacctgtataagagagctgtataaacagaatgatggacatcatttgaatttgagcaggaaagactttgtacatttttttgttgacgatattattttttaccaacgtcaggtaaaaagtcaaaggtctatggttagtaattgccccctggaattccgctattacaaagataaggatggagttgtgcagaaagtgtatttgaaagcaattcctaaatctaatccttattatcaggaattcaggttatggcaatggatacataacctttttatctatagaaaggaagatgatgtagatgttacagcaacctttctgaatgattttaaggaactcgaaaatctattcatatttcttaatggaagggcagaaatagagcagcggcacttgctgggatttttgttaggcccaaaaggattcaaaggaaaattactgaataaagaagtggacaaataccgttggaattacggagagaagtcatttccatgtaatgaaacaaggacattgatatgtaaaagattagaaaagataaataatgtgccagccgattttctcacaaaggagattgaaatgcatttatggcatatcaattactcagtatctgatagaatcgatcgtgagaaagcatttacacggtttgcaacgaacaataatctggatgtaaatgaggtggtaaatgcttttaaagtggttcctcctttaaaaagcgattttggtgcattttctgaaaaagccataaaaaagctgttaccattaatgcgggtcggtagttactggaattgggaagcaatggatgtaaggacaagggaaagaatcggaaaaattataaccggggagtatgatgaacgtattggagatcggttaaggaagcaagccatccaccttaaaaaggagacagattttcagagagtaccagtatggcttgctcagtatattatatatggttttcattccgaatcccaaatggcggataaatggacctccatacaggatctggagagttatttaaagtgttttaaacagcattctttacgtaacccaattgtggaacaggtggtattggaagcgctgagattggtgaaagatatctggaaagaacatggcaaaggagcaaataacttcttcgatgaaattcatatagaattaagtagagagatgaaatctcctgctgaggagcgaaaatctatgtctcttaaggcgttgcaaaatgaaaacacgaatttacgaattaaggcgttattgtctgaattggcaaatgatcaaaatgttgaaaatgtacgtgcttattctccatcgcaacaggagatattaaagatttatgaagaaggcgtattaaatactgaaagtgaaatcggtgaggatatactgaagataagcaaaatggcgcaaccttctccagctgatttaagaaagtataaactgtggttagaacaaaagtaccgatctccatatacaggcgctattataccactaaacaaactttttactaccgaatatgaaattgagcatatcataccgcaaagtcggtatttcgatgatggattttctaataaggtaatctgtgaagcagccgtgaacaaattgaaagataaccagttggggatggagtttattaagaatcatcatggtgaaattgtgcaactgggatttggtaaaacaatacaaatattagcagttgaacagtatgagaagctagttaaggagaattacgttaataatagcagcaagcgaaataagttattattagaagaaattcccgagaaaatgatagaacgtcagttaaatgatacccgttatatcagtagctatatctcaggattattgtcaaatattgttcgccaggatactgatgataatggttttaactcaaagaacctcatacaaaccaatggtagaataacgggaattctgaggcaggactgggggctgaatgatgtttggaacagtttgatattgccaaggtttgaacgaatgaacaaaattactaattcttcacaatacgtagcatggagcgaaactcatcagaaaaatcttccgacggtaccattgacattgaagaacttttccaaaaaacgaattgatcatcgacaccatgccttggatgcaatagtgacagcttgtgttacgagagatcatattaatttgttgaacaatttgcatgctaaatccccgattcgtcatgacttaaacagaaagctaagacatcataagtcaatcgttctgaatcatcataaaacgggagagaaaatagaacggcaaattccggtagatttccgcaaaccctgggaggattttaccttggatgtgaaatcctcactagaaaatattatagtaagtttcaagctaaacctccgtgttattaacaaaacaattaataactattatgtctgggaagtgaaggatggggtgaagcaaaaggtgagaatcaggcaatctggagaaaattgggctatacgaaagccactacataaagaaactgtatacggaatagtgaatttaccgcatgtcaaagtcaaaataggacagattacgactgcttcccgtaaaaatattgatgtgacttttgacttgagtgtgatagaaaattctattactgatacgggaattcaacgaatattgaagaattatcttgagttcaaaaacggagatccagaaatcgcattttcacctgaagggttggaagagttaaatcagaacctcagaaaatttaatgaaggaaaatttcatcaccccatttataaggtaagaaaatacgaaaaagggtatcggtttgttctaggggaagtaggttataagtcaacaaaatatgtagaagcagagcggggaacgaatttattttgtgcaatttattgtaatacggctggagcgcgtagttatgagaccattcctctcaatataatcatagagcggcaaaagcaaggtttgccttctgtgcctcaggaaaatagtaaaggcgagaaattattattccatctttcacccaatgatctggtttatatacctgacgaagaagagctttccagccattcagtacctaagtttgaaattaataataagaagcatataggcaggatttataaggtagtgaattttagtgataaccaaatcttttttatcaagcatgaagttgccactagtattctgcataagcaggagttttctacttcgaacaaaatggagcgatcaattgatggcatcatgataaaggaacattgtataaagttgaacattagtaggatagggaaattaatatctgacaaatgattaaacgtacactttattttggtaatcctgcttatctgaaaactagggacaatcaactggtgattgaactgcctggaaccggggaagtaaagcaagcggtaatagaggatatcggtattttgatattggataatcgtcaaataacggttaccctgtctgttcttgcgaagttgttggccaataatgttgcggttattacctgtaatgacgtacatcatcctgtgggaatgatgctaaatttagatggaaatactttgcaaaaccagcgatatcagtatcaggttaatgcttctgcaccattaaagaaacaattatggcagcagacaatcgcagcaaaaatcacaaatcaggctaatctattcgaacagaaacgcttagtcaataaatcattattgaacttggcaacaagtgtaaaaagtggggatagtgataataatgaggcccgggctgcaatttactattggaggaacctctttcccaataatttgaattttaagcgatcacgagagggagaccctcccaataatctacttaattatggatattcaattttaagggccgtagtagcgcggagtttagttggctctggattacttccaactttgggtatattccatcggaatcaatacaatgcatactgcctggctgatgatatcatggaaccatatcgcccatatgtcgatatgatagttgaagacattgttcgcatgaatgggaagtatcttgatatgactccatctatgaaagagcagttattaaacatacctgcaatggatgttatcctagatgatgaaagaagccctttaatgaatgccgtgcagcgaacaactgcaagccttgctaaatgctttgaagggacatccagaaaactactctatccggttatgcatacatcatatataaaacatgaactttgaacgtttaaatgcctatcgtattatgtgggttattgtaatgttcgatttgcctacaactacaaaggaagatcgaaggatatatacgaagtttcgtaaagatatcctttctgatgggttttctatgtttcaatttagtatgtatttacggcattgcagcagtagtgaaaatgccaatgtccatattcaaagggtaaagaaaatcctcccatccaaaggacatgtagggatattgaatataaccgataaacaatttgggatgattgagatttttaatgggagaagccaggttaaaagccctgaggccgtacaacagttagaattattttaggatcaggtttgtatttttccttaatataaataaaaaaacgggttttgaacccgtttttttattttaagattgcatgtaaatgcaatgtggtaaagaattctgttggattctggtaaagttaatgaaagaatgaaagcaattcacaactaaaacgtccaatatatggcaattgatctaggtaaagttaatgaaagaatgaaagcaattcacaaccgcttgaacggctcaacggttttccagatgggtaaagttaatgaaagaatgaaagcaattcacaacattgctggatatgatatggtaaaggaacgtggtaaagttaatgaaagaatgaaagcaattcacaactggtttgtttcattgttcaccggttttgatggtaaagttaatgaaagaatgaaagcaattcacaacgggctcgaaagaggagttgaaagagcagttgggtaaagttaatgaaagaatgaaagcaattcacaacttaatcccttctgataaacattcacactgtggtaaagttaataaaagaatgaaagcaattcacaacattccttcgggtctaggtatctgccacaggggtaaagttaatgaaagaatgaaagcaattcacaactaattaatgatggcacactcgccgggtgacggtaaagttaatgaaagaatgaaagcaattcacaacacaaattctagcccatgcattgctactcgcggtaaagttaatgaaaaactgaaagcaattcgcaacaggatgcccaataatgtcaatcagaaaggtgggtaaagttaatcccctctaaaaatcctctgtcgcataccgcacctccatcttcggcaccatcaatacaggcgtctggcccggcatcaccaatacctgatctattgggcgggcatcggcaggcgaatttgcaaggaatacttgcacgagacgaatacctgatgctggcagcagattggaaggaattggtgtaggagaacggtgcattttcaacatccagtctggccgcccatttatgagtttaagtggcgggtgaactacctgtaaatccactgcattcgctaaaagtccggtggtgaaaggctttccttgccggaataataccacggatgtttttgatgccttcgatgcagcgattttgtacaggtctgtgtcgggcctgttcatgggaatggacgacagtcctgcctgatcgatcgttaaaggatcaatacctgttttcgctttaaggatggcggccattttcaggtaaggcttttcttcagttgcaatggtgctctccgctgcatggcgctcgcctacataaacaagtattttactgtcagggtagggttgcacaccgcgacgaataagattgtcggcctgcgcctgttcgcgctcctgatctgtatatccgcgaccagctgtttcataagacaccgggcggtatcccatcgcaagcgattgcctgatgaaatcagcgaatacaggatcatcaaaataatatccactatagtagtctcccgccgctctgacaacgccatctgccattagttgttccattttatggctggcctcctggtcatctgcagttggtcggagcgcttccaccgccagaatggtatacccaagcggttttaatgcctgggccacttcaaggccgaaggcacggcaacgcgggtccaaatgattttcattaagaataacgatgcgcgttttacgtgcacgtcgcactatttcctcgatggcaggaactgcattggccaactgaagatcggcaatctgctctttgggaacatggaagtcggcccctttagccttgttgaaggtaggtatgccagtcatggtagacatcacctgcgcccattgatctaccacatcaggatcatccaactgatctgcactttctatacccaaccttttaagcataccaaatgaagcattcagataaagtccatgcgatacatcactgatagattgcttgtaggcttccaggagcgtatcattatctatcttctttattggtaatgcaatactggtggactgcgcggaggccctcatggaagatgtaggtgcaatcaaaattgtaaatacactgatggaaaggaatatggcaattttcatttaaatcggtatgaataattttatgtacaatgatagtcaaaacaatttattaatagtagcatattatacgcgttattgattctactattcagcgccaataaacgcaatggcttcacttttttcagatgttgcaacacttaacataaaccgctcttatattgaatactacaagataattctactgcggcgattattagtttggacgactatatatttacatcgtagaccatattccggaataggtatgccactatattcataacattaaccatcttatctctcaaaaatgaaaaaaactacttctcggttcgctatgatggccatagcgctaagcctcttttttgttgcttgtaagaaaaatgacgtaacccagccatcacatcctgatgaaaaccttaaaacatcgtcgcagagaattaaagaacaattggattctgtagtcaaaatttggaataccaatgctatagtggatctgaagttgaaaggatatacactcgatgaatcgaatatcaccgacaataatattgctaacatcagacagcaactattaaatgggaataatattgtcccatattttgatggaaaaaatgcggcttcatttaggttaaataccttacaacaaagcatcgctttgcagaaatctgcccagcctaccggtttggataagctggatcaggatgcaggcgaccgtttctcaagaactattaacagtgttattcagccaggacaacacgttgctaccttgcaatggcaggtgaatggtcaaacgcttacttctacctgtatttatgataataaagggctggtatatgataacgtattgactaatatgttcgtggtaaacgataacacacaacctgaacagagcaatttaaacaaactatctgcgcagaatgtgagcgcggcatctaaccaggcatacacagcacaagtggtggatgttactatcaaatgggtttggggcagtgaaagaggcaaggtgagagtctaccacagcattttagttgattggagcaagtacaaaattattagtaactggggctccagtaataactatatgagcgtgggttctgctgattcaagacagagcgactacggtaaccatggcacctatgcactgctttcctgggcctatggatgggcaacgcctacagcagatttcagtttttcacatgatggaaatttcaaatggtccgtgtctttgagtggggtaggttctaaaggaggtggacaaggcatacacaactattatttgcaatagtaagagctgaactatcagtgaatcccctttaatgaaaacataccatctgtcaacctacgccaatatgttgccagatggtatgtttttgaatagtatcaactcataaaatccccttcagtctcacccattgcaataacataatcgtcttcccatctttaatctccccggtttctaccatttccagcgcctggttaaacggtacttccatcacttctatttcttcctgctcttgcgctaatccgccgccatcattcactctcatctgatgatcgtaggcggctacgaagaagtgcagcatttctgttacagagccgggcgacatatacacctcaaatactttttttacatcctggatacgataacccgtttcttcctcagcttctctgcgaatacattcttccgggttgttttcgtcgagaagtccggcgcaggcttctatgagcatgccgctgctgttcccattgatataagaggggagacggaactgccgggtgagtatcaccttcccggtgattggattatacagcaatataacagcgccattccctctgtcgtacgcttcgcgggattgtgtctgccagtcgccgttgcgcagcttgtactcataagttacttttttcaaagtataccagttgtccgagagaatctccgttgacatgattttaacttccggttgcatagaaatgattatatttgatcgaaaatgatagttttgatcaaatatacagagaaatgggattccaggaaagaaagcgacaaatattaaaactgctggataagcaggaaagtatggaagtgcaggaaatcgcagacgcactgggaatttcagcgatcactatccgcagggatctgcagcagctgtcggaagaagagctcctcatccgtacccatggaggggctatgaaagcgccgccgaaaagtcctttcactgcttttgctgataaggagaatgtggccgttgccaggaaaaaacaaataggtaaactggcggctacactggtgaaacccggcgacactattttcatggactgtggcagcaccgtttttacgatgtgtcctcatcttaaacatataacgccattgcgcattatcacgaactcattgcccattgtggcggcatttatggaggtagaggatatccatgtaaacctgatcggaggagaactggataaacaacggaaagccatacacggagaaagagccgtcaaacatatagagagctaccatgcggcaaaagcgtttatcggtgcggatggattgtcggccaggaacggattgacggccttcagcgaaacggaagctggcatcagcagggcgatgatagccagcgcaaatgccgtgtatctgctatgcgattctactaaaatcgggaaagacagctacctgaaatttgcgccactatcagatattacagccctggtaacagacccggaattgcctgccacacaagctgcggcattgaaaaagaaagaattgaaaatctattcctgacgcttaggcattagccttgttgttcagaacagtctccagtttcttcagtttattactccagaatttatcgaagtaactgatccattcctgcaaccgggtaaacccatcctgactgagtaaacagtatcgctccctgcctatatcccgaatcgtgataaaccctgcctgatgcaggattttcacatgtttggatacggcagggcgactcatatcaaaattctctgccagggcattgatcgtcaaactctctttggataacaaatgcaacatttcccggcgactaggatctgccagcgtctggaaaatatctaactgcgcagtcgtcatgatgcaggtgcatttaaaagatctgcaattttcgtgatgttctttaaccatccttctgtcatgataccgaaaatcatcgcctgattagccgagaaaccgctgtgcaacaatgaaagggccgtaccattgcctttctcctgtaattcccaggtgacaacagtatccagattaataacgcccggctcaggaccgcctttccaactatataccagcttttgcatcggtacaatctctaacaccttacaataaattgtaccatcaaaaccgaagttaggcatgggcctggtatgaaactggaactcgtggcccactgctgccttgaaatcattcggcatcaaccattgcgcaatcaactcagactccgttaaaaatgcccatacttcagccaccggctgctgataaaagtaattgtgttgaatcttgtcttgcatgatatgtaacttttaagttacccaaaagtatatgtaacttttgagttacccaaattaatttttagggagacgacaactgcactgcacagtcatccctcaccaagcgaagctccaagaggcgctgttgtgccgacggctggctgtctccctaaaaaatcatttggaaataaaatcctggtaacgctgtttgatatatacatatacatcatatgtggaagcgtcttgcagaaacgctttcccaggacggtaccgctgcataaacaaggtaaggctgtctccccgcagcggtattacctgacttaccatatccgcggtaaaatgttggtcaatataattctccgtttcctttgccagcaagactttccgaaactgctttttcttgtgaatcgttttgaactgcgttgccttaaagagattgttgacgttgacggcgaaaggcatcagctctttgattttccagacttcatccaaacgcggaggatgataagtaaactcgcgggcatattcctgccgcaatcgtagcgaatcgcgctgaaaattataacggataatattaatgccgttcagttctacgatatctcttttcatgtaacgtacaatcctctcctgacgacgatcgcagagatacatcaatggaagataccccagcatttttatcaagatggtgtctccttgtcggacattaatggtgaaagcgccgctggcatcggtaattgtgccggaattacttctcttattgaggatagttgcacctggtaatggcaaactatcggcgtccataatttgcccctgtagcggatgctgggcgaaagctggtaatccataccagcagaaaaggataataacaatcatttggcgcatgccgaaagataaatatggaattcaatgattcgtcgcatacaatttgttaaatttataggataaccctccccaataaactttttctaaacaaacgcatttatatagcgtgatcacaaactgaatatttatgcaaaaggagaaaattcatacggatgtactactgataggtgctggtatcatgagcgctacactgggcacttttctgaaatatctcaacccggactggtccattcatatctacgaaagactggaccgcgtggcaggagaaagctctgatgcctggaataatgcaggtaccggacactccgcgctctgtgaactgaattatactcctgaactggaagatggcaccatcgataccagtaaagccctgcatattattgaggaatttgaagctaccaaacagttctggtctacattggtggaaaaaggcatcatcccggaccctgctgcattcatccgcagtgttcctcatatgagcttcgttcatggcgaaacggatgttacctatctccaaaaacgttttaacgcattacagcaatatcaactctaccagggaatggaatattccgaagatccggatgtactgaaacaatggattcccttagtgatggaaggacgcgatctgtcggaaaaagcagcggctactcatatggaattgggaacggacgtgaattatggcgaactaacacgcatcttcatacagcatctgcaaaatcaacctggtgtaaagttacatctgcaacatgacgtcaaagacctgaaacagttgacagacggacgttgggaagccaggatcaaaaatgctaaagtaaaagattccttctatgtgacggcggatttcgtattcatcggcgccggtggaggagccctggaattattacaaggttccaatattcctgaagcgcgtgcctatggcggatttcctgtaggcggcgaatggctgatatgccgtaatccagatgtggtaaaccgccatcatgcaaaggtctacggacaagcatctgttggcgctccgccaatgagcgtcccgcatttggatacccgtatcatcaacggcgaaaaagcgattcttttcgggcctttcgccactttttccaccaaattcctgaaagaagggtctcacctggacctcttcgaatctattaaatactggaatatcctgcccatgctggaagtgggattgaaaaactttgacctggaaaaatacctggtgcagcaacttcgtttatccttccaggatcgcattgacgcactacgcgtattctatccgaatgtctatgataaggattggatattgcaggaagcggggcagcgggtacaagtgatttacaataatcctgggaaaggaggcgaactgcgcttcggcacggaaacggttaccagcaaagacggtacggtcgcggcattgctgggagcttctcctggcgcatctacagcagtttccatcatgctgaccatcatggaaaaatgttttccggataagatgtccggcgaatggcgggaagacctgctggaactgattcctacttatggtaccttactggaagggaacacagaactttgctataaaatcaggaactggaccagtaaaacacttaaattggactggaaacaacctgcgattaaaaagacagtagatgaaactaattcgatacggaaatcccggtgaagagaaaccggggatcatgctgaatgacacttattacgatactgctgcactcggagaagattataccaatgattttctcagtaatggcggtctggaaagactcgccacatttatcagaaaagagcagctacaaccaattcctgcggacgccagactaggcgtgccactggcgaatcctggcaaaatcgtttgcgtaggattaaattacagggaccatattgcagaaacaggatttattccggaatcagagcctattctgtttctgaaagctatgagtgcattgaatggcccatttgacggcgttacaattcctaagaacagtcaggaaacagactgggaaacggaactgggcgtggtgattggtaagaaaggaacgaatatcaacccggaagaatcgatggattatatcgcgggttatattttacataacgatatcagcgaacgtgcctatatgaaaaaacgcggaggtacctgggataagggaaaaggttgcaacacctttgcgccgctggggccttggttcgtgaccaaagatgaaatccctgatcctggtcagttaagcatatggctgaaattgaacggagaactaatgcagaatggacatacctctgacctga

SEQ ID NO: 1220 - DNA, 24335 bp, synthetic construct
  misc_feature 1..24335: note = Synthetic
  source 1..24335: mol_type = other DNA
aacactccgtttcacagcgccaatatctggcagaaatacagctttgacagctttggagaatcttcttttctagaagatatagcgataggagtgggcgttcagtacagtggaaataaagtaccgatgtataaccgctcatttttggttcctgaatatacgctttttgatgctgctctttattacacacctaagcagggacctgtgagaatagcttttaatgtcaacaatatttttaacagaacgtactggctcggtgcacaaaattacctccgtttatttcccggggctcccagaaatgcaatgctcaccgcagtctataaattttaaatctaataaatatgagagtacatataatacgtctgatttcaatacagctttggaaacagtcattacaaaataaggcggttatttttcttctgtctgtcctgagtattctgtttgcctttgccgcttacaccggaggacaggattataaagtgcaggaagatatcagagttaaacatcaggtggatgtacgtcatcaatgggaaagtaaaccggataaacatcctcacagaatggctcattacggttatctgatcttcagggcaagacaccctttgagtttttttgattatggtttggaacggtacatgggaaattccgtatttctggaagcgcataaacagaataccgttaatttttcagaagcgggattttcatccggaatgctaagatttggagaagtgagtatggcaatgattctgcaaacccttattccgttgtttatatttttcctgggattcagctgcatctctgcagaacgggaaaacaatactctgaaagtactgatcagccagggagtacgatggaaagagttgctcgccggaaaaatactgggactgcttggtcttgtcagtctggtttttattcctgtcatgatcctttctgcaatcctgtggttttcgctgaccggttttaagagtactattgatgaatttttacgtcttttttggatcgctgccgcttattttatctacttttttattgtatgcagtgtgtgcgtgattgtttctgcagtaagccaaacttcaaaatcttctttaataaaactgatcggtttatggcttcttttcattgttattattccgagaacggcacaggccttcgggggctatctgtatccggctccgtcaaaaatagattttgacaccaaagtggaaaacgagctggtaaaaacaggagacagccacaatccgaatgatgtgtattacaaaggaataaaagactctcttctacaggcttatcaggtgaaaacagtggaagaactgccctttaactacagcggttatatcatggccgaaggtgaaaagataagttcaggaatctataataaacactggcaaaaacagcttgttatttacgaagaacaaaacagcatcaaccgctcgctcgcctttgttaatccttttcaggcaatgaaagacctttcggcagctcttacgggatcagattttaattcctatatcagctaccaggagcaggtggaagagtacagatatcaattggctcagctgatgaacaaactgcagatggaaaatataagtaataaaaagcaacaggcaaatgataaaccttataccatcagcaaagatcactggaaagagcttcctgattttcgatacagatttataagtcagacgatgttgtttcagaatgaaatcacttctgtactttctttgcttctctggacattgggtctcgttgttattattcatttaatgtctaaaacactaaaaataaattaatcatgtaccttttattatttaagaacttcattcgttcccagtctgcttatttgggaatgctgttcctgctgttatcaggattagtcagtatttttgtgggaagacagtttatcaataagcaaaaagccactattgaacatacagctgtatatcagagagaacatattcagcgatatacaggatatatagaaaaagaccttggtcttttgttatactatctgaaatttggattagtcaacgaaacagatcatctgaatgccctgtccataggtcagagagatgtaaatccttctatacagaacctaacgataagaaatctggaaggacagaagtatgataccgatcttcaaaatccggtcagtctgcttctggggagcttggatctcggttttgtgatcatttttctctttccgctggtgattatttcctactgttacaatctgttgtcagaagaaaaagaagaaagtacatggattcttctttctgtacagtcgccatcacctttcagaattttgtataaaaagtttgtgatccgttttgcagttattgcaggagttttgctgtttctgattattctggctgttccactcctgaatttaagtatcaacagagcattagccggtttttttctggtttcattcttttatattatcgtatggtttgcgataagcttttgggttgtttcctggaataaaagctcaagagcaggcgctgcaggacttttgtgtttctggattgtactcaccgttatccttccggctgttctcaatcattttattttaagccaatatccgctcccggaagcgttggatacagcggttgagcagagagaagcgtatcatgaaaaatgggataccgatcaaaagccgactttagaaaaattttacaaacactatccacagttcagatcctatggttttccgaaagaaagtttcaactggctttggtattatgccatgcagcagatgggagacgatgaatccaaaattcagtcggatcagctgaaagcaaagctttggaagcgggaagaaatgagcaggacgctttcttattttgttccaggacttcatgcacagcttcagttaaatgatcttacgggttccggattggcagaccagttgaggttcacaaaggcggcagaacattttcatgaaagtaaacgactccttttttatcctaaaatcttcgcaaacgaacctacgggaagtatcaactggaagcaatttcagctggaatactacaatgaaaagagtaaagtcaactggttggcgatgctggggcctctattgctgttcagtttgctgttttatttcatgggaagcatcaatttcaggaagcaggcggctttgtaagattgtccgtttgaagcatacttttttgtattttaggaggtatgaaaatcattatactgttaactgctttattcccggtttttattttcggacagcgatatatttacggggtagaatgtgttttgagatcactaaaaaccacctgtatcaataatgaaagattgatttctgagattaaatttcccaattctgatgatgcgttggtcatacaaaaaccagtggccctatacggaagatttgaagacctggaaagaatccggttgccccggttttttgaagccaataccattgattttaaatgtggggagaaagtgcagtttgaaacaagctatgaaggaaatttttattacgcacagaaaaaagaagataacagaaagctgtacttcattaatgatggactgaatacgatatacagaggtacggaaaagatagaaagtttctctcccgatacgttcagtccggatattaggaataagtatctttccttctacagaagcgacaaagaaaatgatccggactatgaagttcgatattatttcagggataaaaacggtgatctggtttattctttccaccagagaggaaatgaatttgatgaatatacctacgaatacacagaacacaattacgatcgggtactttcttcagtttataaaaacgatattctgtttgaagaatatgagtattttgaaaatgatgaaagttataaacaggtgataagccaatacagtgttaatgtatcttaccgtttggataaaaagcgacattcggttttaaaatcttcttcattttctgacccccaaaaggcctgccgttgccatgagggatctatgaccgtcatagaattttggaataagaataaatgtacaagacaaatagatgatataatccttgtacagagcgacaggacctaataaaagatgtgaatttttaacagaaacataaaaaatgacggtacggtggaggaaaaaaagaagaaaatagcattttagtctaaaattttttagccggagctaggctggaattaccataaaacctatatttgcaccctaaattttaaaaataatgaaagaactaattgaaaaaatcaacgctgaattcgaagcgtttgcaagtgaggctaaccaacaagcagaaaaaggaaacaaagctgcaggtacaagagctcgtaaatcagctttagaacttagcaaattgttcaaagaattcagaaaagtttcagttgacgaagctaaaaaataattcgttccccagccggctcattgagccggctttttttatattctttttttcagtaatcaccctttgaaattttcccctttccagaaatctgtagtttaagttttgctgtagtttttttcatggagccaccacattccattatcaaatcaccagattttcccttttaacgctccgttctcttcttcaatcccacaaattcttttatctttaagcattcaatatatgttatgaagataaatagattttttgctgttccagcagttgtgctggctgcccagttctcatgggcgcaggtgaaggtagatccgaaagaaaaactggaccctattgtaaaaagctttgtagatgaaatcaacaacagttctcagcttgaaaatatggcgtatgagcttctggatggtatcggacctcgtcttgtgggaactccggaaatgttagctgcgaatgaatggtctgctgctaaactccgttcatggggaatagaatccaaccttcagcagttcggaacatggaaaggatggcagcgtggcattacgcatgtagatatgacgtatccgcgtgtaaaatcattggctgccacacagcttgcctggagtccggcgacgaaaaaagcagtagaagctgaggtggtagtgcttccaaaagtttcttctaaagcagaatttgatgcatggcttccttctgcgaaaggaaaaatagtgcttatcgcgcaataccagaaaatcggacgttctgatgagcagatcaaagaatttgccactccggaactgtacgaaaaactgaaagcagaaaaagaacaggcttccaaggacttccgcgattatgtgaaaaatatcggctatgataataatacgcttcctgaagcattggaaaaagcaggagcagccgcaatcgctatttcaaactggacgggaatcatgggcgcaaacagaatttttggggccaaaacctcaaaaatcccaatgatcgacattgatgttgaggattatggaatgctttacagaatggcagaaaatggagctaagcctaaaattaaagttgaagcacagtccaggattcttcccgatgcaaaaaactttaataccatcggaatcattaaaggaaaggaaaagcctgaagaatatgtgattctttccgcccaccttgattcgtgggacggagcacagggagccacagacaacggaacgggtacgcttacgatgcttgaggcaatgagaatcctgaagaaatattatccaaacaacaagagaaccatcgttgtaggactttggggaagtgaagagcagggactgaatggctcaagaggctttgtagcagacaatcctcagattatgaaaggaacacaggccgtgttcaatcaggataatggaacagggcgcgtgatcaatatcagcgggcagggattcgttgattcttaccgctatattggaaaatggctcaacggagttcctaaaacagttagagatcagattaaaacagatttccctggaatgccgggtggtggtggctctgaccatgcttcatttgtggcagcaggggtaccaggattttctctgagctccctgaactggggatatttcggttatacatggcacaccacaaaagacacctacgataagatcgtttttgatgaggtaaaaaataatgtggttttaaccgctgcattggcctatatggcatcagaagatcctgaatttacaagcagagaaagaagagtgatgcctcaggacgataaaggcgcaacggtgaaatggccggaagctaaggagccgaagagagattctaaggagtataaataaaggggatagacgtcagatattagatgtcagacaccagacgtaagatttcagactaagattaagattaattttgggactgggactgaataatgatattacggcgcactcgtaatactgtttttgtcaccatcctttacaatataaaaggctgtacagattattattgtacagcctttgtttttttttgggtaaagaagatttttgatctcctgccttttattttctttaacaatgtaggttttgcagattttgttgttcagattcatactgaaatgcatctcagtaaattctttttcccaattatcatttgccagcgggatgtaatctgaaaagataggccagaaattcgctaggcacaaaaagtttctttttaaagataaccagagacccggatcatttccaaaatcatcaatcacttttattttaaatatactctttcctagagtcgttccccaataccattcgcatagagtccccgaaataatagcacagggaatggaatacagaaaactgatgatcgctatttttccaaacagaaagaagaagataaggaagaagggtaggacgtcaatgagcttagcaaaaagcctttttctttcattgcctttataagtagtctcattgggaaaatcatattcaaaagaattataaatcctgtatccgaattcatcaaactgacgggttggcctggggatcattcttctgttcttaagttctgatattctcattggttctcttatgattctgtttatttcatggcctgaatctttttcttaagtttaaaaatggaggtttaaacaaataattccagatcagaaaactttgaaacagaaggtttgtaatcagctgtcctcagctttccgaagccgtattcgcagaaaataaaaggtaggctgtttgcttttgcagaatcgtaatcggtttgtgtatcaccaatataaactgagttttcaatgcttaaatgatttctttccataatcagatgaatattctctgacttcggttttttagtccggccgtgggattcaatgtctgtaaaaagatcgttgaactgatagtattctaaaaatgcttcgatgtagccgtcctgacaattgctcacaataaaaagttggtggtcttttgctaaattctttaaggtttctgccactccggtatagagaataccaccttcaagatgcaggattttattttcatgttgaatgatttcggaaagaacttcgtgaacctgctgattggaaataccgggaacgatagcttttagaatagtatcggccagtaatcccatgtattggtccatatcttcaggcttcaaatccttgtcgatcaattggtatttatttaaaacctgattccagattttaatgatggtagctctggaatcccaaagcgttccgtctaaatcgaaaattaaatttttatagctcaaaatgtattgttacttggttggtattattgaagatctttataaagcagaacttataaaatcatacttagctgcactctttttcttgcctcatctacttccgttacttttacgcgcacatgctgatgaagtttgaccacttcattcacatcagagacaaatccttctttcagttgagaaatgtgaaccagcccgctttccttgattcccatatctacaaaacatccgaatgctgtaatgttattgacaattccgggaaggatcatgcctggtttcaaatcccggatgctttttacattaggatcaaattcaaatactttggccgcttttctggggtctaagcctggtttttcaagctcttttaaaatatccttgatccctaaaattccgatctcttctgtaatataattttcaggctttactaaagctgttttttccttactgccaatcagttcattggttttaatgcccaaatctttagccattttttctacaatgccataagcttccggatgcacggcagaattgtccagaggatttttagcattggtaattcttacaaacgctgcggcctgttgataagccttttcacccagtcttggcactttcttaagctgctttctatcttcaaaagcaccattttcagtacggtagttaacgatgttttccgccattttttctccgattccagaaacatagctcaacaatgatttactggctgtatttaaattgattcctacggagttcacacacttcatcaccgttgagtcaagttcgtttttcaactgggtttgatctacatcatgctgatactgtcccacaccaatggatttggcatcaatttttaccaactctgcaagcggatctgccagtcttcttccgatagaaacggcaccccgtaccgtcacatcatacgatggaaactcgtctcttgcgattttacttgcagaatagaccgatgctccagcttccgaaactacaaaaacctgcaatggtttatcaaaagctatttttttaatgaaaaattccgtttcacggcttgctgttccgtttcctatggagatggcctcaatattataagcattcaccatagagcggatctttttcattgccattccactttcattctgaggagcgtgagggtagagggtttcattgtggagcagatcgcctttttcgtcaatacagaccactttacatccgcttttgtatcctggatcgatggctaaaattcttttttctcctaaaggcggagcaagaagcaactgacttaggttttcagaaaatatttcaatcgcttttttatccgctttttctttggcttcctgtaaagcctcatttgaaatggcgggttctaaaagtcttttgtagctgtctttgatcgccagcgcgatctgttccgaactttcattgttggatttaatgatggctttctctataaaatcaacggcttcatctttatcaataccaatatttactttcacaaaaccttccgattcagctctcagcatggccaaaagcctgtgagagggagttctgctcaaactttcttcccattcaaaatactgcgagaatttttgtgcattttcttcatcttttttagccttgaccgctttagaagtgatcaatgctttacgctgaaacagtcggcgaagatttttacggacgtacatattttcattgatccattccgccatgatatctcttgcgccctgtagtgcctcctcctctgaagaaatgtcattgttcacatatttggaggccagaaactgcagatcattgcttttctgactcataatgatcctggctaaaggttccagtcctttttctttagcggtatctgctttcgtttttctgcgttttttgaagggcaggtataaatcttcaagctccaggatatcaaaactttcttcaatcctttgtttcaattccggagttaaagcattctgctcttcaattgatttgaggatgctttcctttcgctttacaatttcttcaaactgtttgctgattttggagatctgttcgatctgaacttcatccagatttccggtcttatcttttctgtaacgggaaataaaaggaatagtgcagtcttctgctaataattggagggtattgttgatgctcttttcggatatgttgagctgttgttgtataaaggttacggtcgtcattattttgttttcggaaggctaaaataaggctttataatgaaaaaaggcgagttgccccgccttgaatgttttcacaacggaataatccttattgtgaattgcttttcaaaattattgatacaaatataagagaaaaattatatagttgatttacggaaaacctcatttttaataaattttttctttctatttttatgttgtatcaaaaattatattgatgattaaaaatatacttggattagacttggggaccaactcaattggttgggcgttaattaaacaagattttgaaaataagcaaggcgaaattcttgggatgggaagtaggattattcctatggacgtaggagatatggggaagtttgctgaaggagcagcagtttccaaaactgctgacagaacaaagtatagaagcgtaagaagattgcgtgaacggtttcttttgaggagagaaaggcttcatcgagttttaaatattatgaattttcttcctaagaattatgcttcgcaaattgattttaataatagatttgggaaattcaaagaagaaaccgaaccgaaattagcttatgatacggaaggatttatttttaaaaattcttttgaagaaatgcttattgattttaaaaatcatcaacctcagcttttagaaaacaataagaaaattccttacgactggacgatttattatctccgcaaaaaagcgctttccaaaaaaatagagaaagaggaactggcttggattcttttaaattttaatcaaaaacgtgggtattatcaatcgcgtggcgaggaagaagaagaaaattcgaataaattggttgagttttattctttaaaaattgtagatgttttggcagatgaacctcaaaaagggaaatctgatatttggtattctttggttttggaaaatggttggatttacagacgttcgagtaaaatgcctttgtttgattggaaagataaaacaagagatttcattgtcacaactgatttgaatgatgatggaagcattaaaaccgataaagacggaaatgaaaaaagaagttttagagctcccgctgaaacggattggacacttgtaaagaaaaaaaccgaacaggaaatcgataaatctcacaaaactgtcggaacctatatttatgaaacgctttttcaaaatccgaaacaaaaaatcaaaggaaaattggtccggacgattgaaagaaaattttataaagatgagctcaaacaaatcttagaaaagcagaaagaatttcatcaggagctaaaaaatgatgatttgtataatgattgcgttcgtgaattgtataggaataatgaagcgcatcaactgactttaagcaaaaaagaatttgtacatcttctaatggaagatctaattttctatcaaagacctttgagaagtcagaaatcatctatctcaaactgtactttggagtttagaaagtacaaagatgaaaatggagtagagcacactcagtttttaaaagcgattccgaaatcgaatccgtattatcaggaatttcgcatctggcaatggatttttaatttaaatatttataaaagagacgatgactccaatattacaaatgattttttaaattcgacagaagattttgaaagtttgtttgagttcttgaataaccgaaaggaagttgaacaaaaagctttgctgaaacattttaagctaaatgaaaaaacgcatcgctggaattttgtagaagccaaaaaatatccctgtaatgagaccaaaacgatgatttcttcaaggttagataaagtcgaaaatatttctgatgatttcctgacgagagaaattgagcagaagatttggcacatcatctattctgtaaatgataaaattgaatatgaaaaagctttaaagtcttttgcaggaaaaaataatctggatgaaagttctttcttcgaagctttcaaaaagttcccaccgtttaaaagtgaatttggttctttttcagagaaagcgattaaaaaattgttgccgttgatgcgattgggaaaattttggaattacgaaaatatcaatgattattcaaaagatagaattcagaaaattatcaccggagaatttgacgaaaatatcaaagataaagtaagagaaaaagccattaatcttactactgaaagccattttcaaggtttgcaattgtggctggctcaatacattgtttacggcaggcactctgaagcatcgatgattggaaaatggaattcagcagatgatttggaagaatttttaaaagaattcaaacaacattcgcttcgtaacccgattgtggaacaggtgattacagaaacacttcgtgtggttaaagatatttggctgaaatacggaaatggtgctaaagatttcttcaatgaaattcatattgaactcgggcgtgaaatgaaaaatacagccgaagaccgcaagcaaattaccaatatggttacggaaaatgaaaatacgaatcttcgtatcaaagctcttttggctgaaatgatgaatgacaattcagtggaaaatgttcgcccgtattctccgatgcaacaggagattttgaaaatttatgaagatggaattttaaaatcggatatagaaattgaggatgatattttgaaaatcaccaaaacagcccaaccttcgtcatctgatttaaaaagatacaaactctggctggagcaaaagtataaatcgccttatacaggacaaattattcctttaaataaattgttcacgccagaatatgaaattgaacatatcattccgcaaagtcgatattttgatgacagttttagcaataaaatcatttgcgaatcggcagttaataaattgaaagataattatataggacttgggtttataaaacaatttggaggaactattgttgagtgtggttttggaaaaagtgtgaaggtttttgaagcagaagaatatgaagatttcgtcaaaaaacattacgccaataatcgaggcaaaaaaaacaaactccttttagaagaaattcctgaaaaaatgattgaacgccaaatgaacgatacacgtcatatcagcaagtatatttctggcgttttatccaatattgtgagggtagaagatggttcggatgaaggtgtgaattcaaaaaatatcgttccaggaaatggaaagattaccactcaattaaaacaagattggggtttaaatgatgtttggaatgaattgattttgccacgttttgaaagaatgaatcaattgaccaattcaacagattttactgcttggaatgagaatcatcagaaatttttaccaaccgttccaattgaattttccaaaggattttcaaagaaaaggatagaccatcgccatcacgctttggatgctttggttattgcttgtgcgacgaaagagcatgtgaatctgttgaacaatcagtcagcaaaatctgataccaaacgctacgatttgaaaaagaaactgatgaagtttgaaaaggttgtttacaatcatccgcaaaccggagaaagaatagaacgagaagttccgaaacaatttttaaaaccttgggataatttcacagttgaagcaaaaagtagtttagataaaattattgtaagctttaaacagaatcttcgtgttatcaataaagcgactaattattatgaaaaatatgtagaaaaagatggtgtgaaaaccaaagaaagagtagaacagacgggaacgaattgggcgataagaaaatcattacacgaagaaaccgtttcgggtaaaattgatttaccttgggtagaaaagagcaatggagaatttattactgccacaagaaaatctttggatacaagcttcaatttggaaaaaatcaaaaagattacggatactggaattcataaaatcctcagaaattatcttgaggcaagagatgataatcctgaattggctttttcaccagaaggaattgaagacttgaataaaaatattgaaaagtataatgatggtaaatcacatcagccaattatcaaagttcgactatatgaaaaaggaaagggacgatttgctttaggacaaacgggaaataaaattgataaatatgtacaaggttctccaaatttattttttgcaatatataaagatgagaatggaaaaaagaaatttgaaagtattcgtttagatattgttattgaaagattaaggcaaggcttacaagcagttcctgaaactaatgaacatggagtttctttatatcaaaacttatctcctttagatttagtttatattccaacagaagacgagttgggatcaccaaatctcattgatttcagcaagttaaataagtcgcaattagagaggatttataatgtaaatgacttttcaggatacacaatttatttcagccaaaattcatttgctaaaaatatttatcctaaagaaatggatatggcttggaacgaaaagaaacaaaaagcttcaggttcattcgattctaaaacagcttcttacaataaaagatctataaaagatatttttattaaagtaaaaattgatcgtttaggtaatatcttgaatcagtaaaatatattatgatcactcgctccatctatatcggcaatcctgcatatctgaaactcaaagacgagcagatgaagatcctttgtcctgaaaccaagacagaaaaggggagtgttcctgtggaagatttgggcttgctgatgttggatcattttcaaataacaatttcacacaatttaattcaaaaaatgatgggaaataatgtggtggtaataagttgtgatcatcatcatttgccccatggaatgatgttgccactttatggtcatacagaacattctgatagggtaaaagatcagctggaggcaagtgaacctttgaaaaaacaactctggaagcaaaccatagaatgtaagattgaaaatcagaaaaatgttttagtgaaattaggaaactatcacgaaccaatgattgggtatcaaaataatgtaaagtccggtgatattaccaatatggaaggaattgcagcgcagcattactggaaatatcttattagtctggattttttaagggaacgtttcggagattcacccaatcagtttttcaattttggatattccgttttgagaagtattgtagcaagagcaatagttgaaacaggtttactacccgttctcggaatttttcataaaagtaaatataatccttactgcctcgctgatgatctgatggaaccttatcgcccatttgttgatctattagtcatgcaatggctgcaaacaaatcctgaaacagaagaattaaataaagaatttaaagcgcatattcttcaaatagcaacgaaagatgtgaagattgatgacaaaataagaccattattggtcgctataaaaacaacggtcacttcgctttataaatgctataccggagaaaaacgtcttatttcttatcctgaactgatatgaatgccgaaaggtttaatgcttaccgaattatgtgggttttagtattatatgatttaccgaccgagactaaagctaacatgaaggatgcgaatcgctttcggaaggctttaatcgatgatggatttacattgtttcagttttcgatgtatgtccgccattgtccaagtcgtgaaaatgctgaggttcatattaaaagactaaaattcatgttgccaaaagcaggaaaagtggccattatgtgtattacggataagcaatttggcgatattgaaattttctttgccagaaataaagaagagccacctccaaccttccaacagcttgaattattctaaattttaaatcctaaaaacaaaaacaatctactgattttcagtagattgttttttgaggctgtgactaatcacgaagataataatttttgaaagcaattcacaacataaagccctttcgggtgtgtttccggtgtgctgtgactaatcacgaagataataatttttgaaagcaattcacaaccttcgataatgattgaatatccaactgatggctgtgactaatcacgaagataataatttttgaaagcaattcacaacatgtgtttacttgggttcggtaactggatggctgtgactaatcacgaagataataatttttgaaagcaattcacaaccatgtgcgaactgctgctttccagtctttcgctgtgactaatcacgaagataataatttttgaaagcaattcacaacaaacattccactcagaatacttgacttcatgctgtgactaatcacgaagataataatttttgaaagcaattcacaacagcttttctatttttcttgtcagttctaatgctgtgactaatcacgaagataataatttttgaaagcaattcacaactttttctatttgcttcaaataccagagaaggctgtgactaatcacgaagataataatttttgaaagcaattcacaacaccatcaaagaaaacgctgattataaaaaagctgtgactaatcacgaagataataatttttgaaagcaattcacaacatctgaatcaattggtttaatccaaacaccgctgtgactaatcacgaagataataatttttgaaagcaattcacaacgtatggttgctaaaaatgagactcacaaccgctgtgactaatcacgaagataataatttttgaaagcaattcacaactattacggtgtaaagatataatcttttttagctgtgactaatcacgaagataataatttttgaaagcaattcacaaccatgtgtgataatgcttgcacagaacaccggctgtgactaatcacgaagataataatttttgaaagcaattcacaactattacaaaaaaagccttcttaattgaggggctgtgactaatcacgaagataataatttttgaaagcaattcacaacgacaagattattgtactccgaaaccctaacgctgtgactaatcacgaagataataatttttgaaagcaattcacaacacttaacgaaatcaggagttactcctggaagctgtgactaatcacgaagataataatttttgaaagcaattcacaacatgatcagtatcaagccgatgtttcattgagctgtgactaatcacgaagataataatttttgaaagcaattcacaactaattctctacgtgtattaataattgaaaagctgtgactaatcacgaagataataatttttgaaagcaattcacaactgaaatttctgggttctaaaatccagtcgagctgtgactaatcacgaagataataatttttgaaagcaattcacaaccttcaaaatcaattggtatatcatcggaatgctgtgactaatcacgaagataataatttttgaaagcaattcacaacttaactcactcataagttgattgtaagaaggctgtgactaatcacgaagataataatttttgaaagcaattcacaacttctttcttacaaaagacaagacccatgttgctgtgactaatcacgaagataataatttttgaaagcaattcacaacggaacgtatattcttaactcattttcaaatgctgtgactaatcacgaagataataatttttgaaagcaattcacaacttcggaaaggattataatccccactttggagctgtgactaatcacgaagataataatttttgaaagcaattcacaaccagaattgaagggtattaaaaaagcctcccggctgtgactaatcacgaagataataatttttgaaagcaattcacaacaaacctctaccatcttttatggttttaccggctgtgactaatcacgaagataataatttttgaaagcaattcacaactcggttgattgtttgtatactggaatacacgctgtgactaatcacgaagataataatttttgaaagcaattcacaacaacaaataaatcatcatccatattggataagctgtgactaatcacgaagataataatttttgaaagcaattcacaacttggtcaaagtacaaatgtagagaaaaggtgctgtgactaatcacgaagataataatttttgaaagcaattcacaacgaacaattagaaggtcttaagagtgaccttgctgtgactaatcacgaagataataatttttgaaagcaattcacaacatacaaatacatattctgttgtcatcttccgctgtgactaatcacgaagataataatttttgaaagcaattcacaaccagcgtgatgccataaaccagagtcatagtgctgtgactaatcacgaagataataatttttgaaagcaattcacaacagtataaaagagttaaaaaaatctctggaagctgtgactaatcacgaagataataatttttgaaagcaattcacaacctgcaccaaagtttggagtaacagcattcagctgtgactaatcacgaagataataatttttgaaagcaattcacaactaacatttatgaggcaccacatcgaagaaggctgtgactaatcacgaagataataatttttgaaagcaattcacaactgaaaacgcaaatagttcatcttcgctttcgctgtgactaatcacgaagataataatttttgaaagcaattcacaactgacatataaaattgatgtgtgctataatagctgtgactaatcacgaagataataatttttgaaagcaattcacaacatacaaatacatattctgttgtcatcttccgctgtgactaatcacgaagataataatttttgaaagcaattcacaacgtaaagtcagcctaaaggcaccatcatatagctgtgactaatcacgaagataataatttttgaaagcaattcacaactgaaaaagatgcccttcgataataacttccgctgtgactaatcacgaagataataatttttgaaagcaattcacaacaattccagtgcaccttcgccgaacgccttggctgtgactaatcacgaagataataatttttgaaagcaattcacaaccgtcaacgtgaaacgatgtactatcttgacgctgtgactaatcacgaagataataatttttgaaagcaattcacaacaaaactgctttcattctgacgaaggaggatgctgtgactaatcacgaagataataatttttgaaagcaattcacaaccaatgtcattcacacgcgttcccagatcacgctgtgactaatcacgaagataataatttttgaaagcaattcacaacagcaaatgtaaatagctgtttttctggtaagctgtgactaatcacgaagataataatttttgaaagcaattcacaacaaggacttacgaagctatgatctttctaatgctgtgactaatcacgaagataataatttttgaaagcaattcacaacagctggtgaagggccttcattttccccttcgctgtgactaatcacgaagataataatttttgaaagcaattcacaacaagtctgattcattcccatgtaaactaattgctgtgactaatcacgaagataataatttttgaaagcaattcacaacaagggtgtcaggcagtatgatagcatcgcagctgtgactaatcacgaagataataatttttgaaagcaattcacaacgatcgcaataccctaactgtcacgaaaaaggctgtgactaatcacgaagataataatttttgaaagcaattcacaacttaacatgtcctttagctcagggtctctgtgctgtgactaatcacgaagataataatttttgaaagcaattcacaacgcgttatctcggtagtcagtatgaatataggctgtgactaatcacgaagataataatttttgaaagcaattcacaaccgattttgtcgtttacttcgtcagcaatctgctgtgtaaaataaatctccctcttactctgcgcctaaatttatatggttatccatagagttatgatagatccaaacagctaaaatagccaattttatgtggttttaagtaccttagaatctcctttttcgcaggatttcatatttttgtgatgggcacgaaatattaaaaattctatttcttgatgtatggtaaggtgataagtgggtaggtttttatatttttgaatcctgaaatttagtattttaattaaattttttaaaacaataaataatatgaaaaaacttagtgtaattgcattagtaggagtaggattgcttgcagcatcttgtaataaagacaaatcagcaggaactgcatctaccgctacggagcagacagtagctgagagtaagggtgaagtattgccagttgatgttgctgcttctgtagtaaactggaaagcttttcacaaaggtggaatggctcctcgttggggaacacttaacgtaaaatcaggagatctaagcgttgaaggcggtcagctttcagcaggaaactttgtgatcgatatgaattctatcaaagtagatccggcttcagtaactgaaaaagataaaaaaccggcagatttggaagctcatttgaaaactcctgacttttttgataccgcaaagaatcctacttcggatttcaaaattactagtgttacagatttgaaagacgcaccaaaggatgctgttgcaggagctaataaaacagtaagtggaaacctaacattgtcaggaaaaacaatcaatgtcactttccctgctaaagtggatgtaacagatacttcagctgcagttcaggctaaatttacagtaaacagagcagattggggaatcaagtttggtacctctgaaacagatcctgcagaatggatgatcagcaaggatatagagatcgctgttgacgttaaagctaaaaaataattgttagatacaaatacagagagctgttttcttatgaaagcagctttttttgtggatattgggtactagaaactgtgagaataataaatatttttatatttataaaaacataaatacgaaagaggaaattataggttggatgtatatcttattatacgcagatggaagctattatacaggaagtaccaatgatcttgaacgtagaattattcagcaccattcaggtgagggggctaatcatacgaaaaaaaggtttccgaaagacttatctattttgaagaatatgaacgcattgatttagctttctacagagataaacagggtcgtaagcacaaagaagatcagaggggatattcaactattgcctcaactggccgtggcatatagagatttgttttctgaaggataaggtagcttcgagtacctcagccaccttttgaaatctagttggagattgattttatgtcaataataagttggacaatagaggttgatctcggtcactttttgaaaataacgttagaaataattgtcctcgtagtaacggaaaaaaagacaattttctgatcaaaaaagaccaatataaggtggctgaggcactcgaagtcaccatacaattcactacttttacacccatgatctaccttctgctcattataaatctgctcaccatcattttttttgggtgggacaaaaaacttgctattcaacataaaagaagaatcccggaaaatacacttttaggattgacatgcgtgggaggaaccggaggtgcgattgtagggatgcttattttcaggcataaaatatctaaaaaatcttttttgctgaaattttcgggagtggttttgattcagggatttcttatcctttgctatttgaagttttttagatttttggtataaaaaaaaactccctttcgagagttttgtagtatttataaagcatatactttgctttcaagaaaagcctttgcttcaatagaagtgtcaaattttaatacctgataggctgataactgtaattcaaccggagcgaaggcagaaacatccagaaagaattctaagtttggattattgggatctgcaaccgcataacagacgactgtttgccatttatttttgacggtaggtttatactgcatgacctgatattgattcctgttccataagaataatgtaggatctcctgaatttacttttacatcaaaggtgatcacgtaccaaccaccagtattattatttgtactcacgacactgctttgcagtcccatgtattttatctcataatttggatctccacccgaaggaagtgtagggaaagggatattaaacttattggaagattcaaagattaatgaatcatttacaaggcttccctgtataggagggaaagatcccgttagtgtttcttcagttttcattgtcacagattttatcttgtttttgatgtctgtaactttgttaaaccttgcggtactgatagcaggtcttatgagagaagcgctggtgtcactgttgatatagagttgtctgttgtaatcataactatctgccatgatgacattgtttcctgtaggaaggccaaatatggtgattggacgatagagtatcagatagctgttattaccaactgcatttgactgcgcagcccctacacctgaactggattctgtataacagttggtggctttcacaattatattatcaccgttgatataataatcagaaacccatgaattgtaaacattgcaggtaaagctttttccttcaaatatatgagcatggggagtgactactttttcaccctttgttgtaccggaccatgtatcaatagttacaggattggaataggttgaacttccggatgcttcattccagcacgaatcaataacgattggtatgatcgagttactatcattataaatatacgtattgatatagttaaattcaaatatggcattattgaaacttaccgcgccaaatccctgtgttgaattatgaatataaatacctacctcattgttagaaatttcgccgctgtagaaatatttatttcctgcatgcatagtttgggaatcattaccaaatttattgtcaagaaaatacattccgtatttattgtcatgtattcctactgaataaaaatccatcccaatatttccaaacaggcactggagccctttgttcagttttttaaaatctacatttctgaaagtaatattactattattctcgtcgttagcctcatattctgattctacagcttttgccatgctgaccccacatccctttttattttctcctaaaaatgttagcccttcaattgtggttgcatactgccagaatggtcccaggtttttgctgaggatcataattggtttattctcatcgtaaggtttcaaaaaagtagcaccgctgccagcaccaaaaattttagccttatgttgtacattaatattaatgtggtaaatgcccgcaggaaaatagatgtttttttttacttcacacgcttttagtaccgccatactgtcatctacactcgctattccttctcctgttgcaccgaaccactgaacatttacagtatcatcaaccaatactctacgataaaatttgttgtttacttgcttgtaaataatatcatcacaatcactcgctgtgatcggaactggtggagtgagcggattgatatcgtcatacttatatacctcttcttgaaaaacagtccactctccggtatactgatcatttaattcaattgttgccattttttttgttttttgatgttaataatttgtttcctgcaggaaaactactgaagcaaagataaatgcgcgtaacgacagaacttgacgtatgttattttatcctgcttttttaaaggatttacttaaatttctcattatgaatttgttaattaatgtatattcttgcttattattcattagaaatcactatttttgcacccgtaaaaatcattcatgcaaaacattagaaatattgcgattatcgcacacgttgaccacgggaagacgactttggttgacaagattattcatgctacaaacattttcagagaaaatcaggaaagtggagaattaataatggataataacgatcttgaaagagaaagaggtattaccattctatctaaaaatatttctgttacttataaagacgttaaaattaacgtaatcgatactcctggtcacgccgattttggtggggaagtagagagagttttaaaaatggcggacggagtaatcttgttggtggatgcctttgaagggccgatgcctcaaacaagatttgtacttcagaaagctttggaattaggacttagaccattggtagtaatcaacaaagtagataaaccaaactgtcgtcctgaagaagttcatgataaagtatttgatttattctttgcccttgaagcaactgaagagcagttggatttcccaacattctacggttcttctaaacaaggttggttcaatacttcattagaacagacagaaaatattttcccattactagatggtattttacagtatgttcctgaacctaaagtagaagaaggaagcttacagatgcagattgtttctcttgacttttcttctttcttgggaagaattgcgatcggaaaagtgatcagaggagaaatcaaagaatctcagtggatcggtttagctcaggcagacggtaaaattctgaaaggaaaagtaaaagaactgtacgtttttgaa

SEQ ID NO: 1221 - DNA, 24335 bp, synthetic construct
  variation 4064..6354: note = n is a, c, g, or t
  misc_feature 1..24335: note = Synthetic
  source 1..24335: mol_type = other DNA
ttcaagtctccatctggttgtgatttgctttcaaaagtttgtacctttggctttagtaacagcatatgaaaaggaatatgtgcaaacaggacgttgtgatttgctttcaaaagtttgtacctttggctttagtaacagcgtcactgacatatatatcgattttgatatggttgtgatttgctttcaaaagtttgtacctttggctttagtaacagcaggttcaaatcctgtcatcccgacttgctgttgtgatttgctttcaaaagtttgtacctttggctttagtaacagcacaaatgtggtcttcttattttcagttacgttgtgatttgctttcaaaagtttgtacctttggctttagtaacagcggcagacctactcggtcaagatgtcactgagttgtgatttgctttcaaaagtttgtacctttggctttagtaacagcatgaagtattcgaaaagctgaaagctgttagttgtgatttgctttcaaaagtttgtacctttggctttagtaacagcatatccctcaattcatcctaccaggagacggttgtgatttgctttcaaaagtttgtacctttggctttagtaacagcatctgttataaataccttgtttcattttacgttgtgatttgctttcaaaagtttgtacctttggctttagtaacagcattttctaatgtatatgtgcaaacaggtcgttgtgatttgctttcaaaagtttgtacctttggctttagtaacagcatttaattgtaaggatatcggtaaacatacgttgtgatttgctttcaaaagtttgtacctttggctttagtaacagcatttaattgtaaggatatcggtaaacatacgttgtgatttgctttcaaaagtttgtacctttggctttagtaacagcatataattgtaaggatatcggtaaacatacgttgtgatttgctttcaaaagtttgtacctttggctttagtaacagcatataattgtaaggatatcggtaaacatacgttgtgatttgctttcaaaagtttgtacctttggctttagtaacagcatataattgtaaggatatcggtaaacatacgttgtgatttgctttcaaaagtttgtacctttggctttagtaacagcatataattgtaaggatatcggtaaacatacgttgtgatttgctttcaaaagtttgtacctttggctttagtaacagcatataattgtaaggatatcggtaaacatacgttgtgatttgctttcaaaagtttgtacctttggctttagtaacagcatataattgtaaggatatcggtaaacatacgttgtgatttgctttcaaaagtttgtacctttggctttagtaacagcatataattgtaaggatatcggtaaacatacgttgtgatttgctttcaaaagtttgtacctttggctttagtaacagcatataattgtaaggatatcggtaaacatacgttgtgatttgctttcaaaagtttgtacctttggctttagtaacagcatataattgtaaggatatcggtaaacatacgttgtgatttgctttcaaaagtttgtacctttggctttagtaacagcatataattgtaaggatatcggtaaacatacgttgtgatttgctttcaaaagtttgtacctttggctttagtaacagcatataattgtaaggatatcggtaaacatacgttgtgatttgctttcaaaagtttgtacctttggctttagtaacagcatataattgtaaggatatcggtaaacatacgttgtgatttgctttcaaaagtttgtacctttggctttagtaacagcatataattgtaaggatatcggtaaacatacgttgtgatttgctttcaaaagtttgtacctttggctttagtaacagcatataattgtaaggatatcggtaaacatacgttgtgatttgctttcaaaagtttgtacctttggctttagtaacagcatataattgtaaggatatcggtaaacatacgttgtgatttgctttcaaaagtttgtacctttggctttagtaacagcatataattgtaaggatatcggtaaacatacgttgtgatttgctttcaaaagtttgtacctttggctttagtaacagcatataattgtaaggatatcggtaaacatacgttgtgatttgctttcaaaagtttgtacctttggctttagtaacagcatataattgtaaggatatcggtaaacatacgttgtgatttgctttcaaaagtttgtacctttggctttagtaacagcatataattgtaaggatatcggtaaacatacgttgtgatttgctttcaaaagtttgtacctttggctttagtaacagcatataattgtaaggatatcggtaaacatacgttgtgatttgctttcaaaagtttgtacctttggctttagtaacagcatataattgtaaggatatcggtaaacatacgttgtgatttgctttcaaaagtttgtacctttggctttagtaacagcatataattgtaaggatatcggtaaacatacgttgtgatttgctttcaaaagtttgtacctttggctttagtaacagcatataattgtaaggatatcggtaaacatacgttgtgatttgctttcaaaagtttgtacctttggctttagtaacagcatataattgtaaggatatcggtaaacatacgttgtgatttgctttcaaaagtttgtacctttggctttagtaacagcatataattgtaaggatatcggtaaacatacgttgtgatttgctttcaaaagtttgtacctttggctttagtaacagcatataattgtaaggatatcggtaaacatacgttgtgatttgctttcaaaagtttgtacctttggctttagtaacagcatataattgtaaggatatcggtaaacatacgttgtgatttgctttcaaaagtttgtacctttggctttagtaacagcatataattgtaaggatatcggtaaacatacgttgtgatttgctttcaaaagtttgtacctttggctttagtaacagcatataattgtaaggatatcggtaaacatacgttgtgatttgctttcaaaagtttgtacctttggctttagtaacagcatataattgtaaggatatcggtaaacatacgttgtgatttgctttcaaaagtttgtacctttggctttagtaacagcatataattgtaaggatatcggtaaacatacgttgtgatttgctttcaaaagtttgtacctttggctttagtaacagctggaacgctccactgtgtttttgcgcacctgttgtgatttgctttcaaaagtttgtacctttggctttagtaacagcctttgttataaataccttgtttcattttacgttgtgatttgctttcaaaagtttgtacctttggctttagtaacagcgccgaggtaaaaacgtacacaacgatttgtgttgtgatttgctttcaaaagtttgtacctttggctttagtaacagctatgcccatctttatgtatttttttaaatagttgtgatttgctttcaaaagtttgtacctttggctttagtaacagctaatactggatgagaatgataacatcatatgttgtgatttgctttcaaaagtttgtacctttggctttagtaacagcttaactctttcttaatgtaatccggatctaggttgtgatttgctttcaaaagtttgtacctttggctttagtaacagcatatccctcaattcatcctaccaggagacggttgtgatttgctttcaaaagtttgtacctttggctttagtaacagcatcagaagaaaccgagattggcgataatggttgtgatttgctttcaaaagtttgtacctttggctttagtaacagcataaaattgtaaggatatcggtaaacatacgttgtgatttgctttcaaaagtttgtacctttggctttagtaacagctggaacgctccactgtgtttttgcgcacctgttgtgatttgctttcaaaagtttgtacctttggctttagtaacagcnnnnnnnnnnnnnnnnnnnnnnnnnnnnnnnnnnnnnnnnnnnnnnnnnnnnnnnnnnnnnnnnnnnnnnnnnnnnnnnnnnnnnnnnnnnnnnnnnnnnnnnnnnnnnnnnnnnnnnnnnnnnnnnnnnnnnnnnnnnnnnnnnnnnnnnnnnnnnnnnnnnnnnnnnnnnnnnnnnnnnnnnnnnnnnnnnnnnnnnnnnnnnnnnnnnnnnnnnnnnnnnnnnnnnnnnnnnnnnnnnnnnnnnnnnnnnnnnnnnnnnnnnnnnnnnnnnnnnnnnnnnnnnnnnnnnnnnnnnnnnnnnnnnnnnnnnnnnnnnnnnnnnnnnnnnnnnnnnnnnnnnnnnnnnnnnnnnnnnnnnnnnnnnnnnnnnnnnnnnnnnnnnnnnnnnnnnnnnnnnnnnnnnnnnnnnnnnnnnnnnnnnnnnnnnnnnnnnnnnnnnnnnnnnnnnnnnnnnnnnnnnnnnnnnnnnnnnnnnnnnnnnnnnnnnnnnnnnnnnnnnnnnnnnnnnnnnnnnnnnnnnnnnnnnnnnnnnnnnnnnnnnnnnnnnnnnnnnnnnnnnnnnnnnnnnnnnnnnnnnnnnnnnnnnnnnnnnnnnnnnnnnnnnnnnnnnnnnnnnnnnnnnnnnnnnnnnnnnnnnnnnnnnnnnnnnnnnnnnnnnnnnnnnnnnnnnnnnnnnnnnnnnnnnnnnnnnnnnnnnnnnnnnnnnnnnnnnnnnnnnnnnnnnnnnnnnnnnnnnnnnnnnnnnnnnnnnnnnnnnnnnnnnnnnnnnnnnnnnnnnnnnnnnnnnnnnnnnnnnnnnnnnnnnnnnnnnnnnnnnnnnnnnnnnnnnnnnnnnnnnnnnnnnnnnnnnnnnnnnnnnnnnnnnnnnnnnnnnnnnnnnnnnnnnnnnnnnnnnnnnnnnnnnnnnnnnnnnnnnnnnnnnnnnnnnnnnnnnnnnnnnnnnnnnnnnnnnnnnnnnnnnnnnnnnnnnnnnnnnnnnnnnnnnnnnnnnnnnnnnnnnnnnnnnnnnnnnnnnnnnnnnnnnnnnnnnnnnnnnnnnnnnnnnnnnnnnnnnnnnnnnnnnnnnnnnnnnnnnnnnnnnnnnnnnnnnnnnnnnnnnnnnnnnnnnnnnnnnnnnnnnnnnnnnnnnnnnnnnnnnnnnnnnnnnnnnnnnnnnnnnnnnnnnnnnnnnnnnnnnnnnnnnnnnnnnnnnnnnnnnnnnnnnnnnnnnnnnnnnnnnnnnnnnnnnnnnnnnnnnnnnnnnnnnnnnnnnnnnnnnnnnnnnnnnnnnnnnnnnnnnnnnnnnnnnnnnnnnnnnnnnnnnnnnnnnnnnnnnnnnnnnnnnnnnnnnnnnnnnnnnnnnnnnnnnnnnnnnnnnnnnnnnnnnnnnnnnnnnnnnnnnnnnnnnnnnnnnnnnnnnnnnnnnnnnnnnnnnnnnnnnnnnnnnnnnnnnnnnnnnnnnnnnnnnnnnnnnnnnnnnnnnnnnnnnnnnnnnnnnnnnnnnnnnnnnnnnnnnnnnnnnnnnnnnnnnnnnnnnnnnnnnnnnnnnnnnnnnnnnnnnnnnnnnnnnnnnnnnnnnnnnnnnnnnnnnnnnnnnnnnnnnnnnnnnnnnnnnnnnnnnnnnnnnnnnnnnnnnnnnnnnnnnnnnnnnnnnnnnnnnnnnnnnnnnnnnnnnnnnnnnnnnnnnnnnnnnnnnnnnnnnnnnnnnnnnnnnnnnnnnnnnnnnnnnnnnnnnnnnnnnnnnnnnnnnnnnnnnnnnnnnnnnnnnnnnnnnnnnnnnnnnnnnnnnnnnnnnnnnnnnnnnnnnnnnnnnnnnnnnnnnnnnnnnnnnnnnnnnnnnnnnnnnnnnnnnnnnnnnnnnnnnnnnnnnnnnnnnnnnnnnnnnnnnnnnnnnnnnnnnnnnnnnnnnnnnnnnnnnnnnnnnnnnnnnnnnnnnnnnnnnnnnnnnnnnnnnnnnnnnnnnnnnnnnnnnnnnnnnnnnnnnnnnnnnnnnnnnnnnnnnnnnnnnnnnnnnnnnnnnnnnnnnnnnnnnnnnnnnnnnnnnnnnnnnnnnnnnnnnnnnnnnnnnnnnnnnnnnnnnnnnnnnnnnnnnnnnnnnnnnnnnnnnnnnnnnnnnnnnnnnnnnnnnnnnnnnnnnnnnnnnnnnnnnnnnnnnnnnnnnnnnnnnnnnnnnnnnnnnnnnnnnnnnnnnnnnnnnnnnnnnnnnnnnnnnnnnnnnnnnnnnnnnnnnnnnnnnnnnnnnnnnnnnnnnnnnnnnnnnnnnnnnnnnnnnnnnnnnnnnnnnnnnnnnnnnnnnnnnnnnnnnnnnnagttgtgatttgctttcaaaagtttgtacctttggctttagtaacagcattccgttgctatatcatttgtaactaatggttgtgatttgctttcaaaagtttgtacctttggctttagtaacagctcaaacggaattttaagtgtagaagagaatgttgtgatttgctttcaaaagtttgtacctttggctttagtaacagcctatgtacttaaattgctgctcgaattcggttgtgatttgctttcaaaagtttgtacctttggctttagtaacagcgtcagagattaaaggttgaatgtagtctacgttgtgatttgctttcaaaagtttgtacctttggctttagtaacagcttgttcttctccttcgttctcaggtacttcgttgtgatttgctttcaaaagtttgtacctttggctttagtaacagcttgttcttctccttcgttctcaggtacttcgttgtgatttgctttcaaaagtttgtacctttggctttagtaacagcggatgactcatacgatatggcctcggaagcgttgtgatttgctttcaaaagtttgtacctttggctttagtaacagcgccgcatatgcattaaagttacaagaagttgttgtgatttgctttcaaaagtttgtacctttggctttagtaacagcataaaattgtaaggatatcggtaaacatacgttgtgatttgctttcaaaagtttgtacctttggctttagtaacagctggaacgctccactgtgtttttgcgcacctgttgtgatttgctttcaaaagtttgtacctttggctttagtaacagcgttttcttctccttcgttctcaggtacttcgttgtgatttgctttcaaaagtttgtacctttggctttagtaacagcttattcttctccttcgttctcaggtacttcgttgtgatttgctttcaaaagtttgtacctttggctttagtaacagcatttagtatcttaataaatgctcttaatctgttgtgatttgctttcaaaagtttgtacctttggctttagtaacagcaattaggtgcttattgatgcaaaggcatgggttgtgatttgctttcaaaagtttgtacctttggctttagtaacagcatttatcagattcgttcttgtgaactccagttgtgatttgctttcaaaagtttgtacctttggctttagtaacagcatttagtatcttaataaatgctcttaatctgttgtgatttgctttcaaaagtttgtacctttggctttagtaacagcaattaggtgcttattgatgcaaaggcatgggttgtgatttgctttcaaaagtttgtacctttggctttagtaacagcatttatcagattcgttcttgtgaactccagttgtgatttgctttcaaaagtttgtacctttggctttagtaacagcatttagtatcttaataaatgctcttaatctgttgtgatttgctttcaaaagtttgtacctttggctttagtaacagcaattaggtgcttattgatgcaaaggcatgggttgtgatttgctttcaaaagtttgtacctttggctttagtaacagcatttatcagattcgttcttgtgaactccagttgtgatttgctttcaaaagtttgtacctttggctttagtaacagcatttagtatcttaataaatgctcttaatctgttgtgatttgctttcaaaagtttgtacctttggctttagtaacagcaattaggtgcttattgatgcaaaggcatgggttgtgatttgctttcaaaagtttgtacctttggctttagtaacagcatttatcagattcgttcttgtgaactccagttgtgatttgctttcaaaagtttgtacctttggctttagtaacagcatttagtatcttaataaatgctcttaatctgttgtgatttgctttcaaaagtttgtacctttggctttagtaacagcaattaggtgcttattgatgcaaaggcatgggttgtgatttgctttcaaaagtttgtacctttggctttagtaacagcatttatcagattcgttcttgtgaactccagttgtgatttgctttcaaaagtttgtacctttggctttagtaacagcattccgttgctatatcatttgtaactaaaggttgtgatttgctttcaaaagtttgtacctttggctttagtaacagcatatccctcaattcatcctaccaggagacggttgtgatttgctttcaaaagtttgtacctttggctttagtaacagcatcagaagaaaccgagattggcgataatggttgtgatttgctttcaaaagtttgtacctttggctttagtaacagcataaaattgtaaggatatcggtaaacatacgttgtgatttgctttgaaaagtttgtacctttggctttagtaacagctggaacgctccactgtgtttttgcgcacctgttgtgatttgctttcaaaagtttgtacctttggctttagtaacagcgactctccaatgtatatggattcgaataaggttgtgatttgctttcaaaagtttgtacctttggctttagtaacagcattgtgtttagaaaagtagggtctagcatagttgtgatttgctttcaaaagtttgtacctttggctttagtaacagcgaaatttcttatatgaagggatcggaaatagttgtgatttgctttcaaaagtttgtacctttggctttagtaacagctctttcctcgttgcttactggagatttatcgttgtgatttgctttcaaaagtttgtacctttggctttagtaacagctatattgtttttcatgcaaacaagaaatcggttgtgatttgctttcaaaagtttgtacctttggctttagtaacagcttatttctttgaatggatatttggcaacctgttgtgatttgctttcaaaagtttgtacctttggctttagtaacagcggccagtcgatgcgtgtccaggtgatcgttgttgtgatttgctttcaaaagtttgtacctttggctttagtaacagcagagtaaaaagcttatgaagctttatatagttgtgatttgctttcaaaagtttgtacctttggctttagtaacagcttcaagcgtcattgtttatcctttccatctgttgtgatttgctttcaaaagtttgtacctttggctttagtaacagccgagaactctacaatctatcttaatacggggttgtgatttgctttcaaaagtttgtacctttggctttagtaacagctatcgcatatataaagttctgcaattgatgttgtgatttgctttcaaaagtttgtacctttggctttagtaacagcacaatatatacaagtcaaaaagaatcaaacaattaatccttatttttgaactgtaaaaagctattactaaacaaataaaaaatcccgtttaatgcgggattttttatttgtactatagatttctaaaaaagaagacgagttgccccgccttaaatgttttcacaacggaataatccttattgtgatttgctttcaaaaatttatatgcaaagttacataaaaataatttgcaaaaaacattctgcgaaataaaaattatacataattttatacatcatttacaatgaattgtaattatgaaaaagcatattttaggactagacttgggtaccaatagtgttggctgggcactactggaagtaaatgaaaacggcaaaccatataaaatacgaggaatgggaagccgaatcattccgatgagtcaggatattttgggaaattttgaaaatgggaattctatttctcaaacagcggaacgtactgattatcgtggaacaagaagattaagggaacgccatttgttacgtcgcgaacgattacatcgtgttttaaatgttttaggatttctacccgaacattatgcgagtcaaattgattttgagaaacgtttgggccaatttgctagtgatacagaacctaaattagcatggaaaaaattagatgaagggaaatttgaattcatttttcagaagtcttttaacgaaatgattactgatttcaaaaacactcaacctcaactacttaaagaagggaaactgattccctatgattggacaatttattatttacgaaaaaaagccttaactcaaaaaatagagaaggaagaactcgcctggattttattgaactttaaccaaaaacgcggatattatcagttacggggagaagacgaggaagaaaatccaaataaattggttgaattttacgcgttgaaagtagttgatattacagcagatgggccacaaagagggaaaacagacatttggtataatgttgtacttgaaaatggttgggtgtatcaccgttcaagtaaagtttcattaactgattggattggaaaaacaaaggaatttatcgttacaacagatttaaacgatgacggaacaataaaaatagataaagaaggcaatgagaaacgctctttccgtgctccttcagcagatgactggacccttttaaagaagaaaacagaagcagacattaataaaagcaatcaaactgtcggagaatacatttatgaagctttacttcaaaatccaaagcagaaaatcaaaggtaaactggtacgaactattgagagaaaattctataaggaagagctaaggcaaattctgttaaagcaaaaaggattccatcaagaattacagaatgaagatttatacaatgaagcagttcgagagctttaccgaaacaacgaatctcagcaactttcccttgcaaagaaagactttatatcattatttttaaacgatattatattctatcaacgtccattacgaagccagaaatcatctattagtaattgcacattggaatttagaaaatataaagataaagacaacatagagcatattgaatacttgaaagcatctcctaaatcaaatccttattatcaggaatttcgtttatggcaatggatcaataatttagcgatttaccgtagagatgatgatgcgaatgttacacaggaatttctaaatcagatcgaaaaattcgaagatttattcgattttctgaacaatcgaaaagagatcaagcaagacgtgttaatcaaatatttcttagaaaagaaaggatataaaggaaaagccttaacaaatgaagtctccaaatatcgttggaattttgttgatgacaaagacaaggcttatccgtgcaatgagaccaggtatcttattacaaaccggcttgaaaaagtgcaaaatactccctctgatttcctgaacagagaaatcgagcaacaattatggcatattatttattcggtaaccgacaaggcggaatttgaaaaagctttaaaatcatttgccgagaaacatcagttggatatggaatcttttgttgataatttcaggaaatttccaccttttcgaaacgagtacggttcattttctgaaaaagccattaagaaactattgcctttaatgcggtttggaaagtattggaattgggaagccattgatcccaaaacgaaggacagaattgataaaataattaccggggagtacaatgaagagataaaagataaagttcgggaaaaggctattcatctatctcagaaagaaaattttcaagggttacagctttggttggcaagttatatcgtctacggtcgccattcggaagcaaatgctgcagaaaaatggaataccgttgaagatttggaaacgttcttgaagaatttcaaacaacattctttaagaaatcctattgtagagcaagtcgttactgaaaccttacgggttttaaaggacatttggaaacattacggaaacggagcaaaagatttcttttccgaaatccatattgaattaggacgtgagatgaaactcccgaccgaagaacgccagaggttgacaaaacagataacagaaaatgaaataacgaatctgcggattaaatcccttttggccgaaatggaaaactatgcggaagtagaaaacgtgcggccgctctcacccatgcagcaggaagttttgaagatttatgaagatagcgtattaaattccggtatcgaaattgatgatgatatcttaaaaataagtaaaacagcacaaccttcgtcatccgaactccggcgatacaaattatggttggaacaacgttatcgttcgccttataccggaacagttattcctttgaataaactattcacttccgattatgaaattgagcacatcattccgcaaagccgttatttcgatgatagtttcagtaataaagtgatttgtgaatccgctgtaaataaactaaaaggtaatcagctcggattagagttcataaaagagcaccccgaagaaatggttgagattggatttgggaaaaaagttagaatattcaacgaaaaagaatatttagaattcgtaaaagaacattatagcaagaaccgatcgaaacggagcaaacttttgatggaagaaattcccgagaaaatgatagagcggcagataaatgacacccgttatatcagcaaatatatatcttctctactctctaatattgtacgtgaagagataaaagatgatggcgtcaattccaagaacctcattccattgaacgggaaaataacaactcggctaaaacaagactggggattgaacgatatctggaatgatttgatccttcctcgtttcgaacgtatgaaccaactgactaattctacagattttataacctataatgaacgctatcaaaaatatttacctacggtgccgatcgaagtatccaaaaatttccagaaaaagcgtatcgatcatcgacaccatgccatggatgctttagttattgcctgtgctacccgaagtcatgtaaactacatgaacaaccaatatgctttagataaaagtaaaaccaaagaagagaaacaagtcaaaagagaagatttaagaactgttttatgttacaaaaaatacaatgacaatttttcaaaaagctataactggtttttcaaaaagccttgggatagttttactgtagatgcccgcaatgaattggagaaaataatcgtcagttttaagcaaaaccttcgggtgatcaataaaagcgtcaattattatcaacattatgtcgatgggaaaaaggttatagacaaacagactaaaggtgataattgggcgattcgaaaatctttacataaggaattcgtttatgccaaggtcaatttagtaagaataaaagtgtccagagggaaatttattacggcaataagaaaaaagttggatacttcttttgatttaaaaactattgataaaataacggatacgggcattcaaaaaatcttgaagaattatttgtcctacaaaaaaagcccagagttggcattctctccggaaggcatcgaagatttaaacaacaacattgagaaattcaatgacgggaaaaaacgccagcctattcataaagtacgaatttttgaaataggaagcagatttcctttgggcgaaacgggtaataaaaaatccaaatatgttgaagcggccaaaggaacgaatctgttttttgccatttatgtcgatgaggaagggaatcgtagttatgaaaccattcctttaaacatagtgattgaaagattgaaacaagggttaaccgatgtacccgaaatcaatgaaaaaggagataaacttttatttcacttatctcctaacgatttagtatatgtaccaacagaagaagaaaatgcaaaacctttagatagagaagaattacatcaaaacagaatttataaaatggttagctcaagtggctctcaatgtttttttataaaaagtgaagtagcgaattctattgtcaataaaatagaatattcagcattgaacaaaatggaaagagcaattgatggaacaatgataaaacaagtatgtataaaactgaaagtggatagattaggaaaagtggaagaagcatttcgataagcagaactaatgaaataaatataaaatagcataacgctacaaagcagcaaaaaagtcttataattttgataaaacttatattaaatgatcaagcgtaccctttatttcggaaatccagcttatttgagcatagcgaacaaacagttggtaatcaagcttccggaagtggaacgaaacgatgatttgcccgaatcattcaaacgtgatagtatacggaaacttccaatcgaggatatcggcgtggtgatgctcgaccataaacaaataaccattacccatggacttatggaagctttactggcaaacaatacggctgttatcacttgcgatagcagccgcatgcctttagggttaatgcttccgctaagcgggaatactgttcagagtgaacgtttccgtgaccaattaaactcaagcataccgcttcgcaaacaactctggcagcaaaccgtacaggcaaaaataacgaatcaagctcatgtcctaggaactttgcgtaagacagtagtaaaaaacatgcaaaaatgggcattggatgtaaagagtggagatagcgataatctcgaaggacgggcagctgtctattattgggcaaacctattcccttccatcacgaatttccgaagagacagggaaggcgttcctcccaataatttactcaattatggctatgcgattctccgggccatcgtcgcccgtgccttagtcggtaccggacttttaccaacattgggcatccatcaccacaaccgctacaacgcctactgccttgccgacgatattatggaaccatacagaccgttcgtcgacaaattagtgcttgaacttttcgacagtaacgaggatatttcagaattgagcacatctctgaaaaccaaacttcttaatattccagtcatggatgtgatgataaacggacagcgcagtccactgatgattgccgtaagccaaactactgcttcattggctaaatgctttagcggtgagatgagaaaaatttcatatccgatttttgaataaagtggaacgttttagtgaatataggatcatgtgggttcttgtatttttcgatttgccgaccgagaccagaaaggaaaagaaggcgtactccgattttcggaaaaggttgattgaagatggatttaccatgttccagttctctatctatctacgtcattgtgcaagccgcgaaaatgcggatgtgcatatcaaacgagtgaaaaagaatcttccccctttagggcaagtaggaatactgtgcattacagataagcaattcggtcaaatggagctttttcaaggtaaaaaagagaagcctgtaagcactccttatcagcaactggaattattttgaaatgacttaccttcattattataatattttttaaataatcgacccaattctcctttccaccactttccatatgctctttctattattgatgcccgctatatactgatgcccggatttcacacttgccactctaaatactctctcttaaaaaatataaaacaaaaagccgcggccgaaaccagggcaattcgattcaaaagcatatcaggctattgaacgtgctacatttctaagtttctgcccgatatcatccaaagcattagataaaatatccaattcttcatcggtaaacgataccggaataccatttcttttatgattattcaagcgttgggaaaaccaggaacgacttttcttaaaatacttctcagcaatataagacatggaaacaatatccaggatgtccgccaattttacctttatatctacatatctacctattttctctgcccgttcaacggcagcttttgattctacgttaaaagcgtcgataaactgcttccgttctacttcattttttgaagcgatctcttgatctatcttccgggtgaaagcctccatatctatattttcggaagatacgaattcaagccgtagagcttccaatttttctgcctcggtcataatccaattctttttataattattttttcagtttggaaagtaaatcaattaacctatcaaggtgaaaattaatttgactttcaaactcactttctaataatccgcttgcaacaaggcgatcgtgcattaaaacatagaacagaagattccttttttcgtgttctaccagagcttctaactctttccgctcttcttcgttcaacattccgaatcattttaattgcgatgtttcaaagatagtaaacatttgtttaccgtacgaaaatagaggccttttttatcactcgtgtcccgttagattctcggattattatttaattggaaggttagacacattagtaattaaaccaaataggctaaagaaattacccaaaaaggagaaaaagccctacacttttacataccgggtctttttgctcctatcacagcctacggtatcacatcggatcaaagcaactttccgcttaaaaacagaccagcaaccgtaaaatagatgattaatcccgttacatcaaccaaggtggcgacaaaaggggcggaggctgtggccgggtctaatcctattttcttcagcagaaacggaatcatggagccggaaagtgttccccagagaacaatcaagaccagggagacagccacgctaatcccaatccaaacccaaaattgaccgtaatcgtaaagcccgctctcctgccagataaatatccggatgaatccgatacatccgaggatggctcctaacattagtccggaaaaaatctcctttcgcatgacataccaccagttctttaacctcagctctttcaaggccaatgaacggataatcaaactggctgcctgcgaacctgaattacctccactcgatataatcaaaggaacgaacagggccaaaacaaccgctttggaaatttcctcctcgtaatgtcccatcgcagaggcggtgagcatttcactcaggaataaaacgaccaaccacccggcccgttttttcaccatttcccacaggggaactttggtatatgacagatcgattccttccgtaccaccgaatttctggaagtcttcggtactttccttctgttgtacgtcaatcacatcatcgacagtcacaatcccaagcagtgttccgtcggtatcggttaccggcaaggcgacgcggtcatggtcggcaaagatcttgacagccacctcctgatcatcataaacattgagtgagataaaacgattatcacagagttcggaaatcttctgttctggtaaggccaggataatttcctcgatacgtatgtcatcgattaatttccaattctcgtccactacataaatcacattcagcgtttcggaatcccgcccgaatttccggatatgatccaagcccttctgaaccgtaaaaaaaggcctgacagctacatattcgggtgtcatcaaacgcccgatactatctttcggataacctaatagttgagtggtgatctcatgctctttcttcgacagcatttgcatcaaccgttggctcacctttccggggagttcttcaaaaaaggcggtacggtcgtccggatccaaatcatttaacaagccggtcagcatattcacattagccgccatgccttcaatcacatcttcctgttcgtcatgcgaaagatgttgaaagacctccttagcctgcttacgtgaaagcaggcgaaagaaaaggatcagatcggatttgggtaaattatcaattaactcggcaatctggaaaggttcaagattaactagttcgagtttaagatctatccagtttctatcttcaatcagttgttgaagacgatttctaatttcattcatgttacaatctccttacgattttagttctataaggagactgcaaggcctccctatagagtcattaatattaatactccattctctctgtaattcggatacgggccttcgtccatgataaaaattttaagtgaatactcgttttacggcatttcttccgtaatttttacaaattgctgcgaaagtacaattattccggcaaacaatctcaataataaaggctttttagcaaaacaaagagattggcagtgaataaaaagacaattaggttgtctgaattattttatttcagaaaagattataattaaggccggtcaccttgaattcggtacggcggttgatctggtcggctatcgtctgctgctcgggtggaagggtgaggataaattcttccgtaagcgcttgcccttccttcaggaacggatggtcggcggccagtttcttggtgaccgtcttggggatggtcttaccgtaacctttggcagtaaggcgcttggtatcgattccggaggcgatcaggtagtcgacgaccgattgtgcccgccgttgcgccagatcttcattgtatttctccgaacctttgcggtcggcatgtgcaccaagctcgatggttacattcgggttttcgttcaggaccttaatcaacaggtccagcgcctttttggattccgggcgcagggtcgccttgtcgaaatcataaaagatgttctccaccacaaccggcttattgaccggcgaaagaaagaaatcaacgtaataggtttcatttttctcctcggggccggtaacgagttcaaaattctggttcaggaaattaggggcactcgccatcatgacataccggatatcacgttccagctctacccggtaggtcccgtccactttcgtcatcgttttgacattcagtccgtctttaccgacaatccggacggttgcgttttcaatcggctcttcttccacatccgaaacaaccccttcaatatagatcgtaaccgtagggcgttcgaaggaataaatatggtcgtatccgcgtgcgtcattgcgattggaggaaaagaagccacgctccctttccccttcaaaagtaattccgaaatcgtcccccggcgaattgaacggcactcccatgttttcaacatgccattggccgagactgtccaacgttgccttgaacagatccaatcctcccatgccgggatgcccgttcgaagaaaaatagagcgtcaccgagtcgcgtacataagggaacatttcgtctccctcggtattaatggccgggcccagattttccatcggtccgaaatcgcttcctccgaccaagcgagaacgataaaggtctttgcccccctccccgccaaccgtttcggaaacataatagagatatttcccgtccggagaaactgtggggtgcgccaagggagtaaccgagtccttcacaattgaggcccgcgtaccggctccccactgggcgccgctgcgggtagaaatatagatttccgccgtacgcgaccccatcggatcttgcgcacaatacgtataatacatcgtattaccgtctttggagaaagacggtgttccctcgtcgaaatcagtattgaccgggtcttccatttcttccggacgctgccaggcacctttttcatccttcttggccaaatagaaatcattgttctttacgcctgtgatggcgctgagggaatcgcggttcgcttttccgcgggaagaagcgaaataaagctgatcgtatttttccccgtaaagcatcgggctgaactccccacggcgggaattgaagagatccatcttacggacctgataataagaaattctctctctcaacccaggcgccagttcgcatcctttgatcccattgagcgccagctggctggacggattgaattcaaggaacttacgataagcttggatggcgtttgcatactgcccggtctgctggtaaacctgcccgatccgcagatgcaccagactatccggatattcgtaacgcagcgcgttcatgaaagccgtggccgcccgcccggtattattgatccgccggttgcattctcccatccggaaggcaatataaccccgcaagtcacgtttatccggtttcgtcttagaatacactttccggtagatttccgccgcctcatagtattccccgatccgttgcttttcttccgcatccgccagtttggccgatttacaggaaaaaagcaaggagacaaaaaacagaaaaacgatataaacaggtatatgaacacgcattccggataaaatcttgcttaatacgaaataataacgaatggattatccacttattgcatcttagaaaaaagaacggtacctttgtctgtaataaatttttgtatgcttaaataacagaaaaaagggaagaatcattaaaaaatgcaagtgatatagttttattaccctgcatttattaactttcgaacatctggattttataattttatcggaactcttatttcagaaatattaaaaacacattgatatgaaaacttttatcgaagaacgttggggaacccatcctgatgatgtaaaacactatgacacggcacaactccgcaaagaatttttagtagaaaaactatttgaagccgatacggtattaatgacctacacccataacgaccgtcttatcatcggcggggccctccccgtaaacgaggcgttaaaactggagaccgtcgatttgatccgctcggaatatttctgcgaaagacgcgaagcgggtatcatttgcattgaaggcgaaggtgtcgtaacggtcgacggaaccgattacccgatgacatttaaagacgccgtctatataggacgaggctcaaaagaagtgatctttaaaagcaatgacccttcccggccagccaaatattatttcgcatcttcaccggcccataaggcctatccgactacccagataacagcatccatgcgccgtacgcgtgatttgggatcgaaggcgacggccaacgaacggctgctgaaccagattatactcaacgaaatcgtaccttgctgccaactgcaaatgggcgtaacggaactcaaggagggaagcgtatggaacaccatgcctccgcatacccactcccgccggatggaagcttacttctattttaaagtaccgaaagaacaggccgtctgccattttatgggacaaccccaggaaacccgccatatcttcatggcgaacgaacaagccgtgatttctccctcctggtctatccactcagccgccggcaccagcaattatacctttatctgggccatgtgcggggagaaccttgattatgacgatatggacactttcacggcggacaaattaagataagaaccaagttctaaatgaaataacaagatgaaaaaactaatttatttcgcatttgccgcgttattattcgcctcttgcacgaaagcatccaaagaggtaaaaataaccattgccaatccgagtgatttcgaccggacggaagaattgacagccatcccgctggatagcttgagtaataagctggccttgacagacagccaggtgtatgtagtaaagaacagcgcgggcgaagtcgtcccttcacaggttactttcgacaggacactgattttcccttcgggagtcaaagcgaatgaaacagcgacctatgctatcagcgcaggaacataccaagaattccctgccaagacgtatgcacgcttcatcaaagaacgtaaagacgatttcgcgtgggagaacgaccgggtagcattccgcatctacgggccggcccttgtcgaaatcgacggaccgagtaacggaatcgacctttggtataaacggacaaacaacctgatcatcgacaaatggtataaggacgatctggctaaagtagcctcttatcacgaagaccggggggaaggattggacgactataaagtcggacgtacattaggcgccggcgccatggctccgtttgtaaacggaaaattatggttgaacgaaaactttgcctcccaggagctgctggaaaacgggccgctccgcactaccttcaagttgacctacaacagtttcgacgtcaatgggaaaagcatcagcgaaatacgcatattttctctcgacgccggctcccagttgacgaaagtaacagaacagttgggggttagcgaaccgactccggtggcagccggtattgtcaaacgggaaaagaacgattccatcctcgtttcgccggaaaaagattatattgtctacctggaaccgggcgaaaaggcgggaagcgtcttcgtcggattggttttcccgactcctgtcgacagtacggttatcaatacctacgaggtgttgaatcctatttcaaagaagaaagagacgcatacgcacatattgggccttacgacctatcagccgaataagccggttacctactataccggttacggttgggaaaaattcggattccctacaattgccgatttccagaaacatgtcgcgaatttctcaaaagccttgaagcagccgcttatcgttacattcaattaagcaaccttttagatacccattcaaataaaaactctaaagaataaacggaaagaatgaaaaaagtagtcactttcggggaaattatgttgcgcttggcaactcccggataccaacgatttatacagtcgacaaatctaaacgccacctttggaggcggagaagctaatgtagccgtatccttgtccaattatggaatacccaccgagtttgtaacccgcctgccgaagaatgatatcgcagactggtgcttgtccgaattaagaaagtacggtgtgggcgttaacagggtgatcagaggaggcgaccgggtaggtatttactttcttgaaacaggagctgtagcccgtgcatcgaaagtagtatatgaccgcgccaattctgcgattgcccaaatccaaccgggaatggtggattggaaagaggtttttaaggacgcgcaatggttccattggaccggcatcactcccgcgctatcccagggagcggcggacgcctgcctggaagcgatccggatagccaacgaactgggcgtaaccgtttccacggatctgaactatcgtaaaaacttgtggaaatacggaaaaacagcggccgaaatcatgccggcattgacggagggttgcgatgtgatcttaggcaacgaagaagatgcggagaaggttttcggtatcaaaccggaaggattcgacgtggcacacaccggaggggaagtgaatgccgccgaattcgaatctgtatgtacccagttgcagaaacgtttcccgagggcaaagaaggtaatcattaccttgcgtggctctatcaatgcgaatcataacacctggggaggcgtcctctattccggcaagctctatcaatcgagaagatacgatattacccatatcgtagaccgggtaggaggaggagattcctttatgggcggactgatctacggattgatcacgtatccggaagacgaccagaaagccctggattttgctgtggcggcttcctgcctgaagcataccatctacggagacttcaacctggtgacggtttccgaagtagaaaacctgttgaaaggagacggctccggccgtgtatcccgttaaagcatactttgtatattataaattaaaaacaaaaataagaaatggagaatcaattttcattagccggtaaagtagcccttataacaggagcttcctacggcattggctttgccattgcaacggcattccacaaagcgggtgcaaccgtagtgttcaacgatatcaaacaagaactggttgataaagggattgaggcatacaaagcggagggtatccgtgcgcacggttatgtatgtgatgtaaccaatgaagaagcggttcaggcattggttgcccggatcgaaaaagaagtgggagttatcgatatcctggtaaacaatgcaggaatcatcaagcgtatcccgatggtcgaaatgtctgccgctgaattccgccaggtaatcgatgtagacctgaacgcaccgttcatcgtatccaagacggtcatcccaggtatgatcaaaaaaggacacggcaaaatcatcaacatctgttccatgatgagcgagttgggtcgtgagacggtttcggcctatgcagctgccaagggtggtttaaagatgctgacccgcaacatcgctt

SEQ ID NO: 1222 - DNA, 24332 bp, synthetic construct
  source 1..24332: mol_type = other DNA
  misc_feature 1..24332: note = Synthetic
tacgccgagttcagaatttgactttaaagcacgagccacaaagccatcaaaaaaatctaaaatggctgatattaggatacatatcgcggtggtctggtagtcaccatttaataaatgaactgctcctacacatccagaaaataaatttccgagagtgaagaaattcgctaaattgtttcttaaaaaattcatagagcaaatataaaattttattggataaaagccgaatttttggatttcattttcattatcctcggctaaaaaacttacctttgtgctattaagttagaaaaagtatgaaagaactccgtttgcaggaagtaaaagtcttgatatatcgtatattccttgtttttgttttttatcaggcagcgaggtttttgttttggttttttaatcgggatttgctggaaatagacagtgtttctcaatattttaagctggcttattatggcactgcatttgataccacggcgatactttatgtcaatatcgtttttattttttttagttttattcctttgactatcaatactaaaggaggatatcagaagtttttgttttggctttattttattctgaatggaatcgcgtatgcgatgaatttcggagatattgtctattatagatttagtcagtcgaggctgacctctgcggtgataaatgtcgttgaaaatgagcagaatataggtaaggttttttgggcttctttgggacagaatttttgggtttttctttgtttcattgtgttgatgggtctttgggttttcctttataaaagaatgaaaatcaaagaaataaagattgaaaagaaaatttggtattttggaggttctatggtaagtctttgtctggcagcggtgcttatagttggtggaattcgtggagattttaaacacagcacccgccctatcaatttggtggatgctaaccgccatacggataagcctgcgcacgcaaacatcgttctaaacagtactttttcgttttttagaaccatcaatacgaatggctttaaggaagtgcattttgtggatgaaaaatacatcgcagaaaatgtaaaaccctataaaacttaccaaagggaagttccgcagccaagacctaacatcgtgattcttatagtagaaagcctcggaagggaatatataggagcgtttaacgaagaaaaaaatataaaagattatgtttcttacacgccgtttttggacagtttgtcaaaggagagtctgatttttcctaatacatttgctaacggaaggcagtctatccatggaatgagcagtgttttggctggaattccgagtttaaaggatgcttttacgagttcgccgtattctaatcaaaagatacaatccatcgtttctgtggcgaatgaattgggctatgaaacttctttttatcatggtgcaccgaatggctctatgggctttcagggatttgcgaatatcctcggtttcaaggattattttggaaaaactgagtataataatgataaggattttgatgggatttgggcgatttgggatgagccttttctgcaatattttgctaaaaatgtaggaaagtctaataagctatttatggcaacggtttttacggcgtcttcgcatcatccatttaaaattcctgcacaatatgaagggaaatttaaaaaaggttttgtggaaatgcacgaaccgatacaatatacagactacgccttgaaaaagtattttgaaacggcacgaaaacagccttggtatgagaatactatttttgtcatcacgggagaccatacgaacaaaatctattatcccgaatacgccaaagcgatgaatggatatgcagttcctattattttctattctccaaatccgaaatataatttgaaaggaaaaaatatgacttacgcccagcagatagacatttatcctacacttgcggatatcattggttataacaaacctttgcgaagctggggaagaagccttgtttcggataaaaatgaagaatacatcgtcgtcaattctgatgcgatacaagagcagtttatgataggaaattatatctatcgttttgatggtaaggatattacgggagtttatggaattacagaccttgagcttaaaaataatcttcttgggaaaataaacaatgccgagattgaacgaggaaaactcctcagtaaggcttggtatcaggactatatgcacagagtcattagaaaaaaactgaattaaatataaaagtttttaaacagttgtttaagttttaattttattgtaaaacatcattgataaaaggcttaatcgaaatttgtttttgctgtttaatttttatttctatatttgcgctgtaaatattttatagatttaatcatgaaaaattcaattttagcctttgcattattgtgcagttccatggcttttgcccagatagaggggaaatggagaacgatagatgatgaaaccaaaaaaccaaaatccatcgtagaaatttttaaaaaatctgatggtaaatactatgcgaaagtagtagaactactgataaaaccagccgatcctaactgttcctcttgtaaagacgacagaaaaggaaagcctattttaggaatggaggttgttcgcggattgtctaaagatggcgatgaatacagcggaggaacgataacagaccctaaaaatggaaaatcatataaatgcacgatcaaaaaagaagggaataaccttatagttcgtggttatataggattttctgcatttggtagaaaccaaacatggcaaaaagtaaactaaactatatgaattaatgaaaaaatcctttcttgattatagaaaggattttttttgttaagtatataaaaaaggatgtattctcatataaatacaccaaattatttaaatagaagaaaaaaaatcaacaaaaaatttgtggattaaaaaagtttttatatcttcgcaaaatatttagacaaaaaaagaataatgtttaacaaatacaatcatacaagaacatctgaacataccattaccatgtgtatgactatgatgatgtgggtttttgagaagccgcagtttttgtgattgtaaaatgcgaatagaaaaattttatataaattatacaaattatcacaagggcttcggacaaaaatcgaagttctttttttatgtttaaactaaatctcaattaaaaattaaaatgttaataaatctgaatcataaaaaccaaaatctaacttgtcaaatgatgggaatgatgatgtggctttctaaaagaccgcagtttttgtgatggattaaagtattaagttttcttcataatcatcatgagagcttcggtaaatatgctggagctctttttttgtaagtaaaaaattaacaatattatatataatgaaaagaaaagtagttagattaagcactttgtttgcgttgttctctttcgtggggacattcagtgctcaggaaaagaagaaggattctatcaaggaaaattccatcggcgaagtcgtgatagtagcctttggaaaacagaaaaaagaagaaatcacaggttctatccaagaactaaaacccaaggatatctctgcattacagaacggaaatgtcttgcagggacttgcagggcgtgtagcaggagttcagatagtgggaaatgggcagcctgggagcagcccgagtatacgaatgagagggataggctctatcaacgcttctagtgagccgctgatagtcttagatgggataccttaccctgggtcgctcaattctattccttcatcggatatagagagtttgtccttcttggaagatgcttcatcaaatgctttgtatggctcacgaggagcaaacggagtaatcatcatcactactaaaaaaggaacgagaaaggggattcatgtagattttgatattaaaactgggattaacttccgtgcgactccagaatatgacatcatcagcagtcctgccgagtattatttggcttatttcaacagggttcgtgtaggcgaaaaagcaggtggaaagactgatgcccaagcctatacagaggcgataaataaaatgaacgccacgctgggatataatgcctacaatgttccgtttaaccagcttatcaatccagatggaagttttaaccaaaatgctaaactgctttatcaggacaattggcaaaaactattattccgtcctaatctccgccaagaagcaaaccttagttttaccgcaaataccgataaattaaaggcttatacttcacttggttacctcaatgaccgcagctacctcatcggttctggatttaaacgattgagtttaaggtctaatttggaatatgctcttaacgaaaaattgaagtttggaattaatttaaattacagcaacagcgaacaaaatctgggcgatggagaaagttttgctaactcgttccagttttctagaaatatcgcacctttttatccagtttatctgagggataacgattataatagggtttatgatatcaaaggaagggctgtctatgactacggagatggaaaagggccaaatggagcgagaaggtcttatgccgtttttgaaaaccctgtgggaaatcgccagtatgatttgaataaagtgaccaataacacggtgaataccaatctattcgtgcagtataaattcctgaaagattttgattttacttataattttggtggcgtgattatcaattcccaagagcttgtttatggaaatcctttgggagggactacggctactgtgggtggacgacttgcaaaatccaatactctgaaatacgcctttaaccaccagcagttattatcttataataaacaacttggtgcgcataatatcagcgttcttctagggcatgagctgaaccaagaaaaaagcgattatttcggagcgagaaaagaaaaattgttcttagaagggcttactgtttttgataatgttctgaaaatgaacgaaatcccaggaaaccaatacgactacgctgtggaagggtttttctcccgagttttgtataattataaaaacaaatatttcttcaatgccagccttaggagagatggttcatcggtattttctaaagaaaacagatggggaactttctatggactgggggcagcatgggacatttcgaaagaagatttcttaaaggattcagaagttgttaatgctctgaaagtgaaggcttcctacggacagcaggggaatgatattttctacttcccaggcactacggacagaatctattatgcctataaaaatttatataaagtaagtaacttcggagatgatacgcctgtggtgactacggaatatctcggaaataataagctgagatgggaaaactcccaaaacctaaatgctggttttgaaacggctttgttcaatagaagattgtctatcaatgctgaatatttcgagagaaaagtttctgatatgatttatcgtgcggcgcttcctttctctaatgtgggatattatcctaggttagaaaacataggaaacatgagaaacagaggggttcaggtgagcatcaacggagatgtaatcaaaacagagaatttcacttggaatctttacgccaaccttactcattacaaaaataaaatcaccaaactccctgatgcacagagagaaaacggaataacagatggactattcctcctaaaagaaggcagcgaccgctatgcttactatctgaaagaatttgctggggtgaatcctttgaatggagatgcgctttggtataaagatggtgtggatgcgagtggaaatccagttaaacaagttacaaacagctacgccgaagcaacgctttatcaaacaggaaaatctgctataccaaaggtctatggtggttttggaactcagataagatttaaaaacattactctattggctaattttgcgtatcagctgggcggctggggctatgaccaaaactacagatcgctcctgcattcggacaactatgcatctaactaccatagagatgttcataacacatggacaccggaaaatcctacagcatctttgccaagaatagatatttctaattctaaccaaaatgccaattctacgctattcttaacgaaatcagactatttaagtcttcaggatttaacgctgagtgtgggcataccgcagaagttccttgaaaactacagaatccgagatgccaatatttatgtaacagggaacaaccttttcctaatctcaaagagaagaggctacgacccaaggctgtctatttctggagtttcggagacatacggatataatctgttgtcaagtgtttcattaggtcttaatcttaaattttaatttttaaaaagttatgaaaataaataaaatattagcaggagcattcgttgccctatcacttttaagctgcaatagagaattagagacggaatcagcgaaactaatttcagaggagcagattcctgatgatgcggcatctttaaataattatcttaaagggatttatcttagtttcagaaatcatggttcgggtggaactaccacccacacggattttgggataatgtccataaaagcgggggttgatttgctttccaatgaccttattcaggcaaaacagcagcaccttgggagatattacaactacgaagcgagacaaagtgacaactttaccaacgaaatcgtttggaatacattttattctaaaatctttgatatcaatcgtttaatagagaaaatagaagggataggcgtaaataatgaaaaccgacatatctacggtcagcttttggcgcttcgtgcgtatagttattttaatttggtgaggttctatgcgcttacttacattggtcatcagaatgagctgggagttccgctggtaaccactgcttccagtccagaaacaccgagagcaagggctactgtggctgaagtctatacccaaataaccagcgatatagaaaatgccatcactgcgctgaatggttttactcagcaaaacatcgcacagatagaccaaagggcagcaaaagccatcgcggcagatatttaccttgaaactggggattatgccagagcggcagcctatgctcatgatgcccgaacaggcaaaacactgatgtctcaggcggattatacaggtgcagggttttctctaaaaaccaatccagagattatctggggatttgataattctttacagaccaaaaacatcggtaaccactatgcttcgttcttctctatgtttgacagcatgaacgaaggctatgcgggagcggcagggatttataaaatcattgataaaagattgtacgaccaaatcccaagcaccgattacagaaaacaagtgttcaacggggctacggcatccaactatacctttaacggaaagaccaaaaaccatccgccgtatgtgagcaggaagtttaaggatttgactttctttgagggggactatatctacatcagagcggcttcgctttactatatagaagcagaggctttggcgagacttgggcaggtggctcaggcgagacaagtgctctatgatattacttctgtgagagatacaggatatacactttctacaaactctgggcagagcctcatagatgaaatcatcctgcaaaagagaatagaactctggggtgaaggctacgcttggtttgatatgaaacgccttggagtggatttagtgagaaattatccagggtctaaccatacttttgggaagtttaacattagttattctacggactataaccaataccgtttccagattccacagagtgaggtgagtaacaatcctaatattgttcaaaacccagtgagataagccatgaaaaccacggcccgctgaaaggtgaaatccctttaggcgggtttgtttttaaagattgtaaattttatctttgctacagaattttaaatttatagaattatgaaaaaacttttattggctactgtagcagtagtgagtttaacagcatgtagtagaaacaatggtgctgatgaaattacaccagagccagtttctcctatcgtagggacatggaaatatgtaagaactgaaattatcagtggagtagatggttctacattaaacacaagggttcctgatgaatgtggaagtaaaaacaccttagaatttagagtggatggaaaacacattgataaagaatttattaaaataggtggacagtgtacacaagatggagatgaggagagtagatatgattataatcctgcgactaaaattctaaagcttacatacagcgatggaagcgtagaacaagaagaagtattgttattagatgctacaaatcttcatatactgcctgaagaatatgattataatagagatggagttgatgataaagtaatcatgttttatgtaagacaaaactaaaaaatattccctaagattatatcttggggatttttattttttgctgggggaggggagttgtattcttttttaatttaaaaaataaagtattcattgtcagggttttgtaactttgacaatgattttttgtaacgaaaaaaatatttcctgcactaatgtgggtataaaatgcattttagaaagttagagtttaaataattaaaatcaaaacaaatgaaaacaagtcaaaataaaaaagatttagcggagatgatgaccaatagaaaggatttattttgggctggtttttctttgataaacttttaaaaagcattttatgaaagccgaacagcagcaggagtttatcaagcaactaaatgaaaaccagaggataatccataagatttgtaaaatctacatggacaattccagcgaccacgaagacctttttcaggagattgtaattcagctttggaaagcctatcctaatttccgtggagaagccaaattttccacttgggcttaccgcatcgggctgaataccgcactagcactattccgaaagcggaaaagagatgtccctgcggattccatggagattcttcccgagataaaaatagcggaagaaaacgatgaccagaccgcacagatacaggcgatgtatgatgctatacaccagctgtccgatgtggaaaaagccctcatcatgatgtatctggatgacaaaccctaccgagaaatttctgaaatactgggcataacggaaggaaacgcccgtgtgaaaatgaatcgtgcaaaagaaaaactaaaaaccctcatcaaaaaataaggctatggacgaattagaattgctaaaaaaagattggaaagaaaataaatctgatgatttcaaaaattatacagaaaaagaacttttcgcaatgaccaaaaaaaggtctgtttccatcgcaaaatgggtgtttatcattgctttattggaactgggattttggtttttaattggatatttaatgccttcttcttcggaagataaggaatattatgaagtattaaacaacatcccacttataaagggaatattgtatgtcttaggagagtttgcagcttatttaccatatgtttttattggtttacttttgtatttaaattttaaaataaaaagagaagaaaaccctaaaaaactgatggaaaaaatcctcctgatgaaaaaatgtatccaatggtatattagaatatttttaggagaaattgtggcgtttttcatcatcagtatgatattgtcattttatatagaaagtaattctttggagggagctgaattagaagaattgtatctttttgcatttgtaatgtttattcctcttttaatgattattttcatttttgctttattcctaagatttatttatcatctcgtttatgaaaacctactacataaactgaaacaaaactacgaagaactcagcagaatggaagagtgaagctaaaatcccttaatttaagggatttttttatgaaataaaaaagccccgaagatagtcgaggcgctagatgttttcacaacggaataatccttattgtgagttgctttcaaatatgtagcaaagatatattaaatatttcgcttttccaaatgtcttttttatctctttttaagaaaattttaactaaatttggtatcgactgtaaaaatatatcaatgaaacatattttaggcttagatttaggctcaaactctattgggtgggcgcttattgaacaagattttgataataaacaagggaaaattcttggtctgggaagtagaattattcctatggatcagggaattttaggagagtttgagagagggaataaagtttcccaaacggcagaaagaacagggtttcgcggtgtgcgcaggctgagagagcggcatctgctccgtagggaaaggctgcacagggttctccatttgttaggatttttgccgcctcactatgatgcacaaatagacttcacaaagcgttttggtaaatttataggagattccgagcctaaactggcttataataatgaaggttttatctttttagaaagtttcaatgaaatggttgaggattttaaaaaacatcaaccacagttgttttacataaaatctaatggcgaagagagtaaaatcccttatgattggacgatttattatttaaggaaaaaggctctacaggagaaaatcagtaaggaagaattggcttggataattctgaatttcaatcagaaaagaggatattaccagttgagaggcgaggaggaagaaaaatctactaaaaatgtagagttttattctttagaaataacagatgtaatagctgatacgcctaataataaaggagaaatatggtattctatacatttggaaaacggctgggtatatcgtagagctagtaagatttcattggaagattggaaagggaaggtgcgagattttatagtaacgacagaactaaacgaggatggttccgtaaaactggataaagaaggcaaagaaaaacgctctttcagagcacccagcgaagatgattggaatttaataaaaaagaagacggagcagaatattgttttttctggaaaaacagtgggcgaatatatctacgaccatctgttacaaaatcctaatcagaaaataaaaggaaaactagtccgaaccatcgaacggaaattctataaagaggaattaaaggctattttagaaaaacaagtagcccttcagccagagctttttacggaagagctttttgtggattgtgtaagagaattgtataaaaataatgaaatacaccaaaacagcctttcttcaaaagactttgtgcatttgttcctaaatgatattattttctatcaaagaccactgcgcagtcaaaaatcaaatatatcaagctgttctctagaatatcgtttctgcattgataaagaaacaaaacagagaagaaaaacttatctaaaagtcatttctaaatcaaatccttactatcaggaatttagagtgttgcagtggctttccaaccttaaaatttatagaaaagaagatgataaagatgttacttctgaatttatttcttccatagaggacaaagaaactttgtatgagtttttaatgtctgaaaaagaggtaagtaataaatctatacttgagtttcttttaatgaaatcattgagagagacatatccttttgctaaagaaacggagctaaaaaaagaactgaaaaaagaaattacaaaataccgctggaactatgtatatgaggaggaaaatgacagcaaaaaatatccaatgaatgaaacaggatatgagattaaaaaaaggctgaaagaagtaaaaaatataccagataattttttgactagagatatagaatatcagctttggcatataatatattctgtaacagataaatacgaatacgaaaaggctctgatgaagtttgctcaaaaacataatttggatgcagagtctttcgtagaaaatttcaagagaataaagccttacccaagtgattatggagctttttctgagaaagcaatcaagaaactgcttccactgatgcgttttggtaaatactggaattatagcgacatttctgaaccagtacaagttcgaatatcagacattatcaatggagttgataatgagaacattaaaaccattgtgagagaaaaggctgaaaaataccagcttagccaagaggttgattttcaaggactgccactttggctggctcagtatatagtgtatggaattcattcagaggctgctgatatacagcactggacttcgccttctgatttggaagaatatctgaaaggcttcaaacagcattctttgaggaatcctattgtagaacaggtagttacagagactctgcgagtggtaaaggatatttgggaatactatggaaaaggagagcaaaatttctttgatgagatacatatagagcttgggagggaactaaagaaaacggccgaggaaagaaatagaatgactagggaaataaatgaaaatgaggagacaaatctgaaagttaaaaaggaattacaacaaatatttgaaaataaaagtgcagaaaatgttcgtccgtattctcctattcagcaggaaaaatatagactttggctggaacaagaaaaagaatctccttacacagggcagccaattccgctgagtaaattgttcacagatgaatatcagatagagcatgtcattcctcaaagtagattttttgatgacagcctttctaataaagtgatatgcgaggctgctgttaatgctgaaaaaggagcacagctaggtttagaatttataaaaaaacatggtggagaaataatagaaattggcttaaataaaaaagttacaatccttaatgaaaaagagtataaagagctggtcaataaacactttgccaataaccgagcaaagaaagccaaaatgctgatggaagaaattccagagaaaatggtagaaagacagctcaatgacacaaggtatatcagtaaatttatttcacaaattctctctaatatagttcgttctcctcaggaagatgatggagtgaattctaaaaatattataccatatacaggaaaaattacagccgcgctgaaacaagactgggggctgaatgatgtatggaatgatcttatcctgcctcgttttgagagaatgaataatctgacacagacagaattatttacaacatatagtgaaaaataccagaagaagattcctactgttccgcttgaacacgctaaaggtttccagaagaagcgaatagatcatcgtcaccatgctttggatgccttggttgttgcatgtgctactcgcagtcatatcaattatatgaataacaagcacgctttggacaaacataaggctaaagaagaaaagcaaaacgctcgaatagatttaagaactgtcttatgtgagaaaaagtataatgataatgctgaagacaaatacaactggacattcaaaaagccatggaatacctttacccaagatgtgcgaagcgctctagaaatgatcgttgtgagtttcaaacaaaacctaagagtaatcaataaggctactaattactatgaaaaatgggtagaggaaaaaggtaaaatggtgaagaaaaaagtgaaacaagaaggtatcaactgggctatcagaaaacctttgcataaagagactatttctggaaaaatcactttagaaagggtgaaagtaggtaaggggaaaattctcacagctactcgtaaaagtatagattcatcttttacagagaagacaatagcatctatcacagatacaggaatacaaaaaatattgctcaattaccttgctcataaaggaagtcctgaattagctttttctccagaaggccttgaagagatgaataaaaatattgccaaatataatgatggaaaagatcaccaacctatttataaagtgcgtatttttgaagagggaagcaagtttcctcttggtgaaataggaactaaatcccaaaaatatgtagaagcagctaaagggactaatcttttctttggaatatatcaaggggaagaaaaacgctcctatgccactattctgttagatgaggttattgagcgacaaaaacaaggacttacttctgttccagagcttaatgaaaaaggagaaaaattattatttagtctctctcctaatgatttggtgtatgtgcctgtggagggagaagatacccaaagtattgattatgctaatttatccaaagaacaaagagaaaggatttataagattgtaagttttactaaaaatagactttatggaatacctaatatagttgcagtgtctattgtaaataagatggaatatacacaacttaataaaatagagtttttaaaagaaaaagaaacttgtatcaaactaaaaatagaccgtttaggaaatatttctaaggcttaatgttataaatatttttttagtcatgctgtatcgttctatttatattggcaatcctgcttatctaaagcttagggataaacaattaaagattactgaccctgaaaccaaaatagaaaagggaagtatttctatagaggatttaggattgttgatgcttgatcattatcagattaccatatctcatcagctgatgcaggaaatgatgaagaataatgtcgtaatgattagttgtgattctaagcatatgccaaaaggtgtaatgctgcctatttatggacattcagagcattcggaacgaataaaatatcaattggaagcaagcgaacctttgaaaaagcagctctggaaacaaacaatagagtgtaaaatagagaatcaggctaaagtattggaaaaattaggtagattctctgaacctatgtatgagtatttgaaaaatgtaaaatcaggagattctactaatatggaaggtattgccgcccagcattattggaaatatcttatcagtccagattttctcagaggtaggtttggtgattatcctaatcagtttttcaattttgggtatggagttcttttgagcatcgtttctagagcaatagtagagacaggcctgcttcctgtattgggaatttttcataagaataagtacaatccttattgcttggcaagtgatatgatggagccttatcgcccatttgtagatatgctcgttatccaatggatagagaataatcctgatatagaagagcttagcaaagaagcaaaagcacattttctaaatattgcttcgaaagatgtacgcatagatggtcttgtaaggccgctgatggttggtataaaaacaacgatttcttcgctctataaatgctacacaggagagaaaagattgatttcttatcccaatttattatgaatagtgaacgattaaatgcatatcgaattatgtgggttatggtgctgtatgatttacctaccgatacaaaagaaaatataaaggcatctaatttattcaggaaacgcctgatagatgatggtttctctctatttcagttttctatgtatatccgccattgtccaagccgagagaatgcagaagttcatatcaaaagagtaaaaaatatattaccaaaacaaggaaaagtggcgataatgtgcattacagataaacaatttggagcaatagaaattttttatgctaggaatgaagaaaaaccgcctccaatgtggcagcagttagaattattttaattttttaaatcgtataaaacaaaaaaatccactgataatcagtggattttactttgaggctgtgatgtatccacaaagttaaagaatttgaaagcaactcacaactggagatgagaacgaagatttacaagagcagctgtgatgtatccacaaagttaaagaatttgaaagcaactcacaacatcttccttagcctttggcgtcagcatttcgctgtgatgtatccacaaagttaaagaatttgaaagcaactcacaactcatctgatgatggtaacactggaaattgggctgtgatgtatccacaaagttaaagaatttgaaagcaactcacaactcgccctccaaactggtgtttttcgctgccgctgtgatgtatccacaaagttaaagaatttgaaagcaactcacaactatttcaatgcaagataacaaaaagttagggctgtgatgtatccacaaagttaaagaatttgaaagcaactcacaactacttcacgaggaggatttagaatatcctagctgtgatgtatccacaaagttaaagaatttgaaagcaactcacaacaaccaagagttccagcctttcttcgttctggctgtgatgtatccacaaagttaaagaatttgaaagcaactcacaacccttacttataatgatgaaaatctacctacgctgtgatgtatccacaaagttaaagaatttgaaagcaactcacaaccaataatgcttaatgctctctacagatgtcgctgtgatgtatccacaaagttaaagaatttgaaagcaactcacaacagaaaatcctaacgacaaacttaaaaacctgctgtgatgtatccacaaagttaaagaatttgaaagcaactcacaacaatgtcgttataatacttatcccaaacagcgctgtgatgtatccacaaagttaaagaatttgaaagcaactcacaacatacagcactatttcttgttatcatactatgctgtgatgtatccacaaagttaaagaatttgaaagcaactcacaacagctgatatagagcaaactaaaagtcaaacgctgtgatgtatccacaaagttaaagaatttgaaagcaactcacaaccgaagcggatgagtatggaatttatatgtggctgtgatgtatccacaaagttaaagaatttgaaagcaactcacaacgaatttttggagcaaaaaaagaaagaagtagctgtgatgtatccacaaagttaaagaatttgaaagcaactcacaacctcatattgtccctaaaaggtcatatacaagctgtgatgtatccacaaagttaaagaatttgaaagcaactcacaactcgtatgaattaggttcagttgtagacaatgctgtgatgtatccacaaagttaaagaatttgaaagcaactcacaaccagagaacgcaccgagattaacgaccttgggctgtgatgtatccacaaagttaaagaatttgaaagcaactcacaaccatatcttgccggtgagcttgactattatagctgtgatgtatccacaaagttaaagaatttgaaagcaactcacaacagaagatactccagataataagaagcatttgctgtgatgtatccacaaagttaaagaatttgaaagcaactcacaacactcgtgggatttttgactttataacaattgctgtgatgtatccacaaagttaaagaatttgaaagcaactcacaacgagccaaagatctattcggagttggaggacgctgtgatgtatccacaaagttaaagaatttgaaagcaactcacaaccacctcacgaggaggatttagaatatcctagctgtgatgtatccacaaagttaaagaatttgaaagcaactcacaacctgtcgttgttgatttagttaaagatttaagctgtgatgtatccacaaagttaaagaatttgaaagcaactcacaacgaatttggttgattcttacgagaatactgagctgtgatgtatccacaaagttaaagaatttgaaagcaactcacaacagaatctgttcagcctgtagaacctaaagagctgtgatgtatccacaaagttaaagaatttgaaagcaactcacaacccaaggtttcgttttcttttttaagcaggagctgtgatgtatccacaaagttaaagaatttgaaagcaactcacaacaaatcaatatatttatgaaaaaaatgaaaagctgtgatgtatccacaaagttaaagaatttgaaagcaactcacaacagagtaaaatcactatcagcattaaatgtagctgtgatgtatccacaaagttaaagaatttgaaagcaactcacaacgttctgtagctgctgtagcttctacctcatgctgtgatgtatccacaaagttaaagaatttgaaagcaactcacaactggtgaagatcctcctgtttattgtagttagctgtgatgtatccacaaagttaaagaatttgaaagcaactcacaacggcttctgactttataaactaaattataaagctgtgatgtatccacaaagttaaagaatttgaaagcaactcacaactagagagtacagactgggtcatcgcttcaggctgtgatgtatccacaaagttaaagaatttgaaagcaactcacaacagcagaactggaacaaactaagagtcaaacgctgtgatgtatccacaaagttaaagaatttgaaagcaactcacaactgtaattgacattagtggtgtcaattagcagctgtgatgtatccacaaagttaaagaatttgaaagcaactcacaactatatatccatgatgccgatttcccgaaatgctgtgatgtatccacaaagttaaagaatttgaaagcaactcacaacttatcaacaagagagcagggaactcgtagagctgtgatgtatccacaaagttaaagaatttgaaagcaactcacaacattatgatataattttctttaggtctttgggctgtgatgtatccacaaagttaaagaatttgaaagcaactcacaacgccatgcgaaggtatttcttgatgatgctggctgtgatgtatccacaaagttaaagaatttgaaagcaactcacaacggtggttctcatatggagtttgcaaattctgctgtgatgtatccacaaagttaaagaatttgaaagcaactcacaacgagggcattggagaccaagctgtttataatgctgtgatgtatccacaaagttaaagaatttgaaagcaactcacaactgaatctgtagcaaatgcagatagatatttgctgtgatgtatccacaaagttaaagaatttgaaagcaactcacaacaatattagagaagttggcacaattaggattgctgtgatgtatccacaaagttaaagaatttgaaagcaactcacaacgacttaatatatcttggacttatgcacatagctgtgatgtatccacaaagttaaagaatttgaaagcaactcacaactaagaaaagattaataatgtttgaaaggaatgctgtgatgtatccacaaagttaaagaatttgaaagcaactcacaactatgtttctatatctataaaattttttatgaaataaaaaaagccccgaaaatactcgaggcgttagatgttttcacaactataaaaataatttattcctacataaagttctaaattcttagtataaaatttttcataacttaatctattacttcttcgtcaggaattatatcttcttggttaattaatctttcatctttagaataataatcatgttcattattatcattaacataattgagaataaatataggagatctataattctccttcattgtaacagtgcgtgaatttttctcataatccattaaataatatacatagtacttaatctttgtatcactagcctgaaaagaagttttattaataatatcatattctactagataaggtacatatctatttccatctttatactcttcttctaatgaaaatttaacaggatgatcatattcgcctttattgatatcttcttccttctcattaattttgtatcttgttcctaggtcagcttctttaggatcaaaatcttgaatactatctaccttaatagtgtcattaattacttgattaacttctaatgttttagtttcatgtttgcatgaacaaaatactaatgtactatatagtattattaaaattacatgtttcataatattgtatttaaattattattcattgaatagctcagatttatccacaaagttaagaaatttatattaagtattagataaatatttttatttgaaaaatagtgaaagtacaataattaaagaaaaaacgccctgatgaaattttcatcagggcgttttcattaaaattaaatataattatgaaaagatttatttatctttattcttgattgcttcagttattttttggctaagttcttcggtaagttctggattgtctttcagaagttctttcacagcatctctaccttgtcctagtttagtgtctccgtagctgaaccaagagccacttttcttaatcacatcatagtctacaccaaggtctaagatttccccaattttagaaactccctcgccatacataatgtcaaattctgcttgtctgaaaggaggcgcgactttatttttcaccacttttacttttactcggcttcctacggcttcatcgcctacttttatcggtgtgctggcttttctgatgtctattctcacagaagcgtagaatttaagggcatttccaccagtagtggtttctgggtttccaaacattacacctattttctctctcagctggttgatgaaaatcacagtgcatttggttttattgatagttcctgtaagttttctcaatgcttgagacatcagcctagcgtgtagtcccattttggaatctcccatatcgccatctatttcagcttttggagtaagagccgccacagagtctattactacgatgtctatcgcaccagaacggatgaggttgtctgcgatttcaagggcttgttctccattgtctggctgggaaataataaggttttctaaatcaattcctaattttgcagcataacttctgtcaaaggcatgctctgcatctatgaaagctgctattcctcctgctttttgggcttcggcaatggcgtgtagtgtaagggtagttttccctgatgattcaggtccgaaaatctctatcactcttcctcgtggatatccgcctacaccaagggctatatccaatcccaaagaaccagatggaatcacttctattgtatcatctacagcgctgtctcccagcttcattactgtaccttttccataggtcttgtccattttttctaggactagactcagtgcttttttcttatcttctaaattactcatcttcgatcaaatattgcctcaaagttacaaatattttagtagatattatcaattttgtttttaaaaaatttccatcaaaataaaatcccagaaatcataatggaataaagaaaaaaataaaaaatccttatctttggcaaaatcttttaaatacaaaaaagtaatgttaaaagcaggtttagtaggtgctgggcatcttggaaaaatacatttgaaattgctcaaccaatcagaaaaatatgatttggtgggttttcatgataaagatatagaaaattccaaaaaactggaagcagaatttgggtataaattttatgaaaacttggatgaactcttggataaaatagaggttttagatatcgtgacgcctacattttatcatcatgactatgctaaaatagccatagaaagaggcttggattttttcatagaaaagcctgtaactcagactttggagcaggcggaagagattattcagctttgtaacgaaaagggaatcagggcgcaggtagggcatgtagagcgctacaatcctgcatttatcgctacgaagccgtttatcagtgaaccaaaattcattgaaatccaccgtttggctgagtttaacccgagaggaacggatgtttctgtggttttggatttgatgatacatgatttggatattttgctttctttggtgaaatctcctgtgaaaaacatccatgcaagcggagtctgtgtggtcagcaaatcgcctgatatcgccaatgctagaatagaatttgaaaatgggtgtgtagcgaaccttaccacgagccgaatttcaatgaaatcaatgagaaagagccgatttttccaaagagatgcctatatttcagtagatttcttagagaaaaaagcagaagttatccgtatgaaaccagctcctgaaaatccatcagattttgatatgattatccaaaatgcagagggcgagagaagtcaaattatattcgaatatcctaacatccagccgaataatgcgattttggatgaattggaaagtttcgcaaactccatcaccgagaataagcccgtggaggtaagtttggaagatggaacagaagcgctgaaagtggctttggaaattatgaaactaattgataaaaaataatttatatgaaatcttttaaacttgtattgttgttatttattacttctgcatcgcttgtttttgggcaggagaaaagatatttctttaagtatgagtatcatccaaattcaaagtatttaattaaattaaaaacagatatggatggagggtataagtttgtgggaagtaaggaagtgatagataaaataggaatgagtgaggtagaaatgaagatgaatatgaacatgggaagcaccatttctacacaaaagaaacaagataacaaaattccatttgtattagaatacactgattacatttctgaagcagaaattaatggagagaaagtgaacagaaaaattcccatccaaggagttaaattgagcggtgatattataaatggtaagaaaatggaggttaagaatgtagaaggaaacatcaatgaagatacaaagaagatattgatagaatcgattaaacaattttctgcaatagatactgattttcctaaagaaggtctaaaaataggtgatagttttgatatggttataccatataaacaaagtatacccaatgcgggcgatatagaaatgaaaatgaatgtaaaatataaactcttaaaagtagaaaaagaggaagcctattttgatatgttgatagattttgtaatgggagataagaatgttaaaaacatggacttgtctgcatctggtgatggaaaaggttttttattatttgatatgaaaaataattattttaccagtcagaatatagacatgactattaatttaaaattaaaaacagaattacttacacttgaaaatacttctaaagcaaaatctgtcgttactcaacaaaaaataaaataaaaatattttttagagaaactacatttatatttattaactttgcaaaaccttataaggtatatatttttagttaaacaatttaaatttagaaagttatgaaattaccaaagtttttaatggcagataattcagaatttccagaggatttgttcgtagtacatacagaatatccaagatttatcctaaatgtagaggaagaagaagtagaatggctagatgatttggaaggagatgatgaggaaaccgttgcaaatgaagctacaaaagtagtagaggaagcattcgcatggtgtgatgaagaattggcgaaatacgacgatttggaagattaattatctttaaaacaaaataaaaacccactttttaggtgggttttttattttatagaccgaaagcctttttgatttcttctactttatctagtttttcccaagtgaaaaactctaaacctttgatagtaagctcatttttagctcctttgttaaaggttttgtctgccacataataatttcttcccatgtgtccataggctgccgtttcgcggtaaataggatttctcagttttaggttttgctctatcgcataaggtctcaggtcaaataattgctgaactttttctgcgatttcgccatcagtcagatttactttggaagttccataagtattgatatataaaccacaaggtttagcaactccgatggcataagaaatctgaaccaaaatttcatccgcaactcccgctgctacaaggtttttagcgatgtgtctcatggcataggctgcacttctatccactttagaagggtcttttccagagaatgctcctcctccgtgagcgcctttccctccgtaagtatctacgataatttttcttcctgtaagtcctgtatctccgtgtgggccaccgattacgaatttcccagtagggttgatatggaatgtaatattatcattgaaaagcgcctgaatttcaggtttttgtttcgctttaacttttggaattaaaatctcgatgatgtcttttctgatttttgccagcatgttttcttctgtgtcaaattcatcatgctgagtagaaaccacgatgctgtctattctcacaggcttgtgattatcagaatattctatcgtaacttgtgatttcgcatcaggacgaaggtaggtgatttccttattttctctcctcaatgcagaaagttccctcaaaatagaatgagccaagtctaatgccagcggcatgtagttttcggtttcgtttgttgcatatccgaacataattccttggtcaccagcaccttgtgcatttgctttagtctcaaagtcagagttttgggtaactctgtccacac

SEQ ID NO: 1223 - DNA, 24326 bp, synthetic construct
  misc_feature 1..24326: note = Synthetic
  source 1..24326: mol_type = other DNA
gcacttgcttttatttcacgcagaggtcgcagagagtaagaggcgcagagatagctgtgtattaaaaatcgagcattgcttattgaatgttttctcccacctacttgctactagccattccccacttgcttttatttcacgcagagttagccgagaagcgaaggcgcagagatggttgagtattgaaaattgaaaattgcttattgaatgttttctctcacctacttgctactcgctacttgcttttatttcacgcagagttcgcagagaagcagaggcgcagagattgttgagtattgaaaattgcttattgaatattttctctcacctactcgctactcgctattccccacttgcttttatttcacgcagaggtcgcagagagtaagaggcgcagagatggttgtgtatcgaaaattgcttattgaatgttttctcccacctacttgctactagccattccccacttgctttttgtttaacgcagcgttcgcagagaggcagaggcgcagagattgttgagtattgaaaattgcttattgaattttctctcacctacttgctattccctactagcttctccatcaacctttctaccaatggaatgatcttaccttcttctgcatccacccaatgcattttcgcctgccttttaaaccaggtcatttgccgtttggcatagcggcgggtattttgtttgatctgttctatggcttcttcgcgggaaattgtaccatcgaaataatcaaacagctcccggtaaccaacggtttgcagagcattaagatgccgatagggcaataacgaccgggcttcctcttcctgtccggcttgcatcatcccgtctacccgtaaattgatcctttcatatagcgtctcgcgagatagttcgagccctatcaggatggtttcaaacgggcggggctgcttggccgaattgcggaagctggtaatggactgcccagttcccaatatcacttccagagcccgcatcatccgttggggattttgcatttcaccggttttggaaaaaaaagggtcatgctgtcgaagttgctcctgcagccagctgatgccttttgcttcatacgcactaaccacctgcgttcttatgtgtgtggcaacttcgggtatcgcgtccaaaccttcggtcaatgccttgatatacaggccggtgccgccggtaaccacaacagtatcatactttaaaaaaagcccgtttaacaggttcagcgcatagcgctcataccatgccgcgttaatatcttcccctatagaatgggaggcaataaaataatgagctacctggctcagctcttctaccgaagggcgggccacgccaatattcatttctttgaaacactggcggctatcagccgagagaataactgtattgaaatgccgggctacttcaatggcatgcgcagttttgcccactgccgttggtcctgcgataacaataatcgatttgataattgaaatttataattggagtaggatattaatcttcttcgtcctggtatccttccgccgattcctcaatgcccatatcctcgccttcttcattctttacgttaaatccttctgcaccgcgggtgaggtcatatttctcttcaatatcggcaaatttatcgcctaatagcccttttgtgccatattgtttgggtccgatgccttcgctacgtactaccgccggatactcctggcgactatcagcctctttcgatacgttgatcagctcgatcagaaagttccaaaccttatgaaagtcgtaggtataagtaaagcgctggttcgtattttttacttcagatccgatggtggtttcggccatgatcagcggatctactttgtattttttatcgtatttctccagcgaaatttcacggccttgctgccagttgtcattgctgcgataaaatgtagcctggtgcttgttatcaaactcataggctttcaaaattgtttcatgcagttgcaagaagttttgcgtatgcttgatcactacatcacggtaaatgctgtcgtcctcctcaaaatatactctgaattttagaattgccatacggcgaatttacggaaatgtgtggagatgggccgatctgccgatttcaaatttggttatatgatttattttttgtatattagtatattggggtatcgggaaagctaaccggcgaccttaacttctggcagttccggggcgtaaggaacttaatatttatgatctgcgaagagcagtaagcctctgttaattcatacttttaaatttcaaacccggctgctggtatttaaaaagtatataaattactcatccgtatcgacatcatttcataaaacaagtagaacgctgtactatgatcaatagtaataccattcaattgcataaagagatttttccatttttgaatatttcactttacctgaataacattccattgatacgggagttaacgatcagcaataagggggcaggggattatttcggtttagagctggaattaaaatctgatataccctgtatagaaacgtttcgttatctcatagcccaggcacctgcaggcaaagagatccggataccggtggatgcgctgaagataaaccgggactatataagtcaattgtcggaaacagagaaggcggttcttacaataaatgttaaacaacaggacgagatattgatcagtgacacgctaacaatagatgttcatccactcgaatactttggcgggttccaggttttgccggagttgattgcggcctacgtcacacccaatcacccttatgtatatcatatcaagcggaaggcggtagaagtattggaccggctacgcctgaaagcagcattcgacggataccagcaaaatagccccgagactgtcatgcaaaccatgtcagccatttacactgccattcaaagcgaagaaattgtgtatagctcgctaccacccgggtatgaagctacggggcaaagactgcgtttattaaatacgcttcagcaggaaaaattcggtaattgcatcgacatcagtttactgttcgccgcctgcctggaagcagctgatctcaatcccctgctgattattacacatggacatgcatttgtaggttgctggctgcacgatgataagtttgcagaagtgatcaatgatgataaggctgccattactaaacggttgagtaaagggatacgggaattggcggctgttgaagctacctcagtatgtaaaggcaataagaccagttttctcgaagccttaaatatgggagaggcgcaattggtagagaaggaagattttatattgtcagtagatatcaggcgtgcccgtaccgctcgtattcgtcccctgcctttgttgcaccagggtacaaccacaaaactggatgaagccgcaatggaacaggagcgggctgttagtttacagcatagctttgacctgggagctatttaccaggatgagctggtgagtggggctaaggcaaccaccaaacaaaagctttgggaacgcaaactgctggacctctctttacgcaacaacctgctcaacctgcgcatgacgcgcaatatgctacagctggtggatattgacatcagtcacctggaagatacgctgagtgatggcaaaagcttttccattctaccccatgctacagccgagcctctgcgacgatacaatctgtttacgcaaccacttcatcattcttctccgctctaccagatggcgaatgaagagcttaaatataatcgcctgctcacacattatcaccagcaggacctggaaaacatattggcttacatgcataaaagcgcaaagcaagccattgaagaaaatggctccagtactttgtttttagcagtcggacttttaaaatggtatgacggtaaaacgcctgagcaccccaggtttgcacccatattattattgccggtagagttgagccgccgttcggttaacagccggtttaatctaaagagcagggaagaggataccatgatcaatatgaccctgctggaatttttgagacaggagtaccagctcaatttaagcgggctggaacagctgccctacgatgagaagggggtggacgttgcaaaagtgatgggcattttacgccgggccattatgcaactgaaaggctgggatgtagaagagcagctggtgctgggtaatttctctttcagcaagctgatattatggaaagatatcgtgcagcaccaggaagctttattgaaaagtgatatggttcgaagcctggtagaaggccggctggtttcgggtgatatggaggccaatatcgggaacgcagactttgatgctgtagcatccgcatcgttggcgctacctattgctaccgatgtatcgcaaatggaagcagtgatcaccgcgcaaaagggacagagctatattttacatggacctcccggaaccggtaagtcgcaaaccattaccaatattattgccgatgctttgtaccgcggtaagcgggttttgtttgtagcagccaaaaaagcggcactggatgtagtgcataaacgactggaacaaataggactggcgcctttttcactagagctgcactctaataagtcaaaaaaatcggacgtactggcacagctggctgctacattggaaactacccgtaatggcgttgtggctgatttcgagcaggaagctaaaaggttagaccaggtaaaagagcagatcagtcaatacgtaaaccttttgcatcagaaacaaccatggggctggagcctgtatgaaggcattaccgcgctggaagcttatcgcgatcgaccaacgcagcccaaaccgctgcccgaacaggtgttgcaggagctggatacccaacgctggcaacaatggcaggactggttgcccggttttcaatccattgcgcaaatgatcatacacccggctgaaaatccactggcggcattgcagcttcagggttacactgctgcattacaagacgaaattgaagcatccattaaaaaaatcactggtctgctgcctgcttatcagcagtcggttcagtcggttgcatcggcactacaatttcctttcacattatccaataaaaatacgcagcagcaatttgtaactgcagtagaggggctgagtcgcctgcccgatatgccactgccattagctgtctacctggcagaccgggaaaactacaatacttacgaagattggaagcggcattttcaacaacatcaggcactattaaaagccattacagctaactataaccttaatgttttatcagcagatgtagcaggtattgaaatggcctggaaacaggcagaacagtcctggttcctgcctaaatggtggaacaagagaaagcttaagaaacagttatctctttataagcaccaggctattgaaaataatgatgagatcgttcagttgtttcagcaacaccggcagctgaaagaagaagagacgattttgcagcagcaacgctaccaggctgttcagcaggctttaaagaatttatacaaagacgaacaaaccaatattacggatattgatgataaggcatcgaaaatacagcagctaagtgtactccttcagccattcggaagagcagcttttttacaatggctgagtcagctgcaacaacagtccctggtatataccgatgatatcaaaggcatacaacctgctttgcagcgggagctacagccaaaggcaatgcaaacatctgaagccatcgggcagttcgaagcgctcacgggaatcgttcttcctacaggtgatggttggacacaggcagggctggaacaagtaggggtattgcaatctcacctgccacatttaaaaaactggatgaattacgtgcagcagtccaatatgggtaaacggctgcagctggattggctgatcaccgcttttgaaagcaaggactgtacagccgctgatattaccacttattgccattacgcggtgcaccgggctacggtgcaaaaagtgattgggcaacatgaagcattgagcttgtttaatgcaggcatgtttgaaactaaaattgagcagtataaaaaaatagctaaagagtttcaacagttaaccatacaaaccttgaggaacaagcttgcggctcaattgcccaatgcgggtgtggaagccctgcaaagctccgaacctggcatcctgcaaagggctatccgaagcaggggcaggggaataagcatccgtcgcctttttgatcagctacccaccttattaccccgcatggcgccctgcatgttgatgagtcccatttcagcagcacaatattttgatgtggatgccaatcatttcgacctggtgatcttcgatgaggcctctcagttgcctacctgtgaggccgtcagcgccttggccagagcaaagcaggcggttattgtgggtgatcccaagcaaatgccaccaacggcgttttttaccagccagaaaacagacgaggaagatgtggaaatagaagacctggaaagcatattggatgattgcctgtctttatcggttccttccaaatatttattgcggcattatcgcagcaagcacgaaagtttgattgcttttagtaatgcgaattattacgaaaacaagctgttgacattcccttcagcagatgatcttaaccgtaaagtgcaataccatcatgtgccgggtttttatgataaaggaaagacccgcaccaatagttttgaagctgatgctattgtacaatatattcaacaacactataccgatccaaagagaagcatacgcagcctgggcgtagtcacattcagccaaacccagcaaagcctggtagaagataagctgcaggcgctgtttatgaaagatgcggcgctggaacagttagccaatgaagcagcagagcctttgttcaccaaaaacctggaaaatgtacagggggatgaaagggatatcatattgttttcggtaggctatgcacccgacgagcagggaaagatgtttatgaattttggtccgttgaaccgcaatggcggctggcgcaggttgaacgtagccgtgaccagggcccgttatgaaatgcatgtgtttgctactttaagcgccgaccaggttgatctgagccgtacttcggccgaaggtgtagcaggcctgaaagcctttctgcaatttgcgcaacacggtcagttggctttgcgggcgcaggatgtacagagggagcaggctggtttggccaggacgattgcccaacgcctgcaagaaaaaggcttacaggtacggtgtgatattggtacatcagggtttaaagtagatatcggtattgtacatcctggtaaaacacagcagtatcttttgggtattctgatcgatggggactactattacaatgcccgtacggccaatgatcgcgagcgcgtcatgccatcggtattgcaagctttgggctggaacctgcaccgggtatggaccatggactggtatgagaacagcgacaaagtgattgatgccattgttcaaaaatcggagctgattttacaacaacctggtatagttgaagaacagcttgaaaaaaagataacagcagcgactcccatagtgcagcaggtagaggcagcatcatccaaaacgcttccagatacagcaagtaaacggagagcttaccagccgcagtcattaccgcaagagcctcatgccagcagtgaaactatttataagccagataaccgttcccgcgttcagcagcaaattaaaatattgctggatgccgaagcgcccatcagtaaaagcctgttgtataagaagatactgcaggcatggaacaccacccgtgccggagccaggctggaagcttatttgcaggagctcatcagtgaaatggccataactgctaccctgcatcatcagcccttttactggagccatactgatcgtactattgactattaccgcgataatagtatagaaaaacgttccatcgaagatattgcaccggaagaaatagtagtcgccatacaggaagccgtggtgcacaatctcagcattgaagaagaggagctgatccgttatctctgccgcgtttttggattcgccaaagtaggaaagcaaatagacagcttattgcgctatgccattgatgaggccgagcggggaggggtggtaaagagagaaggcggcagggtgaagatagggtaggggttggaagctgtgaactacccaagagagtaataggcatataaaaatgctaaaatgcatttctggatgtgcaaaatattgatgaaagtgcacttttgattgagcaaaaatgtcattaaaccggtttagaagccttgtaaattactgcttttatgcgcgtattttacgtaactttatacagtaacttgtatgatcataacacttaaatttgcctatgaactccactgcacccacccagaaaatacacgaaggtagaaacgtaaaacgcttccgcgaaatgctcggcataaagcaggatgcgttagcggccgacctcggcgatgattggaaccagcaaaagatatctttattagaacagaaagaaaccatagatgcagcagtattaaaagacctagctgctatacttaaaatacccatggaagctatacaaaattttgatgaggagaaggcggttagtattatctctaatacatttaccagtaatgatagttcaacattgaatgctgttaacccctactgcacttttaatccgttggataagttagtagaggcttttgaggaagtgaggcgtttaaatgctgaagtcataaagctaaaagatgagcagatcagcttattgcaaagcttgttggagaagaaataaataagccttcccaggatttgaaaaccataacttgttggccttatgttacaacgacagcgcggtctatgttgaagggtaaaataaaatttctctaaaaaagattgctaatcttgtaaattaacttataagtgaatacctttgccttggaattgtgggatgatgaagggacaaaatgtaccttttatacagtgcgtaaggatggtgcgcatcaaaacgagacggatctgtttttcgataaataccatcagttgccagagtataagcagtcggttcagcaattattaagctttgtgcttgatgcgataggtgacgatcacggtgctttggatgttttattcaaccgttttgaaaatgaagtagtgggtttaccgaatagaaagagggtgcagttaggtgaaattgtattttgttatccggattttccacttcgcctttatgccttaagaattaaaaatagaaaagatctggtagtgttgttcaacggaggtgtaaagtcagcgcaaaccaatcagcaaagtagcggtttgaaccttaagtggagagaagcctgtcaatatgctttgcgaatagaagaagcgataagagaaggcgaggtaattgttgatacaaaagaacggaaattaacatcatctgataaaagcgatgaaattattttataaattgatataaaatgagaagcaaggttgcaaagaaaattcaggaagaaacccctgaagaggagcgcatttttgtgcgtcagtacacagatattgttatacgtattaatgaactgctgcagcaaaatggctacacgcaaaaagagcttgccgggcgtatgaacaagcgaccttccgaaatcagtaaatggttgaagggcaatcataaccttacactaaaaactattgccaaattggaagcggagcttggcgcaccaattattgaagtaaaaaaagcctcttagcatatcaaatttacagaacagcttccccgatagtatcccgggacagacgctccggggacggggcgttttgtgttattacagggcacaaaaaaaggcgagttgccccaccttgaatgttttcacaacggaataatccttattgtgaattgctttcattgaaaacaaagataaagcgatttatgcattgttggatacggaaatccgtaataaaaatcttttttattctttattttagaagctaattaattgaaaattatgggcaaaacgattcttggacttgatttagggactaattcgattggatgggcgctgattcaacaagattttgatagtaaagcgggagctattcttggaatgggcgtaagggttattccgatgtctcaagatattttaggggagttcgggaaggggaactctgtttcgcagactgcggagcgaaccggttatagaagtgtaagaagattaagggagcggtttttattacgcagggaaaggctgcacagggtgttgaatgttttaaatttcttacctcagcactatgcggcacagatagattttaacaagcgcctgggtaaatttttagaggaaactgagccgaaactgccttataataacgagagatttgtttttaaaagttctttcaatgaaatgttggaggatttcagaaaacatcaaccgcagattttaaaaaacgacaaaggggaggaaaaattagtaccctacgattggactatttactacctccgtaaaaaggcgttaagagaaagaatagaaaaggaagaactggcctggatacttttgaattttaatcagaagcgtggctattatcaattacgtggagaagaggaggaagagcaactcaataaattggtagaattttactcgttaaaaatcgtagatgtattggctgatgaacctcaaaagggtaaacctgatatctggcattccctggttttggaaaatggatggatttacagacgatcaagcaaaacacctttatttgattggaaggacaagacaagagattttattgtaacaacagatttgaatgatgatggttctgtaaaaaaggataaggaaggaaatgagaaacgcagtttccgcgctccagctgaaaccgactggacgctgataaaaaagaagactgaacaggaaatcgacaattcccataaaacagtgggtgcttacatttacgataccttacttcaaaatcctaggcaaaaaattaaaggtaaactggttcgcactatcgaacgtaaattttataagcaggagctcaaacaaatcctggacaggcaaagaggttttcatcctgaattacaaaacgaagatctatataatgattgcgttcgggagttatatcgaaataatgaagcgcatcaactcatgctgagtaaaaaggacttcgttcatctttttatcgatgatatcattttttatcaaaggcctttgcgtagccaaaagtcgtctatatctaactgtacgctggagtttagaaaatataaagatgaaaagggtgcagaacatgtgcagtaccttaaagcggttcctaagtctaatccttattaccaggagttcaggatttggcaatggttatataatttaaacatctataaaaaagacgacgataccaatgttacgagcgactttatccattcaatagaagatattgaaaccctgtttgatttcttaaataccaggaaagaaatagaacaaaaaccgttgtttaaatttttattggagcaagaagggtataaaggaaaactgctgaatgcagaagttgaaaagtatcgatggaattatgtggaggataaaaaatacccctgtaatgaaacccggacgatgattgcaacgaggcttgaaaaaattgagaatgtttcaaatgattttttgaccagggaaatcgaacagaaaatctggcatattatctactcagtaaatgataaaactgagtatgaaaaagctttgaagtcatttgccagaaaaaatgatcttgatgaaaatgctttcctgcaagcatttaaaaaatttccgccatttagaagtgagtacggctcgttttcggaaaaggccataaagaaattattgcctttgatgagaataggtagacactggaattatgacaacattgaaggaaaatcgaaagagcgcatagataagattatcacgggtgagtatgatgaaaatattaaagataaggtaagggaaaaggcgatgcaccttgttgaagaaacagattttcaaggtttgcaattatggttggctcaatatattgtttatggcaggcattcagaagctaccgcgttgggtaaatggaatgctgctgatgatttagaacagtttttacaagattttaaacagcattcgcttcgcaatccgatagtggaacaggtaattacagaaacgcttcgtgttgtaaaggatatttggattaaatatggtagcggtgagaaagatttctttagtgaaattcatattgagttggggcgggaaatgaaaaacaccgccgaagatcgaaagaaaataaccaatatggtttcagaaaatgaaaacaccaatcttcgtataaaagctttgcttgccgaaatgatgagcgatgttgccgtagaaaatgtaaggcctttctcaccaatgcaacaggagattttaaaagtatatgaagatggggtgttaaattccgatatagagatcgaagatgatatcttgaaaatcagcaaaacggcgcagccttcctcgtctgatttgaggcgttataaactttggctggaacagaagtatcggtcgccatatacaggagaaattattccgctgaatagattatttacgcccgaatacgagatagagcacatcataccgcagagccgttattttgacgatagttttaacaataaagttatttgtgaaacggcagtaaataaacttaaagacaattacatcggtcttgggtttattaaaaaatttggaggcactattgtagaatgtgggatggggaaatctgtaaaggtatttaaacaggaagcttatgaagattttgtaaagcaacattatgctaaaaaccgtggcaagcgtagtaaactgatgcttgaagaaattccggaaaaaatgattgaaaggcagatgaatgatacccgtcacatcagtaaatatatttcaggtgtattgtcaaatatagtgcgtgtagaagatggatctgacgaggggataaattctaaatatattgttccgggaaacggaaaaataactgctcagttaaaacaagactggggtttgaacgatgtgtggaatgatttgattttaccaagatttgagcgattgaatcaacttaccaatgcagcacattttactgcctggaacgaaaaccaccagaagtttttacctacggtcccaattgaattatcgaaagggttttctaaaaaaaggatagatcatcgccatcacgctttagatgccctggtaattgcctgcgcaaccagggatcatgttaatttactcaataatcaatctgctaaatcggatacgaaacgttatgatctgaagcgaaaactgatgcagtttgaaagggaagtgtataatcatccacatacgggcgagagaattgagcgggatatagctaaacagtttttgaagccctggaatagttttacagtagatgcaaaaagcaacctcgaaaaaattgtagtgagctttaagcagaatcttagggtgattaacaaggctacaaattactatgagaagtgggtagaaaaagatggtatgaaatccaaagaaaaggtagagcaaacaggaactaattgggcaataaggaaggcgatgcataaagatactgtctcggggaaggttgatttgccctggtataaagttccgaaaggaaaaattttgactgctaccaggaaaagcgtggatgtgagttttgatataaaaactattggaagcattacagatacaggtatccagaaaatcttgaagaattatctgacctcaaaagataataatccggaaatggctttttcacctgagggcctggaggacatgaataaaaatattgaaaaatacaatggtggtaagtcacatcaacctattgttaaggttcgggtctttgaactaggaagcaaatttcaaattgggcaagccggtaataaaaagcataaatatgtggaagctgccaaaggaaccaatttgttttttgcagtctataaagatgaaaagggaaaaaaaagctatgtttctgtaccttttaacgaagtggtcgaaaggcaaaaacaaggactgtccgctgtagagttaaagggcaaagaagatttttatttatgtcccaatgatctggtttatattccatcggaagatgaactagataatgttgagggaattgatttcgaaagcctctctgctgaaaagaacaatagtatttataaggtggtgagttttacaggtaatagactgtattgtattccttcaaatgtctctaccgtaatacttaacaaaattgagttttcacagttaaataaaattgaattcacaaaggaaaaggaaaactgtgttaagctaaaagtagatcgtttgggtaatatttcaaaagcataaagatgcttcaattagaaacatattatcatatctataatcacgccaatggcgatgataacctgtttcgcgaagaaaaaaactatcatttctttttaaaaaaatatcatcagcacatcgatgtaatagctgataccttagcctggtgcctgatgcccaatcattttcatctgctggttaaaattaaaagcgcggaagcgatagcagcaactgatccaaagtttcaaactttggatcagttggaagcccggaccgcgtttttaagtaaacaattttcaaacttcttcagtagctatacgcaggcatttaataaagtatataaacggcggggttctttatttataaaaaattttaagcgaaaggaagctgtagatgacgattatctgcgcaacctggttatgtacatacatctcaatcctgttaagcatggatttgtaaaagaaatagaccattggccctggacctcctggaaattgtttccggatacctggcctgaaataacggaccggttgtttaggagttccgaacaatacttgttattacatggcgataagcaagcctgctttgatgagtacatgaggttggagaacgatctaatttaattaatatgatcaaacgaaccctctatttcggcaatccagcctacctgaaaacccaaaacgaacagttggtggtggaattgcctgaaaccagcgagcaaagaacggcggcgattgaggatatcgggctagtggtgctcgatcaccagcagatcaccattacccagtctgttttagccaaacttttagaaaacaataccgcggtggttacctgcaatcatacgcaccatccgaccggccttttgcttaatctggatggtcataccctgcagagtcagcgttttaaatatcaggtagctgctacggtacctttgcaaaagcagctctggcagcaaaccgttatggctaagatcaccaaccaggcccatttactagggcaaaagcagatcgccaataaaacactcttcaacctagcggctaaagtaaaaagtggggatagtgacaactgcgaggcacaggccgcggcttattattggaaaaatctttttcctgagttcctgaattttaaacgatttcgagagggagagccgcccaataatttgttgaactatggctatgctattttaagggcagtgatggcgcgttcgttggtaggtagcggcttgttgcccactctgggcatttttcatcgaaaccaatataatgcttattgcctggccgatgatattatggagccttatcgcccctacgtggataaaatagtaggtgatattgtgcggatgaatggccggtttttagaaatgacgccatccatgaagcagcagctgctagccataccggctatggacgttatgatcaacggagagaaaagtccgctgatgaatgcgatacagcgtactacggccagtctggccaaatgttttgaaggcagttcaagaaaactgctttaccctgttctgccaacagatattgcctgatatggattttgaacgtttaaatgcctaccgtattatgtgggtaattgttatgttcgacctgccaacggagacaaaagcccagcgaaagatctatgcgaaattccgcaagcagatactcgatgatgggttttctatgttccagttcagtttgtatatccggcattgcagcagccgggaaaatgccgaagtgcatatacaaagggtaaaaaagatcctgcctgctaaagggcatatcgggatacttaatattactgataaacagttcgggatgatggaaattttcaggggaaaagaattgattgaggccccgctcgccccccagcagcttgaattattctgataattaggaaaatggaattttgaaggatagtaataaaaaaatgggcaaaatgcccatttttttatcctgttgacaacgggaaatcctctgctgtggcggctttgagcaaatcgtgttgtcaaagaccaagataaatcaaaatgatgaaagcaattcacaactgttgccattgtatttaatttttactttaagttgtcaaagaccaagataaatcaaaatgatgaaagcaattcacaacgcttaccaacttcatccgcatactttttaagttgtcaaagaccaagataaatcaaaatgatgaaagcaattcacaactagaccagcggcgaggttttaacattttaagttgtcaaagaccaagataaatcaaaatgatgaaagcaattcacaacatattatttatatctttatgatatgtttcggttgtcaaagaccaagataaatcaaaatgatgaaagcaattcacaacacaggaggatcgttatatctatgaagtatcgttgtcaaagaccaagataaatcaaaatgatgaaagcaattcacaaccctctctacagtggtcagcaataaactttagttgtcaaagaccaagataaatcaaaatgatgaaagcaattcacaacttacaaatacaacgactgttttgctcacgggttgtcaaagaccaagataaatcaaaatgatgaaagcaattcacaactaccgtgcctttgtccgggttatcagttgagttgtcaaagaccatgataaatcaaaatgatgaaagcaattcacaacgggtttaacccaaaattattaaataatcttgttgtcaaagaccaagataaatcaaaatgatgaaagcaattcacaaccgtcaccggtatacaactcacaatctttcagttgtcaaagaccaagataaatcaaaatgatgaaagcaattcacaactaaaagaatagtcgtttctttcctccttctgttgtcaaagaccaagataaatcaaaatgatgaaagcaattcacaacactttcccattcaactccttcagaacctcggttgtcaaagaccaagataaatcaaaatgatgaaagcaattcacaacaggcaaagtacctgggaactgaagctcgaggttgtcaaagaccaagataaatcaaaatgatgaaagcaattcacaaccgataccgagcagggtgaatggtacgcccagttgtcaaagaccaagataaatcaaaatgatgaaagcaattcacaacataaatcaagaagagataatggtgttgatggttgtcaaagaccaagataaatcaaaatgatgaaagcaattcacaacataaaatttcccggttccttttgtaaacaggttgtcaaagaccaagataaatcaaaatgatgaaagcaattcacaacacaaatgacctggttacgttgtcaataaggttgtcaaagaccaagataaatcaaaatgatgaaagcaattcacaacaatcgaatacacctctcattagtaacacatgttgtcaaagaccaagataaatcaaaatgatgaaagcaattcacaacttatgcaagatggcgttagggttccactaagttgtcaaagaccaagataaatcaaaatgatgaaagcaattcacaacattagagcctgttcctgaataacgagcagagttgtcaaagaccaagataaatcaaaatgatgaaagcaattcacaaccgtcatcggcaggcagtccctttggaacgagttgtcaaagaccaagataaatcaaaatgatgaaagcaattcacaactataaggtaaaaaactccataacttacttgttgtcaaagaccaagataaatcaaaatgatgaaagcaattcacaacacacagttcattaatgaatcaggtttgcaggttgtcaaagaccaagataaatcaaaatgatgaaagcaattcacaacggagttggaattgttgcgggcggattacaagttgtcaaagaccaagataaatcaaaatgatgaaagcaattcacaacataaatcaagaagagataatggtgttgatggttgtcaaagaccaagataaatcaaaatgatgaaagcaattcacaacataaaatttcccggttccttttgtaaacaggttgtcaaagaccaagataaatcaaaatgatgaaagcaattcacaacacaaatgacctggttacgttgtcaataaggttgtcaaagaccaagataaatcaaaatgatgaaagcaattcacaacaatcgaatacacctctcattagtaacacatgttgtcaaagaccaagataaatcaaaatgatgaaagcaattcacaacttatgcaagatggcgttagggttccactaagttgtcaaagaccaagataaatcaaaatgatgaaagcaattcacaacattagagcctgttcctgaataacgagcagagttgtcaaagaccaagataaatcaaaatgatgaaagcaattcacaaccgtcatcggcaggcagtccctttggaacgagttgtcaaagaccaagataaatcaaaatgatgaaagcaattcacaactataaggtaaaaaactccataacttacttgttgtcaaagaccaagataaatcaaaatgatgaaagcaattcacaacacacagttcattaatgaatcaggtttgcaggttgtcaaagaccaagataaatcaaaatgatgaaagcaattcacaacggagttggaattgttgcgggcggattacaagttgtcaaagaccaagataaatcaaaatgatgaaagcaattcacaacaaaacctgaccgtagcctaaggttactccagttgtcaaagaccaagataaatcaaaatgatgaaagcaattcacaactttactttctttacatatctaaaactcatagttgtcaaagaccaagataaatcaaaatgatgaaagcaattcacaactgcaacttgcgaagtataacaattttctgagttgtcaaagaccaagataaatcaaaatgatgaaagcaattcacaactagctccgcgccaaaactcaggagtaattagttgtcaaagaccaagataaatcaaaatgatgaaagcaattcacaacaattatgatgtaaatatacggtgtaattgtgttgtcaaagaccaagataaatcaaaatgatgaaagcaattcacaacgaaaaaaggcttgctgattcaggtatacgcgttgtcaaagaccaagataaatcaaaatgaggaatcgtcgtagtcgagatcatttatagccggctaagcccacaagtggaagaatcccaaagccgattgttctatcggcgttttggttctcttttcaatatagattgaattgctttcctgtagtcccggtcataactgctgtcattggcttgattgtcgtaaattacaatatcaaaatccttaatagtatcgccttgtattttatagaagctggtccatgttttccctgacatcacataattggatatgaggtcgtactgaggtaaataaactggatttttgatggcttcgaagccctcgatcttttttatccggttattgatcgtgtcaactaagtataaataataagtcgagttgcttcttacatctgagatattttgcactagaatatccggtatacggtcattattaaaatcggcaaattcaacgttcccggttttgctgaaaagggaatcggagaagatctgcagatattgttttcctgataatctgcttacagaaaacagagtgttaggcgtactatcgtcttcgttggttgaatcaagagtcgctagcgttacatggtagttcttgttgaggtatattgagtcacaagctacatgatatgatagaatggccggtgtatcttgcgctttgctactccacgctattaacgttactacgattgataatataatgcgactgtacattagtatcattctttcatcttttttacaaagccatctcaattaaaaatgggcagtttatttaacagttattacatacaaaatctcccaataataattataatatcctttatcgttatagaatagcctcagtctcagacactggaaagttaaatgcattttggtaaaaagccctggactttttgcatatcggttacggctacatttataaaattgattttaggatacattgactttttgttttaatgctttccaggtttgtatggccagttcatatcctcgtcatcatcaaaatataatgctaacataaccatttgatggtcgatgacggaaagccataagtaaacgattcttcaggcttctacctgacctgtcttcacttcccccgatcgcaaataacgggcaatgatcacgccggttgaagtaatgacagtgtctgaaagtttgtagacagcggggagcgcgttcgtatcaaaaagccttttgcctttacccaatagtataggatgtattttaagtcttaactcatctaccaggtcgttgcttagtaagaggtgcaccaattcgctgctgccccatacctgtacgtctggtccttttgactgcttgagttgctgaatatccgccagtgttgtcaagaaatgagtattataccagtcagaatctttcctggttgcagataatacatatttttcaccctcgttaatgcctggccagtagtccctgtggtttggccagtaccgctcccatatctcaaaagtttttcttcctaaaagataggaggcaggtcgcaattcttcctgaaccactttgccgtatacctcatcaccataaggctctgtccagcctccatacttaaatccgtcagattcgtcttctttcgggccgcccggcgcctggataacgccatcaagtgtaatcatggacaatacaatgatcttgcgcatagctgttgattttatcgagacctaaagatcgtcaataaaaccagagcccaccggggcaggatatgacaatatggggtgagatcgcgacaagcacaggagctaccattaacgctgatgagtctttatccactcagcgtatgaaataacacccaaatcgggttttgcttcaccctccaacactgatataaattccagctggtgcccatccggatcattaaagtaaatagcaatggctggcatccaggcaaaaaccataggttgctgagacccatctttcaaaaaattataaggcttgaggtttcgctcatttaaaaaagaaacggcctcgtttaaaataaaatgtgtatcacatctgaaagcaaaatgctgtggatggatctgcgatttaggattttcccaaagtcccagcatcgcctcccgcggttttcccacccagaaaaaagcaatgcgccttccggattcaaaataacagggagtaaggcccagcgtcttttcgtagaaatgaaccgatgcctccaggttttcaacaaataaatgggtttcgtaaagtccttctatcatggctgaatgttgcatatgatctatttatttctcaaagtaaatctttgcttgcgatagtgaatatcagtaacacaacaatacgcaacgcaatttagttgaacgcttgagtcaaaaatataagggagctgataaatagaaacagattatcttgccgttacccacggattattaaagttttcattcagccatttcagctggttgtaactattaacgaacttcaatctcaattcaattaacttttgttcagcctccagcaacttgttttccctggagttaataagaaataacgagctttctccgtttccaaaacgtatttcttcggcagttaacagtcgacggtaattgataatgttttgttgcgcaatatcaatttggttgcgataattgatcacttcatttcgataggcgattattttagtagtaagctcttgctgcttatagtcagtatccagctggttttgctcaatttttgatttagcgatccggtaatcagcccgggcttctctcagtaaaagagggatttccagcttcaatccatattgatagttgttttgaaacaaaggaaaataatccgctctatactgctctttgttgaaaaagttataagtaaagtcaagctttggcaataagctttgttgtttcagccggcgttcactttccaatatgcgttgtttttgagtatagtattgaacagctgcatgctggttgattgaccggccttccaacgctgctaacagagaactgtagttttgataggagccattttcaataaggctgtcagcgggcgttatagagaaatccgggtcgtaaggttcccggtctttggtccacataaacaaagaaagttcctgtgttgcttttatgaatttaatataggcttcctgtaattgcaattcaaaactctgaagttgcgataggacttcagtagtatcaatggctgcacgctcgccatattcaagcgttttttgagtgagccttaaccgatcacgattcacggctactgtccgcgcctgaagttgatatacttcatattgcttcacccattcccagtaaatattttccgcatccagcataagctggttggttaaaacctgttgttctgcctctgtcatttggaggccgaagcgagcctggtctaacaatgctcttcgcttatcatacaacaggtttttcgccagtggcagggtaatacccaactggaacaatcctcccctggtagcactgttgttaagtttctgcccgtcgatataattgtaattcccgttcagctctatgccgtaccaggtgggtattccgagttcaacatgggtttctttataatagtttaaaccatcaatggttttagcgccattcttcgcgcttgccagcgggtcaaaattaccccgggctttctgtatttcgtcggcggcaatgcggttttgtagctggtagcgaaacgccaatgggtgataatttttcactattgccaggaactcatcatgcgccaggcgtaatgtgtcctgcccaaaactgaagccagacaaaaacactgtaatgataaatagcaatattctatttagatttttcattaccactcgtcggtttttcatttttaactgtgtagtaatctggcgggaacccgttgatgtttcgccaaagctcataccataccggtacatcattcaatatggcgatgccttgtacacctgcgcccatttttaactggggtggccagggctttttccctttatcttctatggccaacgccctgaaaagcccgttagcgctaatattgctttcaaccgcaattacttttcctctgaagataccataactcgtattgggccaacccgaaaacacaatagccgggaacccatcaaaaacaaacattaccgattggcctgctttaaccagtggcaggtctacaggcttgatgtagatctccaccgcataatcaacattacccggaacgatagagccgatgctttcaccatcttttaatatttcgccaatacctgccttgtttaattgcacgatctgtccatcctgtgcggcaatcacggcatacaggccaaggcgaattttataattagatacctggttctgcaacttggcgatatcaccttcactgctttcaatttgtcccttgctttgaaacaactccccctgtgttttattgagcttttcagaataatcctgcactgtagcgctttgttccaggttcaccgtaatgatttcctgccgggtttgtgccagcttgttttgcgcagccgtctttttagcagttgcattctgataggtaatgcttctttgctgtaactgcgttaacgaaaccagtccctcatcatacattttcttttgccgctggtactggtcagtggtaagttccagctcattattggcagcttcgagttccgcttcttcagcagccagtttattgttcaattggccaagcttcactttaagctgctccagtttcaggtccctgccgctggccagcgcactcagttgggcatcggtcgtatttaccttggcctcataataattccttactccctgcttggcttttacctgctcttctgtacggtctatcaacaagggatccatatagtcttctttgacctctgttagttgtagtatcgtatcgcccttcttcacaaagtcgccattctttacatgccatctggcaatacggcccggtatgggcgagtttaactgctgggggcgctgttcttgcagcagcgaggttacatt

SEQ ID NO: 1224 - DNA, 24323 bp, synthetic construct
  source 1..24323: mol_type = other DNA
  misc_feature 1..24323: note = Synthetic
ataaccacgacggtttcaccgatgtcacacttcaagatcgcatttcggttttcaataaatggacgttgcaaagacctgaaaacaaaacagcaagtttggctttgcgctatttgtatgaggatcgctggggcggtgaaacaaattggaaaaggaaacttcatcgtggaggcgaagaagtatatggcgaaagtattatgacaaaccgggtagaagcaattgggatgtatcaatggccaaccaaagaaaaaatattttcacaattttcttacaactggcatcagcagaattctttttacggccccgaatcttatcaggccaaacaacaagttgttttcggacaaacctattgggacaaaaccatcaatcaacacagtttactcttgggtgcatcctacaaatacacctattatgacgatgatacacgtggaaccggttggtatgatgagcacgataatctcctaaaaaacaacccaaataaaaccccgattttcggaatttttatacaagatgaatggactttgaaccctgaaaataaattgcttttaggttatcggtatgattatgatcaaacccacaaaagtattcattctccgcgagtggcttataaattctcacccaatccacaccacactttgcgcgcgagttttggtacaggattccgtgttgtcaacgtcttcacagaagatcaccgagcattaacaggcgcaagaactgtggtttttgagaacgaactgaaacctgaaaaatcatacaatgggaacctaaattatgtattcaaactaccgacaaattttgccggattgaattttgatttaactgctttctattcatatttcaccaataaaattattgccgataccgacaccgatcagacaaaaattatatacgataatttagacggacatgctatctcgcaaggtatttctctgaatgttgaagcagccttcgaatttcccctcaaattaatgcttggcggaacttacatggatgtttttgccaaagaagaaggtgaaaaagaagtacaatatcatgcgccaaaatggtcgggaaatttcttggcttcttacactttccgaaaaggattttcagttgatttcaccggtgttttcaatggtccgatgagattacctcgtgtagaaaatgattatagacccgaatattctcctagcacgttgatagctaatttacagattaccaaaaaaatggcttcaggcttagaaatttatttcggagctaaaaacctcttcaatgtattaccgaaaaatgatgcgattgctcgttggtgggatccattcggtgaacccggaaatggggtaactcctcctccaggcagaaccgatgtcatcttcgaaccgaacgattatagctatacaccaatgcaaggaattagaggctttgcaggaattcgttataccatattttagttattttgtaggatgaaaaacatcactttcctcattactctatttgggatgatttgggcaaatgcacaacaggatttagcacaattgaacgctgcctttgctcaaaatcctaaacctattctaatcgaatttacaactgattggtgcggatactgtttgttgcaaaacaaaaaaatccatcaagaccaaaaattattggctattttagaaaacgatttttatttcatcgaattggatgccgaaagcgataaatcctatcattttctacaaagagaatttctaccaaacccagattttcctcatcaaaaaacacatactttggtagaagcttttgtacaagaaaacgaaacagtcgcttatcctttttgggttttattatccacagatttaatgatcgaatggagttattcgggctatattgcaccaaataatttgtctaaaatgctaaatatcaacacgaaagattaatatcatttcaatataaaatatttttttggaacggaatttgaatttaacatcaataataaaaatgttgtgagaaacttttttatatttgattaagaaaaaataaactgatgaagaaattattaatcgttgcgggatttgctttgggtattgccaacgtttctgcgcaacaaataggcttagccagcgaaaatgtagaattagggaatgtagcggtaggatctaaaactaatgctgtcatggtcattaaaaacgaagggagcaaaccattaattatccaaaaagtacaaccttcttgtggatgcaccgtcccttctttccctacagaacctattgcaccaggaaaaacaggagaaataaaaatacaatatgcagcaggaaatgtagaaggggattttagcaaaacagtgaccatttatagtaatgatgaaaaatctccaagaaaaattttccgtgtaaaaggaaaaacagtgaaataatttttcatattttacagaaaaccataccaatcctaccgtccagaaaaatggtaggatttttttaattataatatatgcatagagttttcgatttatgacaaggaaagttgcgctgtgggtactggctattttcattacgatcttactactttttgctgcttatcgactgataaaaaatccggtatacttgaaaaataaagaacttacgacatttgataaacgcaatatagagttgatgaaaaatcatcgagacaaatgttttggaatagatatttctcaatatcaaggtgaaattcattggaaatcagtagaaaaaattaaccatctctaccctataaactttgtagtagtccgtgcctcaatgggaaaagatggagccgataaaaagtttacttccaactggaagaaagcaaaacaaaaaaatctcattcgtggtgcatatcattattatcgaccagacgaagaatcagaattgcaagcacttaattttattgcaaaagttagtctttcacccggagatttaccgccagttcttgatatagaagaataccctactattcagacaaaagaaaacttaatcaaaggactgaaaaattggctaaagattatcgaagagtattacgacgtgaaaccaatcatttattcgtatgataaatattatgaacacatcctaaatgagcattttagcgattatcctctttggattgcgaactataattttgatgtaactcaacccaaagaaaaatggcttttttggcaattctccgaaaatggctctgtaaaaggaataaaaggcactgtagatcttaacattttcaatggaaatgtattcgacctgcaaaaccttacgactaaaaaaatggtgtattaaaataatactattaccaatctattacaaccacatcatcacatcgcacaaaccatcatcgagatttgattactttttctatccctatctttttcgggaaataacaatttatagcgtttacaaataatgataaataactaataatgcataaaatatactaaacaacgaaaaaagaaatacgcttctctaggattaaatcttcaaatcggattttgatattttttagtaatttcacattctaaagaattactaaacttgttttccatcctatggaaaagtcaatataataaccaaataaattataaataaaacaccatgttgaatactaaaaaagccttgattactggaggcagcagaggtttggggaaagcaattgctttggcctttgcaaaagaaggaatagatgtagcaattacaggaagaaacaaagacctactgaaaaaagtagtaacagaattgcaagaacttggcgtacgagcaacctatgcaatttttgacattaaaaatcgtgaagaagtacactcttcacttacgaaattaactgaagattttgggccattcgatattctagtgaataatgcaggaatttctaaatttggtactttactagaaatggaagaaagtgattgggaaaatattttactcaccaacgtactcggaatgtactatgtaacacgtgaaattctcccgcaaatgatcgagaaaaatgaaggagatattttcaacgtgtcgtcgactgctggcttggctggcaacccaacaacatcggcatattcggcttctaaatttgcggtaataggaatgaacgaatctttgatgaaagaagtacggaaaaacaatatccgcgttacaaccctcactccatctacaattgcctctgatatgagcaaacaattgggtctaaccgacggtaacccagagagtgttttacagccagaagattttgccgaattaattgttgcaaccctaaaacttcctagaagagcattactaaaatctgcttctttgtggagtacaaacccttgatgaaacaaaaaaacatcttcaaatgaagatgtttttttatataataaagaaaattctttctaccaattgattttctctttattatgtttctctaaataggaattggtttgagagaaatgatgattgccgaaccattttccttgattagcactcatcggtgatggatgtccagacttgagaattaaatgcttagaagtatcgattaatttttctttcttatgtgcatgattcccccaaagcaaaaaaacaacatgttctttttgatccgaaattgtttgtataatcgtttgggtaaaagtttcccagcccttatttttatggctacctgcagaagccttacggaccgacaaaacatcgttcaatagaaaaacaccttgtttggcccaaggtaataaatccccagaagttggcattttctttaatacatctgtttctagctctttgaaaatatttcgtaaactcggaggaatttttacagaagaattcaccgaaaaagccaaaccatttgcttgcccattaccatgataaggatcttgacctagaatcacaacctttatcgcatcgaaaggagtttgcaaaaaagcagaaaacaactcgcttttgggcggataaaccgtatgttcggcatactctctttcgataaaaacaattaaatctctgaaataatcttttttagcctcttgacgaaaaacctccaaccacttttcatcttgtatattgtcgaacatacgaattgatttttgaatcgtaaaattatcgctaattttgtacggatgcaagtaagtaaacagactttaaaagatttagaatttccggtcgtactggccgaaatcatccaatatatatataccgaaaaagttgctgaaagaacaaaaaaccttgtcccttacagtaatcggaacgagttgttgattgatttacataccactagcgaatacctatctaccctagaaagtggaaatagtttgccgttttctgaatattttattttggatgaatacctgaaacgactttcgattgaaaactattatctgcctgcagaagaatttttcaagataaaatcgaatactttacaaataaaagaaataaaaaaatacacgcgtaatttcatagagtacgttccatatttacatgcaaaaaccgaacaaattatttacgagaaagaaattgtaaaaattatcgatcaagtattcaataaattcggagaaataaaagatgatgcaagccctgagttgagaatcgttcggcaagaaattcgcgctatcagttctcgaattacagaattattcaacaaatcgatgagttatcattcggatgttttggatgaaatcagagaatctgttgtaggaaatcgccgtgttttggctgtaaaatctgctctgaggaaacgtgtaaaaggtcaatttttaggtacatcaaaaactggatctatctcttatatcgaacccgaaagcgtcctgaacccgagaagacaactcgatgaattacgcgaagaagaaaagcatctgatcatccagattttattaaaactaacatctgagattgctatatatcagccacttatagaagaatatcaagcttttctagaatatttggatcttacacaagccaaggcaaaatatgcccaaaatatacaagcaattttacccaccctgaaagaggaattacaactacaactaatcgatgcttatcatcctgttttgtatttgaataatttgcgtaaagaacgtagaacgatacctcaaacactttctctcaccaagaaacagcgcataattatcatatctggccccaatgctggagggaagtctattaccttgaaaaccgtaggactgaaccagttgatgatacaatcaggtattttgattccggttcatccgaaaagcgaagttggcttttttgataaaattttcaccgatattggtgacaatcaatctatagaaaaccatctttctacctatagttatcgactgaaacaaatggcttattttttgaaatatgccgacgaaaaatctttgttattggtggatgaatttgggacgggttctgatcctgaattgggtggcgcattggcggaagtgtttttcgaagagttttatgagagaaatgcttatggaatttttactacacattataccaacatcaaactaagtgcagaacgtctagaagaagctataaatgccagcatgctttttgataaaaaaagtttagaaccgatgtataaattagaactcggccaagccggaagttcgtttacttttgaggttgccgaaaaaaataaaattccgtatcgattaatcaaccgtgcaaaaaagaaagtagaaaatgacaaggttcgtttggataaaacgattctaaaattacaacaagaaaaattcgaaatccaaaaaaccagagatcaggttgtagaactaaaagaaacgcatgaagctcatcaaggaaagctagaagaaatgcaagataaaatccaacaaaaactctatgatttccaacagttatatgctagtgaacagaaaactctgatgatgggaaaacgcatcaatgaaatggctgattcttatctgaaaagtaaaaataaaaaacagttgataagcaatttcctcaaaataattgaaatggaaaattcgaaaaaaaccaatgaaattcaacaacaaaaaaagattgagaaaattgttgccaaagaagtacaacgcgaattaaaaagcaatgctaacgaaataaaaaaagaacaacacaaaaaagaacaacgagaaaaagaagcaatgcaaaagaaaattcgggaattgaaaattggcgatcgggtaaaaatcaatggatcgtcaagcgttgggacgattgataaaataaaggatgatattatttttattaactatggagttttcacaacgaaaatatctgtagacgaggtttataagatataattttttctttgtttttttattttaacaacaatcgaatgtgttatcatgtaaaagtgaataaaacgaaaaaggaattggaaaacaatactagaattcctttcctatccaaccaaaaattcgagcccaaggaacattttaacggttttgcgcatccgtatttaccgattatcaaaacaggacaagaagccatagagcttttacaatgggggcttaaaccaagttgggcacaagaagattttgacaccaacaacacactcaatgcacgtgtagaaacgctagaagaaaagccatcttttcgcgaatcatttaacaaccgttgtgttttggtggtcgatagtttttatgaatggcggcatgaagggcgaaacaaaataagatacgaaattggacacgataatgagcttctatttttggcagccttataccaaaatgatacattttctgttgtaactaccgaagctttaggagtgatgaaatacatccacaatcgtaaacaaagaatgccaattgcatttgactctttgcctagttgtgagcaatggttgcatggagaagattttgttccgtttatcgatttttctacgcaaagagaagacaaccaaattcgtttattttaaaattgtaccactctcctactctttttcacggtaatttataacctctatggttcttattcttctctactcctatttgttcgaactagagaggttgattggtttttagtgatgtgaattaacgcatacttatttcagctaaaacttatttccggaaacgtttcagttctcgaatgatcgtcgaaaccactcccaaacaaaccactacgtcttctggttgaataatgagagaatctttgaagtctggattcagcgcatagaacatttttttatttgcatcccatctttttagagtgaagtctgaattattgatcgacaccacagcatcatcaccatgcatcaactgataatctgatcggttgaccaaaacatcgttcatttggtaatgaggatacatcgaaagaccgcctacacgaaccaaaaaggtgctttctggtttgctaagaaaacgttcgtctaaagagattctttcttgtcggaaatcttctgcaggcgaaggaaagcccgccgacacatcaccataataatgggcataataccgagtgtttactttttctattgttaaaaattcgagttcattaccgaactgtatatcttggattaatttcattgtaccgttaatatttcttgccaatttgtggtataattaggcgaaagcctttcttgtttcatcttccattttcgttgcaagtcttgtgatcctaacaacaatttgtgcccaccatatcgtgcatttattttatccattacttgcatcaaagctttatgcttggtcgattcttcatagaaaatattcagctgtgtctgatggttgggcgtaattccagaaacaataactcctgcttttttataggccggaaccttcccttctgacggaactaatttatcgagcaaaaacaaagctgttttggataaaacgatactcgaactagaatcggattctaaagttgtactcaaggttgcagaaacaaagggcaaatgctcatcaaaacgattggtcatcacaaataccgtaatcatcttacaattagattgttcttgccgtaacttttctgcacaagaaatggcaaaagttgctacccgttctttgagctcatcgtaattatctattgtgtgttcgaagcttcgggtagtagcaatactttttttacgcttcacctcctccaattgcaaaacactttctcctagcaattcttttttcaggcggagttctactaccgagaaatttcgacgaatatacgcatcatccaaccgagaaaaatcataggcagttctacaaccaatatagttgagtcgtctagaaagttggtgtccaattccccaaatatcttcacatttcagccatttcaaagctttattttttttgatttctgtatcgatgatatacactccttggtgatgattcggaaatttttttgctattctatttgctgcttttgccaacgtcttggtaggtgcaataccgacacagaccgggagttttgtcaattgaaaaattgtatcttttatttgttgtccatacttttctagatcaatcgaatcgaaaccctttaaacacaaaaaagactcatcaatagaatagacttctacagcaggacaaaatgtttgtagaatcttcactactcgattactcatatcggcgtacaaaacatagttagaagaaaaaacatgtactttgtgaagccggaaaaaaccatcgtattcaaaagctggcgcccccataggtatacccagtgcttttgcttcgtcggatcttgctattacacaaccatcgttattagacaaaacaacaattggtttgcctcttagtttcggattgaagattcgttcgcaagaagcataaaaattattacaatcaatcaacgcatacatattacaaatctgaaaaatctaaacgctataaggtgtcgcggtaattgttaaaataaaatttgaagtagagaaaaaaaactgattctaaataaaaggtaacccaaatcttttagctcacaaggttttacggttacttattaagaggagtttgtgaaacattcggataaaaaaatgcctcctgattctggacaagaggcaacccaaatgttttcacaacggaataatccttattgtgaattcctttcgaggtaaatatattaaacatttacaaataacgaaacacttttgttaaaaaaattaactattttagactccaaacactaaatgacttatgaaaaccatattaggactagatttaggcaccaactctattggatgggcgttggttgaacaagacttcgaaaataaacaaggactgattttgggaatgggtagtcggattattcctatggatgcaggtataatagggaagtttgcagaaggaagttccatctctcaaacggctgaaagaacaggctatcgtagtatcaggagattgagagaaaggcatttacttcgtagagaacgattacaccgagtactcaatattctgaagtttttacccgaacattatgctgctgaaattgactttgagaaacgatttgggcagtttttagcggaaactgaacctaaattggcttggaaaaagaatgctgaaggtaagtttgagtttttattccaacgttcttttgatgaaatggtagctgattttaaagccaatggacaggatattaaaattccttatgattggacaatttattatctccggaaaaaagcgttgactcaaaaaatttctcctcaagaactggcctggattattcttaactttaatcagaaaagagggtattaccagttaagaggagaagaagaggaagaaaatcctaacaaaaaggtcgaattctactcgttgaaaattgtggatgttgtagcagacgaacaacccaataaaaaaggtgatacctggtattctttacaccttgaaaacggttgggtttatagacgttcgagcaaaatccctctttatgattggaaagataaggtgagagattttatcgtaactaccgatattaacgaagatggctcagaaaagttggataaagacggagaggtaaaaagaagttttcgtgctccaaaggaagacgattggactttgataaagaagaaaactgaacaagaaattgaacaattcaatcagaccgtaggtagctatatctatgaagccttattagataaccctactcaaaaaataagaggaaagttagttcgtaccattgaaagaaagttttataaatcagagttaaagaaaattttagaaaaacaaatagaactacaaccagaactgtttacggaagatttatataatgcgtgtgcacgtgagttatatcgcagaaatgtagcgcaccaacagcagttaagtagtcgagatttcgtgtatctttttctaaacgatattattttctaccaacgtccgctaagaagtcagaaatcattgatttccaattgttctttagaatttcgaacaataaaagataaagacggtaatggccaaattatttatctaaaggcaattccaaaatccaacccatattatcaagagtttagagtttggcaatggttgtataatttgaaaatttttaccaaagaggacgataaagatgttacgaatcaatttataaataaagtcgaagatttagaggctctttttgagtttctgatgaaccaaaaagaagtcaatcacaccgatattctaacttatctcatcgaaccaattgtaaaatcgaagtatccaaatgcaaagggtaaagcatttaaagatgaactaaaaaaagaattaaagaaataccgttggaattatgtttatgatgctgataaagatgagtcgaagtcttacccgatgaatgaaaccaggtatgaactcagaaaaagattggataaagtagagaatgttcctgctgattttatgacaagaaaaattgaacaacatttatggcacattatttattcggttaccgataaaatcgagtttgaaaaagcactaaaatcttttgcaaataaatatgatttacatcaggagtctttcgtagaaaacttcaagcgtttcaaaccttttgatagtgattatggaacttattctgaaaaagctatcaaaaaactattgcctttgatgagagttggaaagtactggagttgggatatcattgatgacaaaacgaaaaccagaattggtaaaattattacaggagaatatgatgaaacaataaaaaatagagttcgagaaaaagcgattgatttaactgaagaaaatcattttcaaggtttgcaattgtggttggcacaatacattgtttacgaccgacattccgaagctgacatcgctggaaaatggaattcagttgccgatttagaacaatatttgtctgaatttaaacaacattctttgcggaatcctattgtggaacaggtcattaccgaaacacttcgagtagtaagggatatttggaaacaatatggaaaaggcgctaaagattatttcgatgaaattcatatcgaattgggacgtgaaatgaaaaatacggcagaggaacgcaaacgcttatccagcattatttcagaaaacgaaacgaccaatctccgcatcagagctatactcgaagaattgatgtatgatgaaaatatggaaaacgtgcgcccttattcgccaatgcaacaagaagccttaaaaatctatgaagatggtgtactaagttcaagtgtagaaatcccagaggatatcgaaaaaatcagtaagaaatccgagccaacaaagtcagaaattcaacgatacaaattgtggttagaacaaaaatatcgttccccttatacaggaagaccgattccattgagtaagttgtttacacctgcttatcaaatagagcacattatcccacaggcaaggttttttgatgatggcttttccaataaagtgatttgtgaatctgaagtcaacgcactaaaggataagatgctgggactagagtttattcaaaattattatggccaaaaagtcactaccagttttggagaagtgacaatacttacagaagatgcctacaaagcatttgtgaaagaacactacgacaagaaccgaagcaaacgcaacaaacttttgttggaagaaattccagaaaaaatgatagatcgacaaatgaatgacacaaggtatatcagtaaatatatctccaaagtattgtcaaatcttgttagaggtgaaaaggacgatgaaggagtaaattctaaaaacatcattcctggtaatggaaaaataactggaatattaaaacaagattgggggttaaatgatgtttggaatgacttaatattacctcgatttgagcggatgaatcaattaaccaactccactgattttacagcttggaacgaaaaacatcaaaaatttttaccatcagttccactagagctatcaaaaggttttcaaaagaaacggattgatcacagacatcacgctttagacgcgttaattatcgcttgtgctacacgcgatcacgtcaatttgttgaataataaacacgctaaatcaagaaacgagcgctacgatctacaacataagctgcgccacaccacgccttggcaagacaaggaaggaaaggttagaactaaattcacagagtttaaaaaaccatgggaaacctttactcaggacacaaaaaaagaattggaaaaaattgtcgtaaactttaaacagaacttacgtgttatcaacaaagcaaccaattattatgaaaagattgttgacggtaaaaaagtaatgttcaaacaagaaggggtgaattgggcaattcgtaaaccaatgcataaagaaacggtttcaggaaaaattgatttacccagagtaaaggtgtccaaaggcaaaatattgactgcgaccagaaaatcactggatacatcttttaatgctaaaacaattttatccattaccgatacgggaattcagaaaattttgttgaattatttaaaagcaaaaggaaatcctgaattggcgttttctccagagggtattgaagagatgaatcaaaacatttcattatataatgatgggaaaccacatcaacctattttaaaagttcgtgtattcgaacagggaagtaaattcccattgggagaaacgggtaacaaaaccacaaaatatgtggaagctgccaaaggaactaatctcttttttggagtatatgaagataatcaaggaaaaagaagttatgataccattcctttgaatattgttatagaacgacaaaaacaaggcttaaattctgtgccagaaacgaatgaaaaaggtcatcgcttattgtttagtttgtcgccaaacgatttggtttatgtgccgatcgaaggagaggtttttgatgaaactaatcctgatgtaaatagaatttataaagtagtgagcttcagtggaagtcaaatgttttgtgtaaggcaagatgtagctacatcgattgtatataaactagaattttcctctctaaacaaaatggaaagaactatagatggtataatgataaaagaaatttgtatcaaactcaaagtcgaccgtttaggtaacatttcaaaagcttaacccatgctcaaacgtaccatatacataggcaatccggcttatttgaagttcaaggatcatcaactaaaaatagaagatcccgaaaccaagcaagaaaaggcctctataccgatagaagatttaggttttttggtcctcgatcattatcaaatcaccatcagtcaaccactcatcgtagctttgcagcaaaacaatgtagccattatcagttgcgatgagagtcatttgcctttaggtctaatgttgccaataagtggacatgtagaacatagcgaacgattgaagcatcaggtcaatatttcagaacccttgcgaaaacaattatggaaacaaaccgtagaagcgaaaatttttcaacaaaaagaagtgttgcggctgaacaatttaccacacgaccgtatgattacgtatatgaattcggtaaaatctggcgatagtaccaatatggaaggcattgctgcacaatattattggtctaccttgtttgatgattttattcgcgatcgaaaaggtgatgcacccaataatttcctcaattttggctacgctgttttacgaagtatggtggctagagcaattgtctgtagtggattgcatccaaccataggcatcttccacaaaaacaaatacaatgcctactgtttagccgatgatctgatggaaccttaccgtccgtatgttgatcttttggtggtcgaatggatgcaaaaacctttttcaccctaccaattggataagaatgtcaaagctcatttgctacagattgccacccgagatgtaaccatcaacggtttacaacgacctttgatgactgcccttagcattacaagtagttccttgtataaatgtttcacaggcgaaaatagagttctgagttacccgatgttatcatgagttttagtcgatataacgcctatagaattatgtgggtactcgtattctttgatctaccaaccgaaaccaaaaaacatcgagccattgcgactcgatttagaaaaaaattgttggatgatggatttaccatgtttcaattctcgatttatatccgacattgtccgagtagagaaaatgcagatgtacatataaaaagagtgaaaaaaagtttaccgccagaaggaaaagtaggaattttgtgcatcaccgacaaacaattcggacaaatggaattgtattttgcccaaaaagaaaccgatttgccccaagttccccaacaattagaattgttttaggaaataaaaaaatgcttgcagaaagaaatttcttcaagcattttttgtttttttcttttgtagatcatcttatacatcactcataatcaatcttttatataaggttgtaattctactgagtaaatctacaaaaatttgaaaggaattcacaacaccattgtgttgctcttggatatattgagcgttgtaattctactgagtaaatctacaaaaatttgaaaggaattcacaacgccaacaaaggcattaagcaaatactccacgttgtaattctactgagtaaatctacaaaaatttgaaaggaattcacaactatcaacgttcagcgttggattagaaactggttgtaattctactgagtaaatctacaaaaatttgaaaggaattcacaacgtataccacgcaagaccgaacggcaagtacgttgtaattctactgagtaaatctacaaaaatttgaaaggaattcacaacacttaccacaacctctacgtctgctataaagttgtaattctactgagtaaatctacaaaaatttgaaaggaattcacaacgacgatcgtctggatatccatattcagtgcgttgtaattctactgagtaaatctacaaaaatttgaaaggaattcacaactatagccagctataaaatcaagatctacttgttgtaattctactgagtaaatctacaaaaatttgaaaggaattcacaacaaccatcaaaacattatgcttgaattaatagttgtaattctactgagtaaatctacaaaaatttgaaaggaattcacaacgcttaaagaattttgtttgaaatgttttatgttgtaattctactgagtaaatctacaaaaatttgaaaggaattcacaacggtgggctatttcggtcaataccgaagcgagttgtaattctactgagtaaatctacaaaaatttgaaaggaattcacaacatgggcacaaggcgtccaaaccaatggcgagttgtaattctactgagtaaatctacaaaaatttgaaaggaattcacaacgatgatttataagttttctcaaaataatatgttgtaattctactgagtaaatctacaaaaatttgaaaggaattcacaacataaagtaaaacaggcatctgaatttcagagttgtaattctactgagtaaatctacaaaaatttgaaaggaattcacaacttgcatctctatctgattcatattctacatgttgtaattctactgagtaaatctacaaaaatttgaaaggaattcacaacttatcgggatcgataacgcatgatggagtagttgtaattctactgagtaaatctacaaaaatttgaaaggaattcacaacgacttccaccctcttagcttgttataaacagttgtaattctactgagtaaatctacaaaaatttgaaaggaattcacaacgtatcgatgacttcaccgacgcccgtttccgttgtaattctactgagtaaatctacaaaaatttgaaaggaattcacaacttgagagattagataaatttatgaaatacagttgtaattctactgagtaaatctacaaaaatttgaaaggaattcacaacatgaagcaccgaactcggcattgcacaaaggttgtaattctactgagtaaatctacaaaaatttgaaaggaattcacaacataaatcaattacactcatcttattttgttgttgtaattctactgagtaaatctacaaaaatttgaatcaagcgaagcgtatcatcgaatccaaaacaaaataataacgatgagataacgccaactaagatccagcatctggctcagccaatgcacatctaaaacaatatatgaaaacgacaagtaaaaagagatacttgccgtttccacccataactttaacaacctatgaaactaaaattttatttagctatttcttttttttcttctattcggtaagttgtactattagagtaagtgcgtccgaacatatccaaaactcttacctctatactatgttctcctatccctaaattatttggtaattttttttgccataagtgagaactcttgatcggattcgaaggtcttctgcctgtaagtaattcttgagaaatatcccatcgctgaacttgatgataaaacgtaggatcttcttgcagagttttttccattttttgccattttccattcccaaaacgtatttctacttgatctttttcgcttcccatgaaaatattggcaactacataagatgtattccatcctttgttggcgataacgttgggtgcatatatctccattttataatcaagcggcttacttgcaaccttgtaatccaattcgtattgattgtctttaaccgtgagataagcatatcctctaggcgtaccatctctcatcgtagatacaggaacacccaacgcatttagctcgccagagtaccaatcaccagaggtggtacccacattatattcgtgcaatggttttgcaccctcccaacctttatccttgccataaaattggtgcatctgataatgtgtatgtgcagacatcattaacacgttcgggaaatcttttaggatagcaagcaattgttggcgactttctttatcgaaatgatcttctccttctataaaaatcgggatatgaaaagacaaaacgattagtttatttttaggaacaaatttcagatcattttttataaattctagttgatcttgtctgaaacctcctaaatacccttttcctcctctaggattaggatataaaatattatcaagaataagaaaatgggcattgccgtaattgaaagcgtacgtactaggtccaaaatttttctcaaaagtttcatctgaatactcatcaatcgttgcctcgaaattcatatcatggttaccaattacattgtaccatggtaaagacagagcactcattatttttttatatttcggctgtagagaaagatcatcgcctaccaaatcccccaaacttatcccaaaagaaacattttctttatgttgcatagcatcgtcgacaatggctttgcgaaagaaagttaattcttcttcggtatatgcttgcggatcaccaaaaacaaaggctgtgaaagtagagctttctttttctggtaggagtggaaaatctacagattttggtaactttttggtcggctctacccctgcatatttaaaattttttggggaaccttttggtttatgggtatgatagaactttggcgtaaagtaagtatctaatggagttttataatgacttggcttgataacaaacacttgattatcatcatttactgtaagcgtataacgtcctttagaatcggtaagaaccacatctatcccattagaaacggcaacattctctatacctttttcttttttgtctagacggccgttattattacgatcttcgaaaactattccctttacaatttgttgtgcattagcctgaaggttgacgattacagcaatgctaaaaattatttttttcatgtttttttgttttattttgtttgccaccaaacttttgtattaatattatcaccgcccatcgctgcaacagctttatcgtagttttctttattgtagattttcaccgaactagggtacaacaacctcgacggtactactccatcatttttgccagcaggaatttttggtaaattcggatagccagttcttctatactcgaaccattgttgataatctacaaagtataaagataaatatttctgaagcataattcgctctagagttccgtcgtatcgagttgcatcactatcgaaataatctataggaatttcctcttctgtaaggtattctattgctgccttcactccgttttggtaatgtttttctgcatcacttgtgtagcctttataagccaattctgcttggataaactcgatttcagaataggtgaataatgtaattttcattggtgcttctgcttgtattcttagcaagccagagggcgaaaagtcaaaagcttctgaaccatcgtatcctgcaggaatccctttgtaaccgatagaattattatcgccaagagattttgcttgagtagcaattttaagaattcttgggtcttttgattctactaattgatcgataaaaaactctgccattgctcttccgttattaaaatcttgtggtcgagcccacggcgaaacattcggtgaaatgccagtaacttgcaaaactgcgttatcgagattagaagtcattatcggatatttttctggattgctgagcatgttcaccattttaggaaaagcattcatttcggatttatccgacacgcgcaacaataaacgcaaatgcaaagagttcgtgaatttttgccattttgtgatatcattcccaaataacagatcggctacatacggcaaaggtattttatgatcatagagagaatttgctctttctaagtctgctaaaagtgtttgatagatttctttctgcgaatcgaatttcgcttgactaatgccttcttctgctcgaaaagcctcggaaaaaggtacatcaccaaatatatccgtcagattagcaaaagcataagcacgtaaggttaaagaaatggcttcataattagattgtttgagttctttacttctaaccaacatttcattgatattggtcaaccaacgataagccgcattccagctagaattcccagttctatccgttatatcataccgatgcacacctcctgcggttacatctgggaaaggaacgtgcacttgcatcaatgcactggtaatatcatagtttttgatggcattattactggccaaattatacagtacgggattgattaacgagccaggagtaacttctgataccaaattgggattgatattggtttgatcaaaatcttctgtacaagcaataggcccagaacaaagaagagaaaataaagatatttttacgaaaagatttttcatttttaatagaattgataagtttttacaaagatgcttttaaggtaaatccgatagatgcggtagaaggcatttgccccatttctacacctggtataatagtagaaccttctattgatgcagtctctggatcatacaacgggaagtctgaccaaacggctaaatttttcccaaataccgataaactcagattatccaaaccagttttctctatcagttttttaggtaaattgtaggtaaaattcacttcgcgcagttttaggtaagatgcatcaaatgagttggattctacattggcacgacgatagtatttcgcataataatcggtaatcttcacttgctcggtgttgggtgaatagctcccatctgggttttgcacaactccttcaccaacaataaatcctgtatctcgacctggcaaggtagcttttagttttccttgttccatcattttatgatgcgattgtgagtaaacaattccaccgtattgaccgtctaatgttacacttaaacttagatttttatacttgaaagaattcgttaatcctgcgcgccattttggtgctgcatctcctatatattgtatttcggtaggataagccggtactccattttcatagacaatgtttccttgattatcacggacaaaaccgtatccataaagcgctgttgttgtacccccaactttcccaattacacttacagtaccagaagaagccaatggtttctcctctacaccatctgtaagtgcaatgattctattttcattgatagcccagtttccgattagttgccacgtaaaatctgttgtacggattggtttgagatttagcataacttctataccacgatttcgcacttctcctccattgataatagcagaggtataaccggtaacttgatcagtaggtacttcgataatttgatttcttgtgttggtttgatagagcgttacatctatcccaacccttttacgaaacatcatcaactctattccggtttcccaacttttagatatttctggtttcaggtctaaattgtgtaatttgcttggtgtagttgaagacccaggaaagtcattagcattatagtatttacttgtactatacggttctgcatcgtttcctacttgtgcaaaagataatctatattttagataatcaattggttttgataatctaaaaatatctgataagataaagctagatgatactgatgggtagaaataagaacgattgtttttgggtaatgtactcgaccaatcgtttcgggctgtaatatctataaatacctgatctctaaatcctagggatatcaacccatataaactattgacttttatatacttatcatatgtttttacgatagggctattcatcccgttagacaacatatagacattggggattactaattcgtctacttgtgcatctttgcgtaagtattgataatctcttttattcccaccaaaattcatgctcatagagaaatcctcacctatataatcttggtaggataagagaaagtcggtgttgatttctcttttttggatatcttgccttttataatgtccattcaaccaacgattcatatcatgtggtcggttttgttgtcttatttggttatacatattaacgcccgagcgcaacatgaaatttagcttcgaggtaagttgaatatttgcctggatgtttcctgtaatttgattactctgcaatggattggtagcatcataagctataacgtagggattatctatataagaactatacggctgtatctggcttagatattcttgccctgcataccagcgatctctgtaccaatctaagcttacatttgggttctgaaaaatcatgaaataagctatagaaccgttattataacctgttcccggaatgttatcgctaactttattggtgtaattgacaactgacgttaattttatcctttccgatacattataatttgcattgatggatgcagtataactatcgaaccctgtattgggcataatccaactatttttcacatgtccaaaagatgctctcatcgccccttcttttccgctaccagaaatcgatacattattggtaaaagttataccagtattccaaaacgcttttctattgtctttataaggtctccaaagtgttctctcttcgccttgtccttgcaagaaaggatcatattggtagtaaaattgtccgtcgaatttgggtccgaaagcactacttgttgcactggtagagttaccatcagaagaattaccataggaataataaaactcaccttttttgtttttttgcaaagttccttgcccatattcgtactgataatctggccatcgattaattacatctaccataagagaagagcgaaaatcgactccgatttttttatttttatttcccgactttgtcgtaatcataatggctccattggctgcacgagaaccgtatagagcagctgcagaaggccctttaagaaccgtaacactctcaatatcatttgggttgaggtctgaaattgcgtttccaaaatcgataggcgaatctgctcccatgtaagaagaattattaccagaagatgtcatttcgggattcatgggtacaccatcgattacaatgagtgcgtagtttttatgcaattcggtagagttatttcctcgcaaaacaatattttgtgagttgatgggtccagagccagccgaaatgatatttagacctgctacttttcctttcaatccatctgaccagttattgttttctgcattatttagcgactcagaatcaatagtttgctgtgcaaaccccaactttttttcttctcttttaattcccaaagccgtcactacagcggcctctaaaccgatactttggttaagttttactgacaaagaattattatctcctgcatttactttataattatcgatataatacgattcatgatgcaaatgatctatttctatatcatatttttcatcggataataatccactcacctcaaaaatcccattgctgttggtcgttgtagaaaacgaaatagatgtatccgaatcagaagtaatgtgtacacttgctcccgaaacaggtttccctttctcgtcttgtacaattcccttgattttagagttttcttgagccaccatttgaacggcagcaaaacacaaggataataatgttaaataacgtttcatttgtatgaataattttagttttttgatgtttaattttgagctatagttgttgcctccaaacaactcaacatgctgtctagaaatgcattaatcctatattttatttgttatttttctatataaacttgtttatcaattgcctgatattgcaagtcattcaattggcaaataatctcgatgatttgttgataattatctgttgatttgaatcgtcccgtaaatgtcaattcttttgggatattggtggtgtgaattttggtttgataagttttttctattttatcaaaaacatctatcaaaggtgttttatcaaaaattatttcgtctgttatctcattattcttttcggtttcgggtatctctggcaacgtaattatttctgttttctcggtatatttcttggttgaaacagtttttggtttgcttattttttggttggtgatctgcacctgattattctctaaatctaaccagaaattctctcctgcattcaaaaaaacagattcaaaagctgcttttttctggctatcaatcctcacctttccttctagcagttgtacagaagcctgattgttttttatattttcggttacgataaattctgtacctagtgccg

SEQ ID NO: 1225 - DNA, 24323 bp, synthetic construct
  source 1..24323: mol_type = other DNA
  misc_feature 1..24323: note = Synthetic
ttaattgtcgtatcatctgtaccgaataaaaattcaggtaattcaggataaaaaagcatcaatgcagctgtaagccccagcagaaatcctacaagtccgaatgcaatagtcgcatagaggaatgctctgacaatattattgtcataattaaatttttgcgtctccataaattccaatagtgtttaccgaagtgatattttctctgaaaaaaggcttattttttgactcttttctatgttgaaaataaatatcatgtaacgtgtataatgttttgccaaaggtatttattaactttgttagaggctattagataatcttctaaaatataccgaaaactactaaaacaaaaaggatgaaagtgtgtggacaaaatatcaggaaaattcgcaggagtaaagaccttacgcaggaatacatggcttttgaaatgggaatctcccagaaagcttattccgatattgagaattccaaagtaaagatcaatctggagattctgacgaaaatatcaactattttagagatcaagccttccgatatctgcagcatttcgcataaatgtggaatagatacatatgaagataaatatcaggaccttttggaatatatgaaaaaaaataatatttcaattccggaagagtttttataagtttcaaactttgcatttttagtcattatagaacaatgatctccttcagctattgaaagagatcatattttttgtcaaaaaaggactgtgtttctagtatgcctgaagatcatggcattgatggggaacaagtattgattttcaaatttatcataatcaatatgttatttataaataattatgtagaaaaaaattcacataattgtggataaatatttacaatatatttaatattctataatatatttgtcataaatataatgcgggctcactgaatgaagcttctttactttatttcactcttcttttttttatgtatccaagggcaagtctatactacccaatggtataacatggataatggtctgcctcaaaacagcatcaaggacattgtaaaagataaatacggtttcatttggctttctatggaaggccgggttttacgatatgacggaaataattttgtagaatacaaaaattttaagcttaaaaatttaagctttggtgatttctccggaagcatacaaaaagacagcatttgtgtttttaatacttctgaaaaagatgttttgctgatttcccggagaagacccaatattatatcttccgggccaatgttgaattccgaaagttcagcaggaaataaaatatacaagcagcttttcaaaaataatttcactgtacgatatgtttcgcttataaattcattttttatctgtttaaatacaggttcctattattttgaaaacaacacaatattgtatgtcgataataaaaataaaaacagaataccaattgatctgaaatttccacgcagcagattaaggcggctatttgttcatggagattatgcctttgtcgctgatgttaaaaataaaaaggtgcttcagctgtatcggggaaaatattcttatctcaatgcaccatcggtttatactgatccggaaactaaaatctactggcagcagattaccgggcaggttttcatgatcagccatggcaaaatatacagaagtgagttttcagaaggaaagctgaagctgacttatctgttagaatataaggatattgataaggatatctcgggagctatgttttatgatgaagtgccccggaaattatacatcggaagttctattaatggactgaaaattctgagcttatcagacttctcggtttccagaaagaatcagccttatcaggatgaggtctgttatgcagcaattccttatggagatgactctgttcttacccaggaaggaatcatatattttcccggttcatcagaacgattatacagagctcctcaatcttatgataagcgatatattttagaggataacaccggaaatctggtttatcgggaaaataattctattcatataagatataagaataccggatttacaaaatatgattctatttcttttaaagggaaagaaatgaatggtttatataaaagtgcaggtttgtatatggcatcatttgtaagcggaatgcagtcttatctctatctgtttaaggaagaccattttaaagaaattgaaagaattattccttgtaaagataagatagatgccgttctccggtatgatgaaaatcttctttatctgggaagcagcggtggaatatatgtatattctcttgccgggaataaagtgataaggcttattggaaaaggccttcctgtgaaacaaatcatcaggacaagagacggaaatgtttggtttacgacttataatagaggaatttatttaataaaagaccataaagtgatcagacttccatctgataaaaatgcttttctgactaatgctcattatctgctggaagatcgaaattccaacttgtggatttcgtctgataacggactgtttaaagtcaataaaaatactcttctgcaatatatgaaagcacctaagggagttgttacttattaccgatatactaaaaaacatggtcttttaaataatgaattcaacggaagtgccaatccctgtgctcatcaactgaacgatggacagtttgtgtttccgtctatggaaggatttgtattttttaaccctgaaaagactaaaacttattaccccaaggctcaaaacctttacctggaaagagcaagagtaaaaggaaaaatgattcagctgaaagataagctatttttggaatgtggatacaaaaatgcagagctgtatatagatattccttactattccgatttggaaaatatctacctgcaggcaaaactttcagatagtaaagatagcccatggataaatatcaaaagtgataaaacattccggatggccaatatagagccaggaaattacaaccttatcgtacggtttctttcttccgatactgggaaatttatttacaaaactattcctgtagaagttgaagcccatttttatcagactcttttctttaaaattcttattgcagttattgtcattttcatcgttttaatgattatacagatcaggaccaattttttaagactgaaaaataaagtgttgaaaaatactatcgatcataaagataaacagctgctggcaacccataataagcttaaaaacgaatctgattatcaaaaaaaactgattgaaagcataagccacgatattactacacctgttaaatttattgcgcttctttcacaggagcttaaccaatctgaagatctgaaaactcagaaaaaatattttgacagtatttataaaacttctgaacagctgtataagttcaccttaagcctaaaagaatatacagaactatacaaacaggaaaatactgacgatgatgaatattccttctatgatctgatagagaccaaaagattgttgtttgaagaaattgcagctcagaaaaatacatttatatacaatttttgtgaccatcagctaaagaccgggcttaataaaaatattctccttgcagtttttcacaatattatagataatgcggtaaaaaacacctcaaatggagaaattaccattacaacaacctctgaagaatcacatatagaaatcaaaatcacggataccggtagtggaatgtctgatgagcagatgatttactattccgaactttttaagaaaaaagagaatgaacatatgacttttaaaaattatggtttgggccttcatatggttgttcagctcatgatgaagattaattctgaaatgacttttcatcaaaacaccccgaaaggaacccttattaaaatccttattaaaatatgataaaaaaaatactcatcgcagatgaccatcatgtggtaagaatcgggacagctatgatcctggagaaaaattttaattattttgaggtcgattttgccgaaacttatggagaagcaaaacagaaaattgaatctgaaaagtatgacctcatcattcttgatattgaacttccaggaagtattctcaaatctatggttaaagagataaaaagtatttctgaagaaactcttatcttaatatttacttcctacaaagaaaatattgccctgcaatatattgaagaaggagcgaatggcttcctgaataagcagagtgatccggaaatgtttgtgaaagcggttgaagctgtctttaaagatggatattattatacgccggaaattatgcatgaaatgctgaaaggaagtaaaaagaaaaaaacagtagaacatttatcagaaagagaactgcaggtttttaatcttttagctaaaggaaacggaaatcttgaaatcgcaaatgcccttaatattgaagaatctactgtagggacctacaaaagaagagtctatcagaaactgaagattaccaatctgattgaattgtttgatatctataaagaaatacattaatatttcatctgctcttgtcataaaaccactacgattttgtggaaaaatacgtacaggatctgttctttatttattcgtttttcgcagtaggttcgtattgcgaaacttccattaaataattaaaggtattggacattattccggcccttttagattctaaaaaatgtatttgtttatgaaaaaaaagatgcttttcattgccttattggcaggtttaaattgtttttctgtaaatgcccaggtaggaagtgtggggattaatactgcaaatcccggcagtaccctgactgtgaacggctcatttgcggcaacgtataaaacagttacggtaagtggtgttgtaggagccaatgattactatatcgcttataacggaactgctgatggaacgttaactttacccgcagccatcaatggagctggtaattttgcaggacgtacctatcactttaaaaatacaggcggaaaaatacttaccgtttcagccaatggttctgaactgattgatgatcagaacgggactggcctgggagttccttccattacagttcctcccggatattatgcatttctggtaagtaaaggaacaactactggtgcgacatgggagctggtattggtttcaagttcaaacagtgttccttcagcagaatctacctatcctttttcagcagtgcctactacccaaagacaaagctgtaatgcaactcctactccctctgatccatggatacagacagcaattgtttatcctcaagggaccgttattaataaaggaaatgtacttaatacctctacaggagcatttaaggcacccagtgatgggtattacgtgattcaggggtctacacaatttgataatggaagtgtagccggaaatccaaactttacatggactgttttatatcttgtaaaaaattatgttcccggtaatggaggaagtgtcttagtccaatcctatcagcctactgtaacgagagtttttggttcaagcatttcgtgcatgacttatcttagtgccggggaaaccgtaagcatggcttctgtagccggagtatctgccggtaacaagtacgaagtggtgacaagtactatgtatgggtacaaaatagcgaattaatatcatattgatactgtggaaagcggtcttaatctatcgggttaaggccgtttttgtcattatattttaaattttatcggtaaggggctaagcaggaaggggctttccggtttgaagaatcctgaattgtcaatttaccccatggaatgtgaatttctgtgaaaagtttttatatatttagcgaccgaataattcattcaatgaacaacgaaaataaaacaggagaaaaggagactttagttagaggattaacaaatcgacatatacaattaattgcccttggaggtgccattggaaccggcttatttctgggaatcggaccggctgcggtactggcaggaccatcagtaattttaggctatgctttagcaggaattattgccttttttattatgcgtcagcttggtgaaatggttgttcaggaacccgtatcaggaagttttagccactttgcctacaaatattggggaaattttccgggatttgcttccggatggaactattggattctctatatcctggtaagtatggctgaactcacggcaattgggcattatattcacttttggtggccggaaattccgctctgggtttccagtttgttcttttttattgtgatcaatgcgctgaatcttgcttccgttaaagtatacggagaaacagagttctggttttccatcatcaaagtcgtggctattattgccatgattatcttcggagtatatcttttgataagcggtacaggaggcgagaaagcaacgattaccaatttatggaacgatggcggattcttcccgaaaggattatttaataaaacagaaaacggatattcaggattatttgctgcaatggccatgattatgttctctttcggaggattggaacttatcggaattacagctgctgaagctaaaaatccggaaaaaactattccacaggctactaatcaggtgatctatagaatccttattttttatgtaggagctttggtgatcttattttcattaagtccctggagagacattacagaaggatccagcccgtttgtgatggtgtttcagaacctgaatggccttgaatttagtatttttggtaaggtgatccagttcaatacattgattgcaaatgttcttaatctgattgttttaacagcggctctatcagtatataacagtagtgtttacagtaacagcagaatgctttttggattggctcagcaggggaatgccccgaaattcctgaaaaaactgaataaaaactctgttcctattaacgctattcttatttcatcatgctttgccgggatatgtattatcattaataaactagtaccggaaaaagcttttgaatacttaatggctttagtagtatctactttgatcatcaactggctgatgatatgctacacccacctgaagtttaaaaaatcaataaatacatcaggaattcagtcaaaattcccatctatattttatccggtatccaattatatctgtattgcctttttggttctgatattaggattgatgagtattacgggaatggaaattcaggtaattctgatcccggtatggattggctttttgtttgttatgtacaaattgtacaaaccgaagtaagaatataaaaacagaattaatatgttttggaaaggtgaaaattaatgattttcaccttttttatttttatgaataaataggcttaatctgattttttgcggaaacaattcactgaatttgctatggtctacggttatttttcgtacattagtaagaggttatatttcaaattcaggtgaaattttaatctgtttgaaatgcctgcggataagccgaaaaccgttacaaaaaagtaggcaggaccaaaaaagacacctatggccaatttatttcaaacccttaccaatactgtaaaacattggtatatcccattaatcttcggaattatatttctaatctgtggtttttatgtattcagtgtaccacttgcaacgtatgttacactttctgtttttttcagtgtttcctttttgttttcaggaattacggaaatattcttttccttgcagaacattaaatctctgcaaggttggggttggtttcttgtaagtggattattaacgactgcaataggagtttatcttatcgcaaaccctcagatttcaatgactgtgcttccgtttgttataggattcactttactgtttcgttcatttcagcttctgggttttgctttcgatctgaaaagtatgagaataatgagctggggaaatgttgcccttgccagcgtcggaggaattatattttctctgttgctgatatttaatcctgtgtttacgggaatttcattagttacgcttacaggtgtttctttcatttttatgggaatagcttccattatgctggctctggatttaaggaaaattaaaaaaatcccaggaaaagtaagccaggaattaagagacagaatcaaatcgatacaggaggaaattgatgatcttaaaagataataagtaaattacttctaaataaaaagaccttgtaaaaaggtctttttattatttttaaaatggcaaaactgaattcacattattcccgttccagatataaataagattaaaaggatcagccagataaaatacatcatcaacaagaaatttatactcatgtctgcctttcaggacttcaacctccgcataccagtatcctttttgcttctcaagaacaatcggttcttttagccattgggtaaaacttccgataagttttacattgtgagcacccggccatgcattaattttaaaaataacctttcgggaatttctttttccatacaaatttgccagataatcattcggagaatcctgaagtacagaataaaagtatttctgcgattgtatagaatctcctttatattgataagcgatggcaagccagtcattaatcaatatgcttttacccgttctctttttcaggttttcaataaatgtgatggcatcatcggttttatgtgttcggagaagatctgctccaaaataaatagcatcattatttttaaaattataaatctccgatgaatttttaaataaagaattgtaaagtcgaatagtttcgtccatccctttattctgataaatggaacttaaaaggcttctgatgttttttggaaaatattcagtaatatctgaagagtgttttccttttttcagctctttagccaatttgaatctgacaggagtggtaaaatctccctttagataaagcaccatttcctgctttttcagattaatggtcattgagtagttggttataatgtcgccaggttctctttgtgcagtttctgtcagaatatgggtaatcttcttttcagtaaaagaatgagactgagccagaagatctgtggatgtttctcttctccagcaggtttcctggtgtccgttagcaatgcagtaattggtcagtgaaaaatttcgggttgttttagtaacaatataattgccgtggatggtagcataatctctggaagaatcagcaatgaataattgagctcctgaaagctttaataagttataaggagcaataagttgaagagcttcttttacacttttgcatttttttagaatatcatttactacttcctgttctctgtttattttggatgaattaacaattacgggaatatcatcaattgcggtataatctaaaaaaagaccgtgttcattcattcctccctgaggatattgccacatgacatcattatatccgtcatgtttttcagaccatagcatatatccccatgatttttcttccctgggaatataccagaatctatatttcatatcagggctttcatcctcattattgcctatccatatatttttaccgtcattggctaaaaaaatagtacaggcatttattggaatgaaagtgcttactatcaaaaggcagatatatactattttggttttcatcactttaaagataattttttttagataaatgcttgatagccttgttgttaatttttttataataaaagaagctgattacccattttaaaattttagaaagtagaatgaaaaataaaaccatccttaaaaaaggatggtttgtagtcatgaaagaacaattctcgaaccattttgttgaggatttaaataagcttaaacgtttgatgtattaaagatgataattcaaataaaaatgccccgaaggtagtcgaggctctaaatgttttcacaacggaataatccttattgtgaattgctttcaaaattattgatacaaatataaaagaaaaaaattaactgtatttatgggaatccataatttgaatattttttttattactatttttatgtggtatcaaattaatagcgatgaaaaatatacttggactggacttgggaacaaactctattgggtgggcgttggtaaaacaggattttgaaaacaaacaaggtgaaattcttggaatgggagccaggataattccgatgtctcaagatattttgggcgattttggtaaagggaattctgtttcgcaaaccgcggaacgtacaaaatatagaagtgtgagacgattacgtgaacgatttcttctacgaagggagaggcttcacagggttttaaatattttgaatttccttccagaacactatgcttcacagattgattttgaaaaacgatttgggaagttcaaagttgaaactgaaccaaaattggcatggaaaaatattgaaggacagttttcatttctgttccaaaactctttcaacgagatgcttgaagattttaaagcgaacggtcaggatttaagaataccgtacgactggacgatttattatcttcgtaaaaaagcactttatcaaaaaattgaaaaagaggagctggcctggattcttttgaattttaaccaaaaacgtggatattatcaattgcgtggggaagaagaggaagaaaatcctaataaacttgttgaattttattctttaaaagttgtagatgttcttgcagatgagccgcaaaaaagcaaatcagatatttggtattctttggttttagaaaatggatggatttacagaagggcaagcaaaatattgttgtttgattggaaagataaaacaagagattttattgtaacaactgatttgaatgatgatggaagtgttaaaacagacaaagaaggaaatgaaaaaagaagtttcagggcaccgggtgagaacgattggactttggtaaagaagaaaaccgagcaggaaatcgagcagtctcataaaaccgttggaatgtatatatacgaaacgctacttgctaatcctaaacaaaaaatcaaaggaaaattagttcgtacgattgaaagaaaattttacaaagaagagcttagacagatattagagaagcaaaaggagtttcatcaggaattacaaaatgatgacttatataatgattgtattcgtgagttgtacagaaacaatgaagctcaccaactgactttaagcaaaaaagattttatacatctttttataaaggatattgttttctaccaaagaccgttgagaagccagaagtcttctatttccaactgtactttggaattcagaaaatacaaagatgaaaatggagcagaacatacgcaatatttaaaagcaattccaaaatcgaatccatattatcaggaatttcgtctttggcaatggatttttaatcttaacctatataaaaaagataatgatgaaaacgttatcaaagaatttttaaccactacccaagatgtcgaaaatctgtttgagtttttaaacaacagaaaagaagttgatcaaaaaactttattgaaacattttaagctcaatgagaaaacacatcgctggaattttgtagaggataaaaaatacccctgcaacgaaacaaagacgatgatttcaacccgattgcagaaagtagaaaatatttccggggattttctgacgagggaaatcgaacaaaagatttggcatattatatattctgtcaatgataaaattgaatacgaaaaagccttaaaatcctttgcgttaaaacatcaacttgacaaaagttcttttttcgaggctttcagaaaatttccaccatttaaaagagaatatggttccttttcggaaaaagcaattaagaaattgttgcctttaatgcgattgggtaagtattgggattatgccaatattgataagttttcaaaagacaggattcagaaaatcattaatggagaatatgatgaaaatataaaagatagggtaagagaaaaggcggtccatcttaggagtgaagatgatttccagggtttacaattgtggctggcccaatatattgtatatggaagacattcggaagcatcaataacagggaaatggaattcagctgatgacttggaagaatttttgaaagattttaaacaccacttgcttcgcaatccaattgtagagcaggtcattacagaaactttacgtgttgtaaaagatatttggctaaaatatggaaaaggagcaaaagatttcttcaatgaaattcatatagagttgggaagggaaatgaaacttccagctgacgatagaaagaaactcacaaaccagattactgaaaacgaaaatacgaatctccgcattaaagctctattaacagaaatgatgaatgatcatgctgtagaaaatgttcgtccgttttcgccccagcaacaagaaattctgaaaatttatgaggacggcgttttaaattcaggcattgaaattgaagatgaatatttaaaaataagcaaaacggcgcaaccttctccttcagatttaaaacggtataaactttggctggaacagaaatacaaatcgccttatactgggcaaattattccattaaataaattgtttacaccagaatatgaaattgaacacattattccacaaagccgatactttgatgacagttttagtaataaaattatttgtgaatcggcggttaacaaattgaaggataattatatcggacttggatttattaagcagtttggaggaactattattgaacttggtttcgggaaaagcgtaaaggtttttgatattgatgaatatgaagattttgtcaagaagcactacgccaataaccgaagtaaaagaaataagcttctcttagaagatattcctgaaaaaatgattgaacgtcagatcaatgatactcgttatatcagtaaatatatttccggtatactttctaatattgttcgcttagaagatggttcggatgaaggagtaaattctaaaaacattgttcccggaaatggaaaaattactacccaattgaaaaaagactgggggttaaatgatgtttggaatgacttgattttaccccgttttaaaagaatgaatcagctgaccaattcgacagattttaccgcctggaacgaaaattttcaaaagtttttgccgaccgttccaattgaatattccaaaggtttttctaaaaaaagaatcgaccatcgtcatcatgctttagacgctttggtaattgcttgtgctacaaaggaccacgtaaatttattaaataatcaatcggcaaaatcggaaaccaaacgctacgatttgaaaaagaaattaatgaagtttgaaagagttgtttatctccatgtgcaaacaggggagaaaatcgaaagagaagtgccaaaacaatttttaaaaccttgggaaaattttactgtagatgttaagcataatttggacacggttattgtaagttttaagcaaaaccttagggttattaataaagcaacgaattattacgaaaaatatgtagagaaggatggtgcaagaaataagactagagtagagcaaaagggaataaattgggctattagaaaaccaatgcataaagatacggtttccggtaaagtagatttaccttgggtaaaagttccaaaaggaaaaattttaacagcgacgaggaaaagccttgatgcttcattcgatttaaaatcaattgcctccattactgatacagggattcaaaaaattctcaaaaattatttaatgcttaaagatggaaaccctgaattggctttttcacccgaaggaattgaagatttgaataaaagtattgagaagtacaatgatggcaaacctcatcaacccatcaataaagtaagggtttttgaactgggtagtaaatttcagataggacaagccggaaataaaaaagataaatacgtagaagccgcaaaaggaaccaatttgttttttgcattgtacgaagatgaaaacggcaagagaagctatgaaactattcctttgaatgaggtgattgaaaggcaaaagcacggtttacctgtggttgatttaacaagtacaaatgatttctatttatgcccgaatgatttggtttatattctatctgatgatgagcgggataatatgacaaataacgattttgaaagcctttctgacgaacaagttaaaaggatatacaaatttgttagttgtacaggaggtgaggggcattttattccttacgcaagtgcgacagaaataataaaaaatgaaaacggtacaaatagtaaaagcgagagaatgcagaatttctatgatggtagttgtatgcttgataaaaacagcaagcccattatgataaaggaaaactgtgtaaaacttaaagtcgaccgtttaggtaacatttcaaagatataattatgattactcgttcaatctacatcggtaatcccgcttatctcaagctgaaagatgaacagatgaaaattctttgtccggaaaccaaaacggaaaaggggagtgttcctgtggaagatttgggcttactgatgttggatcattatcagattactatttcgcataatcttattcagaaaatgatgggaaataacgtggtggtcatcagttgtgacgctcatcatttgccccatggaataatgcttccactgtatggtcatactgaacattccgacagggtaaaagatcagttggaagcaagtgaaccattgaaaaaacagctttggaagcaaaccgtggaatgcaaaattgaaaatcagaaaaatgttctgatgaaattggaaaactattatgaaccaatggttgaataccaaagaaatgtaaagtctggggatttaaccaatatggaaggtattgcagctcagcattactggaaatatctgatcagccttgattttttgagacagcgtttcggagaatcacccaatcagttctttaatttcgggtatgcggttcttagaagtattgtcgccagggctattgttgaaacaggattattgcctgtattggggatttttcataaaaataaatataatccttactgtcttgccgatgatataatggaaccttatcgtccgtttgttgatttactcgtgatgcaatggctgaaaattcatcctaataccgaagaactgtcgaaagaatttagggctcatattcttcagattgcaaccaaagatgtacatattgatgacaaaacaagaccgttgcttgttgctgtaaaaatgacggcttcatcgctttacaaatgctacacaggagaaaaaagattgatctcttatcctgaactgttatgaacgccgaaaggtttaacgcataccggattatgtgggttttagtattatatgatctcccgactgagaccaaagcgaatatgaaagatgctaatcgctttcggaaggcgctcattgatgatggtttcaccttgtttcagttctcaatgtatgtacgccattgtccgagccgggaaaatgctgaggttcatattaaaagagttaaatttatgcttccaaaagctgggaaagttgccattatgtgtatcacggacaaacaatttggagatattgaaatcttttttgccaggaataaagaagagccacctccaacctttcagcagcttgaattattctaaattttaaattctaaatataaaaataatctactggttttcagtagattattttttgaggctgtgactaatcacgaagataataatttttgaaagcaattcacaacgaatttctccactttgtgcatttatttgatgctgtgactaatcacgaagataataatttttgaaagcaattcacaacaaagagagatataatctattggcgttacttgctgtgactaatcacgaagataataatttttgaaagcaattcacaacatcttgttcctccttgcctttctcgtactggctgtgactaatcacgaagataataatttttgaaagcaattcacaacattgaacatcggatccgttttctccgggaggctgtgactaatcacgaagataataatttttgaaagcaattcacaacacagcttggggttttagaaaaacatgcagagctgtgactaatcacgaagataataatttttgaaagcaattcacaaccgaaatcagaagcatcttttgctaatgcacgctgtgactaatcacgaagataataatttttgaaagcaattcacaacgaaagaacatccggggaagtactgatctgagctgtgactaatcacgaagataataatttttgaaagcaattcacaacagctttactttctactttttttgtgaacgtgctgtgactaatcacgaagataataatttttgaaagcaattcacaactaatagtaaatctggattaattggttctccgctgtgactaatcacgaagataataatttttgaaagcaattcacaacggtttaacgaatgaagaatttgccaattacgctgtgactaatcacgaagataataatttttgaaagcaattcacaacctacttcatcatattcctcaatataaagatgctgtgactaatcacgaagataataatttttgaaagcaattcacaacaaaagcaaaagatactacaacatctttagagctgtgactaatcacgaagataataatttttgaaagcaattcacaactggtaaactgaacctctctctcacgtttatgctgtgactaatcacgaagataataatttttgaaagcaattcacaactggttgttaaagttgctttgttgatgtattgctgtgactaatcacgaagataataatttttgaaagcaattcacaacagccaactacgggacttgaacccgtgacctgctgtgactaatcacgaagataataatttttgaaagcaatttacaaccatttcgcttgatttaaaatttgtttagccgctgtgactaatcatgaaggtaataatttttttaagcaattcacaactgatgatgctatgaatttaatccgctgtgcgctgtgactaatcacgaagataatgatttttgaaagcagttcacaaccctccttatcaccataatcccgaaccaactactgtgactaatcacgaaggcaataatttttgaaagcaactcacaactatgcaatgtctcgtgaaagatttttaggctgttgtagctgatcggaaaaatagtaatttttgcaattcataatcgttcacccattactattgccattgttatttccaatgtagcacctttcaatttttaatacgagaaattgttttctcaaaaatataattggtttctagttatagctcaaataactattttcttagctatatccaatgatatggtttatccttacgattaatatagcagtgcatctcttcttttttaagttcggggaaaaactctatagctttatcaattgcataatttggcaggaaatggatttcgtcacgaattgctttgaatactttttcgtaagtataaaattctacaattctatcaatgtcgttttgattaccacgttcaacaatacgggcaataattgatttataggctttatctaaatccatcgcatctaaatcaaaatcccaaaaaaatgaaggatcgatatcaaagcatggtctttttttatttccttttttcatagtataaatttactgaataatagtgatatatgaaagtttagcgcttgaatctacgtaccttttgtttattattttgctctttgatttcagtaaatttcagtaatgggttatgtactgatttttttaatctctcttctatcttttgccaggttatatctttaccttttatcatcttgacttgtacattcctatcaatactgtcatgatgtagtaaacttaaggcagcaagtgagggatttcctccgtactttttttgataaaaatcaagataagtcttaagggaattgtgttccagtagaaaatgcatatcaacgaaatcttttattctgcttccatcttgaaatatagcgtgaagtttcatagcgcctatatcctcaagggatgccaacctaatgtcttcttttgttattattgtaggcaattgccattgatactgatgggcaaggatatcgaccttgatttcagatattttcaaaagtaaggtattttcaaaagtatttttaacttcaacaggatagttattcgagagatagtttaggatagacttctcattaaacggtttggttgtaaacagatcaatatcaatacttaaacgatgaccaagcattagactgagtgcggtgccacctaccaaggtaaaatcctttagtctttcctctttcatcagtttctgaagaagttcccacatttcggtactgacagtttctttatgtagcatatttcatttttcagaaaattaattctgaaagtgaggtatgcttctacaaggactttacaaggaactatttggctttgattatcaatgaaagctaaattatcaaccttttattgatggatatattaataaatggaattacaatttttgtctgttggtagttagtatctgcatactgatacagccaacttaaattttagcatagttttttcttcctaaaattctattttaagaatggatttattgtctgttaaatgcgtgcgatttcgacaactatgtggaaaagttaggagctcattcgcaactttgaaagtccttacgtcctaacaaagttgctgcttcgctctgtgagacttttttgttcagtattttgatagattttcgtttgtaaagttgttggttttgggagctgttgagaagctttattgttaaactaaactttatttttttattactgtgactttaatctacggcacttttattttaggatttctttttgtaaataagtgtacaagtttaataattcagtgctatttaaatattatactcaataaataaaaaacgacaagttctgtcgtagtgagcttttatttttgtagttcgatataacattaattggtaatacatatgttacaaaaatgaatgtaaatatggggtttttacggagtatgtgtataaattattaataatacttttatcccctcaaatatagcacaagcctatgaaaaaaaattatctctgtgtattcactttatacacagtcctgggtatctctgctcaggaagtggtatggcagaaagacatcaaatcctctacacaggattttttaagccaggtcaccacaacaatcgatcagcagtatctgatcacgggaagctcaattcagagcgataaattacaacaaaccagtaaacagaacaatggttatgatttccacctggtaaaacttaaccagcaaggggaagaggtttgggaaaaatacttctcaggacaaaatcatgattatctctctgctactgttaccacacaggatggcggatttttaatttcaggtaccacattctctgggaaggggcttgataaaaaggatgagagtaaaggtggttcagacatctggctcatccgtttgggtgaatttggtgatgagttatggcaaaaaacattaggaagctcttcagacgaagaagcaaggtcagtcattcaaactacagatttaggattctttgttgccggaaatgtacaaaacgctgcgaaaagttacggttccaaagatgttttgatcacccgacttgacaaagacggaaaagaattatcccaacttgttttaggtggccctggattagatgaagtggaaaaaatgattccaacacctgacggtggcgcactactcggaatttattccagaagtggtgccggtggttcaaaaaagacggaaaactatggagaaggagatttttgggtgataaaacttgataaaaactcgaaagtagaatgggaaaagaactttggggggaaaggtgatgaccacataagaacccttgctttaacttccgacggtttaatgatcggtggggagtccagatcggaacgatcaggaaataaaacggcaggtattaaagaaggaacagacttatggcttatttctttaaatgaaaaaggtgatgaacagtggcaaaagtcttacaacttcggtaatcgtgatgtcctgatgggaatgagcgcaattcattccgcagatgacaaatcttctaaaggaattctattaggaggttacactcaggctgaaggaagaatacagactgatgatgagactttttggctgctttatattgatcagttagggaacgaatcatggagaaaatatatcaccggagaatccagaaagaaggaagaaaggctttctgatttaaaactgaacagagatggctcaattattcttgcaggaaccagtgccacagaattaggtaaagaaaactggaagattgtaaagctgggagacaagcagattgatcagctcattgaaaaatatgacatcaaaatctatcccaatccagtatctgactatgcttatatagaaataggaagctcattcaaggaggctgatattctcttatatgatatgagtggaagacagctgcaaagcgtaaaaaccaagaacaaagtaactaaaattaatacgcaggctctggtacaaggggcttatgtagtgactataaaaactgatactggtaaaacagcgaatgccaaattaattaagaaatagaacacaataatgaaaagaaatataaccagtttgtttttttgcctgtccttaactacagcaatagcacaaactacgggaagcaaacaatcaacccttcctaatattattccgccctctgcggagtcctataaacttggcgcttttggaaatcttccggtaagcctttttacagggaatgctaatgtagatatccctgttacgtcgtttgatactgagaatattaatattccgatcaggctcaattatttttccaatggactcaaagtagacgatatgaacggttctacaggactcggctggaatcttgtttccggaggagtaattaccagagtgataagagatcttcctgatgaagacaatcagtccaatataaatattccgactaatattggagatttaggcgctaatactacagctgccatgcagtttttccaggatgcttctttcgatgatatagatacagagcaggatttatatatggcgagctttggagggatgcagattaaattcgtatttgataaaaaaggaatcccggttatttattcccaaaaagatgtggtcatagaggggacaagtggaggaaattcttttaccataacggtagataatggaaccaaatactattttacagataaggaaacaacttccaaccgtactgctggggcagggcattcccttatatccatttctacaacagcctggtatctgactaaaattgaggatgtaaccagtggagaaatggtatttattgaaaatgtggatggcgggtataccgcaacgatgagccaatcccaaactttatcttatacatctcctaacgcaggtcctatgacgtctagttgtggaaaccctgcatttatccgttatccacaggtcagtgagctgatcagtcataatcagaccgttaccggaaaacagattaaacgaatttatagtaataatccttcctatggagaaattatttttgattatctgcaatcgggaggaagtggagattataagagactgcaaaaagttactaaaaaggttaatggcaatatcatcaatgatgttacgctcaattacaatcttactgctaataaccgtctgtttcttacttctgtagtagacagtgttttaaataccacctatggatttcagtacaatttacctgatgtatttcctcaaaggctttcctttagcagagacagctggggatattataacggaatgatcgacaataccaacctggttccttccatacctgaagtatcaatgtggagttcatacaacggagctgcgcagcaggttagtccacaaaatacggctattggaatacttcaaaagattatttatccaactaagggatcaacagagtttgtctacgaaaaccatactgcaattgagaaaaatgtgatgttgagcccctctgaaagaacaggaactcagatcaaagccacggcagatgatactaacgggcacgttgaaaatacagtgccttttaccccgctccgaacagaagatattactctgggagggagtgcccagtttaacagctcgtgtgatcctgccgagcaggttaccggaaagcaccgggcaattgttagcctgctcaaagctaatggccaggctgtcccattatattttaaaacttctaccgggattgttaccagtgctggtaattcggttacttttcctaccaacaatggagcaggtctttttgcccatgttcagaaagatgagcctttaactcttaaactttggaccctatttgtttgtacccgctctacggcgtcagcaagttatacaaccaaagaggctgtttacggagacaaagaaggaccaattggcggcctgagaattgccaaaattacagatgctacagaaaacggaatggccacaaccagaaaatttgtttaccgtgatttgaatgaacaaaatacggaagctgttgtattgagaacccctgcatttcaggaacagcttctctttacaagaacttgcagtacaaataatcccaaccttccaagtggatctgtacctacaggggtagaaagatttccctatacgatggtaacttcttccaatatcaatcagctgtttgctactcatcccaatgtattttataaaacggttcaggaaattgtagagggaaaatctaatattattcatcaatattctaccagttcagatgattttggaaaagtaatttatggggacaatatccgaaactccgtctggaccaactttggctggaataacgggcgcgaaatttttaccaaataccttgatgccggtaataatatggtacgtactgttgaaatgaactatgaagaagataatagcagaaaatatcaggtagacggcttttcgatcagaaaaaattatgataatcctgttactaagaatgagacaaaactctgtacagccgaggatgtagtaaaaaccatttcctatacctattgtactgccagtcactctcacaaatacaatgcagtagatgggtataaaaactgtcaggcatcaggggctcaaaatacgactcaaacgtataatgatgtctgttttggtaagcctgtaggtctgattacctatgaagataaactggataaccttgacatcgtacaatacaaaaatatctctcattttgaatacctgaagtcccagaaaacgatagattatctgaatggaaatgcaatgaagacggaaacccagtatttctataacaatccaaaacatacccagattacatcacagaaaacaatattcccagatctttctacaacagaaaaaacgtatcagtatgcctacgaaaaaggaaaccagctgatgattgataagaatatggtaagtatttctttggaagccaaaacccagcaaactgtagataatattaccaaagtaacatcaagggaagaaacgagctatccaaccgctctccctcacgcgattaccggaaatttagtgcttccattgtctgaatattcttatgatactctgaatcctgccatttcctcaaaggatattacctatgaaaagtatgatgagaacggaaatattttgcaatacagggaaaaagacggtacaccggtaagtattgtctgggggtataacaaaaccaaaccgattgcaaaaattgtaggagccacttataaccaggtcgaaggtctgattactaatatcgtagctaagtccaatgaagatgcagctgatcctaccaaggaagccgagcttttatcagcccttgatgccttccaaccggtgggaatgattaccaagtatacctatgatcctttggtgggagtaactactattacgccaccatcgggaataagagagctgtatgtctatgacagcgccaaacgcttgaagcagatccaggtaagagaaagagataatgcaggaacatacagttttaaggtggttaaagaattcaagtataactataaacagtaaacacaatgaaaaaaataaaattattaggtctgctgtttacagcaatggcaacctatgcgcaaagtacaacagaaaactatatacaatccaaaacctgtctaagcggtgactgtactaagaaaacagagaccgttacctatttcgatggactgggaagacccaagcagattgtcagtgtaaaagcgactaccacgggaaaagacctggttacccctattacctatgacgggtttggaagacaggataaggatatccttcctgttccggctactacactcaattcagccattcataccgggattgtgaatgaaactgctgctaattcttattacggtgtcaccaatgcctac

SEQ ID NO: 1226 - DNA, 24320 bp, synthetic construct
  source 1..24320: mol_type = other DNA
  misc_feature 1..24320: note = Synthetic
aactcataattcgttgtttttatataaggaatatcgccataggtattcactaaataaaaatggagcaatgctctcacaaaaagcgcttcacctataaaaccatttttatctgatgtagataagcctttactattttgacaaccttctataatagcatttgctatataaatctgataataggtttgcgaccaatattgtagtacagtggcgctatttgcttgtaatgtattattatataaattttgagattctacttgattgatttgatacgaatccaattcatcggtatatagaccaatagaaacaggaaaagcactcatttgcccacttacaaaacctttttctctcatatctgcatataggttaataagcgcagcatttgttgtctttttatcagcaaaaaccaactcactattgtattgagaagtaggaacatcaacatccaaaaagtcattgcatctaaagaataagacgcttataacgactgttaaacttaacgtatatatatttttcattgtgctaaattttattattcttattcgactaaaagtttaatttcattcccattacgatggtacgaagaggagggagaaatcggttgtacttaaattcgggatcaccacctttataaggcgttagagtaaatagattttgaccttgtagaaagatttgaggtttcaagaaatgatcttttaaaggaatatcataggtaatcgaaatgtttttcaatcggatgtaagaagcgtccacaatagaaagcgtactacttcgcattaaattataattagccgctatttgagaatttttagtactatatggttgcataggtataccatagtctactaactgattggtcatggtaccagctattgctgtaggcaagtacaattgtcgttcttgttttacgaactgaaataatacatctaaactcaactgtttgtaccgaatctgattggcgataccaccataataagagggattaagatcagtgagtacaactcgatctttcagagaagttattttaccatctccatcataatcataaaattcatattgattatttgtaggatttatacctgtgtattgataaagtttgatgctgttaatagatcgaccgataacataagtattggcgtaagcagagctttcaaggtctggatatgatagtaacttgttccgattaaaagataaattaacctctgttgtccacttccaattattagtcgttatatttttggaacctagtgtaaattcccatcctttattttctactgttgcaggtaaatttccagaaaaagaagaaaaaccagttgtagtaggtagagcaattccgaccaattgatttcctgatctgttttgataataagccatagaaaaattaagacgatcatgtagaaaacctaattctagcgcaacttctaatttacgatttgtctcccaatgataattgggattatacaaccgaataggacttaaaccaactgtcccattatatggattggatgttgtttgataattatctaaatattgataatctccaatattatcacttcctgtaattccatagctaccacgtaatttcccaaaactcaaccatctattgttttttataaaatcctcttttgtgaatagccaagccgcaccaattgcaccaaaattagaatatctattctgaggactaaaacgactcgagccatctcgtctagctgttacgttaagtatatatttatcttgtaagatgtaattcaatcgtccataaaaagcttgataacggtaatttgttttttcatctaagcctattaattgtaaagcagcagtagacaaagacaataacatttcattcgaagggaaatcggcggcagttaaatacagcctatcagttgtttgatcctgaaaagttgcacctataagaaaagaaaaacgatgttgattccatttcttatcccaacttagttgaggttctataatccatgaagaacgattcgtttgattagattctacacttgatgattcactaccttgtccagaagaaggattatacatcgtcgacggaaaagttctcaactcacggctatgcaattgggtaaaccctaaattggttttaaaagttaaatcaggtaaaatagcatagctcaacatcatattagcggttagattatctatttttgatagaaatttagactctaaacttgctaagggattagtccatgtattatttgcccaattcaattgtccattttcatcatataaagcaggagcattgggtgctaattctcttgcaacggttgttaaatcagtagaaggttgattgttattttgattgctataattacccgtaaataagaaattaaactttttatccttgtagtttaaagccaaatgaacagcatttttcaaatatttaaactcacctggataaacagtagtttcttcgtgatgtgtaccattcacggtataattaaaagcggtattaccaccacttatagaagtttgtatcgtgttatattctgctgtacctccaattaattctttttgccaatcggtagatcgggtttgatcccatgttccgtttatatcataagcatttgtaggataagtagaaataccatcataggcataagcctgtctacgcatatcaaggtattgttcggtattcatcaatttcaaagggcgtgtaatttttcctaatcccatcgatgtccgaatacttacctgtgtagcacctattttcccttgtttggttgtaacgagtaccacaccatttgctccacgcgaaccataaatagcagtggcatcggcatctttcagtacttctatactttctatatcagcagggttaatcgtagataacggacttgtaaaagaaggtctgtttccagaggtagatgtacctccaatgggatccgaagagtaggggatgccatctataatgaataaaggttgattggcatcgggtcttaaactgttctgtccccgtatttttatctgaaatccacctccagaaccaccactttcttgagttatttctactcctgccattcgcccttgtagcgttgctaaaaaattatctacgggctgattctctatttccttagccgttacacgagcaatagaccccgtacgttctttgtcttttacagcatagtatcccgcatttatcaccacatcttttagctgaatttcattctcctcttttgtgaaacttacatttatcacactcctattcaatacctcttcttcacgaatagggaagtccaattgctcaaaaataagtttagcatcatcatgttgcaaggtcaacgaatagtatccattcgcatcagttcgcacactattctgtgtaccttcttctgttactaccacgccagagagcaaatggttatgatctttcaccgttccagtcacggtttttcctgtttgtgcaaataggggtgtagcacaaaccaatcccaatagcacacttattatatgcctattgagtttaaagtaaaatattttcataattttacatcgttttttaattcaacattagttttaaaagcttctccttttccagtacatcgcgccaactttgtttttgggaaaggggttttattttttttacgttttacggtctacgcttaacgttttacggtttttgctacgtattacgcttaacgttctacgtttaacgtcttttttctttcttgctgtcattctgagcttgtctcagaatcgcatctaatatgtcatttcgaggtatcgagaaatctttctatcacttttttatgagcaaaaaagtaatcaaaaaactcttgtctttgattttcgacggtcaaaataagtttcagccattcaatgttttaaatcatttgctacgcaaacagtaaaatattttaaccattctcttcaactttttgacactcgcctccaaatcatatgacgttttcataatcctttttcaaatacataatacattgtactttttacatcgtacaactctaaaatctcaattctcatatcaaaaatcctatcccttccgatacacgaacctcgaacaaaccatacggaacgcatatacaatggatacagaatggatatagcgcggatacacaatcgatacagaaaagtgtcattttcgatatacaccgatacaggaatttaacactttttaacacattatttctctaatattctgtcatttcgagaaatctaatttgtacataattgaatcctctcaatactaaattctaacatctcaatactaataataaggtagcagagcccaataaatttggaaaatgatattaaacgttttaaatttattgtgcgaataaaaaagataaaacgaatgctttcaaagtctccttaccgaggctctgatagagagcgtgtaaagaaaggataaccctttgctttacgatccgtgttttaaaaatgttatcggagtattgttctttaaaagaatgggaaaaacaaacagactttgtctggcggttttttacggatgaatggaaattgtttcgttctcattttgtgttgggttttatggaacgatgtttctcttatatgaagatgtattgcaaaaaagcaaggcggcttcacactttagactcaagggcgaccaaacccatcttaaaaactcgaaagtttaaaagttacctctaaagcatacgtgaaaaccgcccatgccatatacgaaagtacaaaactttttagacatggagcgattccacgacagtctcgaggtaaaattggtcgttttgagccgagaacccatcgtaagtaatttgtctttatggactaattatcaattcgctataacaaatataatacttttttaattaaatgcaaattattttctaattaaaaacctatagacattaatgaatagtagtggttctaaatatagagagcaaataggagctaagttaagatctcatcgtttgaaactttttttatcaattgatgatattattcttatgactgaaatttcaaaaagttcagttttaaaagttgaaaaaggaattgcaaaagatatagatttatatattgaatatgcaaaagccgttcagtacccattagaaacattattagactttaaaatccctcttaaacctctaaatgaattatcaaaagataggatagaatctttaaaattgacatcaaaaattagagagcatatagtaaatacaaactttcttaataaaggtaaaactgttgctgaaataaaagaggagttagttcggttgaaattagtaccaaaagaaataacttctgttgctatcgctggtgttatgaggaacttaaaaaacgatgagttggtcagttcagaagaaacaactggtagaaaggcaatttatataaagcctaagaactaattataatactataatgacttctagaactttttcttgtcttaaacaacaataataaatctaattttatgagagatcccaaacgaataaaacctttacttgaaagaatcgaaaaaatatggatcgaaaacccagattataggcttggtcaactaataatggttattgctagaactggtgaacataatcctaaattatttaatttagaagaatcagaattacttaaaaagttagatgaatttgaaaaaacacaaaacattaagtaattaaaaacgttttatttaaaaacaatatactaaattagtcgtgttagcttttaggtaagtttaatgttagtaatggtactctggagttaattttaggtttgtctaactccagagtattttatataaatacatctgattaatataagtaaaggggggctataaagaaccctttgttattctataatattttacacaacaatggttataaattagattaatttgtatatttgttatttatgcgaaactaaagctataatagtttcgtgaaaaaacaatgttggcagcaattttaacgacatcacacagtatgacatttccctttgacataaatataaatctaggacaaactggaatagccggaattaaaaatccgacaattaaaatttacggaggtataactactttcctaggacctaatggtgcaggtaagacacagcttttacgaggattaaaacaatcacttcacactcatctgaatgggaagaaaatcagatatgtttctgctggaagacttggacctatggaaaactacaggtctgattatgacggacaacgtggacaaccaagttttgactctgcaagttttggagataaatctgcgacacaaagaagacatcaaacggagactattcttggagatttcgcaactctgtcagaacgtcctgatgttttaataaaagtacaagaaagacttcgcaaactattcaaaagagacattgtagtagattgggatgggggaagattaaaaatttttttttcaagagttgatcaaacaactactaaaaattattcgtccgctagagaagctagtggtctattacacctagctgcaatattagcttcattatatgatgatgaagttggatgtttattaattgatgagccagaggtctcattgcatccacaactccaatcattcctattaaatgaaatcaaaaaagttgcaggaagtaatacagaaaaaggtaaaaaactaatcttcatttcaactcattcaacggaatttattgaagttaattcagtaactgatttggcttccataattttctgtaacgacatccaagaaagtccaattcaaatcgaccctttacttggtgattttcaaagtaagaaattacaagcattacttacaaggcttggtcaagaacataaactagcgcttttttgccattcaccattattggttgaaggtccgagtgatgaaataatttgcacagcattaagcagaaaactatccttgaacttggaagctgctggctcacaaatccttcctgtgacaggaaaaggacaatttccagtagtaattaaactctttcgtttaatcgggaaagagcctgccctacttggagatgcagatgcaatagcagataatttagatattattggagtttttacaagtctgccactagcgacagaaatagctactgaattaggacatagagatgctgcaaaatttgcaaaagatatatataatgacttctgtcaaattgtatcaactaagtggaatgatataaaaatccaagctgaacaacactattattgggttaatagagataaacaaaaagatgaactaatagcaaaacggagaagtgctttttgctggttatttaataccaatgatgaagatatcaagagagtgcagaatggtacagagtggctagtgattaaagtacgtttatcatcactcttgtcctttctggaaaaactaggatgttttattctcagaaaaggaactatcgaagcatattatcaacattctgggaatttgacagttgatgaaaaaccaaatgctgcatcttatgaagtcaatggtctaatggaggatactgacgaaaaagtaaagtcggattatggcgatataattcgtgcaatgaaattttgttctaacgtcaaagaaattaacgaagctgaagcaattagagacttacttttagcgatggtttcgccagctcttgctaccataaaaaaagaaacgacagatgctgagctaaaaatattttccaataatttatttggttctaaatccagtttatttaaactttctaaacatattgatggagaagacatttatcttgaagtaaatctttcaacagagattcttgaagtaagtggctttccaattaaaataaaaaaaggagctaacccaattgaagtagtaaataattcactcaaactaaaataaaaaactgctgccaataactaagctttcgtcttgcccggagggtatgagatgttttgaaatcactgaacacaaataaaaagtagtgaagtaaagcctgttgaacggaaccgaaggtctgcatcaacataagtaatattttcacaactccaattttaggtacaaaaacacaaaatagtataaataataacctctttaaaagcaattttagagaggttttttattttaaacaataagatgtaaaatgtagttttgtttgtatatttattacttacacgaagtacagattttttttacgaaactaaagctatagtagtttcgtaaaaaataataatgtgacgcaattttaaacaaatattaattatgaataaaaagaaaattctactaaaaactagtatttttttttgtctagtatcttttttaattccattttttttaaagagcaataatgattcttgggttacagttttaggcacagcttttacatctttaggtgcaattgcaactttcataaccttattaatagctatatttttatttaataaattttcgctagataataaatttttagaaaaccaaacacttaaagttttagagcttgctgattatttaaaaggtaaaacaattaaaataaaaactgaaaatttcacatattatctaagatttaatatagacgaccctaaattagaaaaggaattattttatgaaaaaatgaaatcaaaaacagttgttataaattttgacgatttcagcttatttaccgacactattcttgaaatgaaaagaagttattggttaccacaagaaataaaagaaaaattagaatttttaaacatttacggaatcaaagaaatacctgataatttagaagaagctaattttgcaaaagtattctttaaagacaaaagtaataatgaagatttttatgttacattaccaaatttaactgttgaagaattattgttgaaaaaaaatatacttgttaaagaaattcacaattggcttaataagtattctgaaattaaaattgatttaaaattagaagaaccagaaaaatatatagatgaaaaataaaacttctgctaataactaagttttcgtcttactcaaagagtaaatattagaacaaaaaaactcatttgtttttaaggaggtttattttttttaagtgaaaccgtattttacttggataaaaaatattaatgaaaacaatatataaactttatggataaaattgaatattttaagattggcgaaaatagaaaactacctttaagatgtccaatattgaattattgttgtagaagaataaatactatatatctcaactcagaatattctaaattttttccaaatcaatccattactgaagctttatttagagatggtattttacctacagattttgaaaaaaataaaattgatattcagggagaattaccttctataataaaaggtgatacatattatcattttaatgatatgtgtccagaggttaatttatttgatcccatgaattcattaatgagagataaagcatgtgtaacaggcagctatgatagtgaatataaatatgaaaagttcaaaattataaaatcacaacattattcagaatgtcccgaatttaacttctctttatttaagaaaaaaaacaataattctaagccaaggaaaaatataccagctaaaacacgttcaattcttcaaaaagaaataaattcgaaatgtccaatttgtaataatgaagatgtagagcatttccatgttcatcatattgatgaaaatcctacaaataataatattgacaatttattaatgttatgcccaaattgtcattcaaaaataactaagaatgatatatcttttgaagaggttgtcaaaataaaatttaacttgaaaaggtaatgtgcatcagctaatatagataaatgctaatattagttacaaaaacacaaaatagtataaataataacctctttagaagcaattttagagaggttttttgttttacacaataagaaaaataaaaaaagccccacagataggtgaggcgctaaatgttttcacaacggaataatccttattgtgagttcctttcaataagacaaatttaaaaataaaatattaatatataattacgtgaaaccgtaattacataaaatattttttatgtaatttaataggcaaaataaaaacttatgactaaaactatacttggactcgatttaggaaccaactccattggttgggcgttagtacagcaagattttgaaaataaacaaggcgaaatacttggtatgggatctcgtattatacctatgtcgcaagatattttaggcgaatttggtagagggaattctatttctcaaacagcggaacgtacaggttatcgtggtgttcgtcgtttgcgcgaacgccatttacttcgtcgtgaacgtttacatcgcactttaaatattttaggttttttaccaaagcattatgctaatgaaattgattttaccaagcgatttggaaagtttatcaatcatgccgaacctaaacttccatataagaatggtgattttctctttaaaaagtcttttcttgaaatgttggaagattttaaaagcaatcaacctgaatttttaaaagacaaaaacggaaataattgtttggttccttacgattggacgatttattacttgcgtaagaaagccttatcgcaaaagattgaaaaggaagaattggcatggttaattctaaactttaatcaaaaacgtggttattatcaattaagaggtgaagattttgcagaagaaaaagataaattatttgtaaaattaaaagttgataaggttgttgattctggcgaaaaaatcaagggaaatatattacatgatgtttatttcgataatggttggaaatatgatagacaaattgtaaaaaccgaagattgggtaggaaaaacaaaagaattcattgtaacagaatcatgcttaaagaatggtgatataaaaaggacatataaagctgttgattctgaaaaagattggattgcaataaaatcaaaaacagagcaagatattgataattccaataaaacagttggaacttacatttacgaaaatctattgctcaatccaaaacaaaaaattaaaggaaagttagttcgtacgattgaacgtaagttttataaagaggagctcaatcaaattcttagaaaacaacaagagtttcattcagaattacaaaacgaagaattgttgcaagattgtgtacgtgaattatacaaacacaacgaacagcaccagcaaatgttggaatctaaagattttgttcatttgtttttaaatgatatcatcttttatcaacgtcctttaagaagtcaaaaatcttctatttctaattgtacgttagaaaaacgtatctccaaagaaggtgttgttttttctataaaagtcatttcgaaatcgaatccatattatcaagaatttcgtctcttgcaatggttgcaaaatttagaaatttatagaaatgaagatgatacaaaagttactactgaatttattacttctgtagaagataaagaggcattatttgatttcttaaatagtaaaaaggaagttgagcagaagcatgttatcgattttttattgaaacaaaaaagcaacaaaaacaaacttccaaaaggagaagcggaaaaataccgatggaattatgttcaggataaaaaatatccgatgaatgaaacgagatatttaattcaatccaagttagataaagtagaagatgttccaaatgattttctttcgtttgaaaatgaaatggctttgtggcatattatctattctgtaaatgacaaaattgaatatgaaaaagctttagcaaagtttgcactaaaacatcaattagacgaagcaagttttgtagaatcgtttaagaaatttccaccgtttaaatcagattatggaagtttttctgaaaaagctattaagaaattattgcctttgatgcgatttggaaatcaatggaattatgatgctattgacaacatttcaaaagaaagaatttataaaatcataactggagaatatgacgaaaaaattaaaaatagagttcgcgaaaaggcagaacagtttaatttaacaacagaaaataattttcaaaatctcccgctttggttggctcagtatgtagcgtatggtcgtcattcggaggctgaaattacaggaaaatggaattctgtttctgatttagaaaattatctaaaagaatttaaacagcattcgcttcgtaatcctattgtagagcaagttattactgaaaccttgcgtgttgtaaaagatatttggcaagaatacggaaaaggtgcacaagatttcttttcagaaattcatattgaattaggtcgtgaaatgaaaaatactgctgatgaacgtaaacgcttaactaatgtagttaccgaaaatgaaaataccaatttgcgtattaaagcattgttggcggagttagccttggatgcaactgtagaaaatgtgcgcccatattcgccgatgcaacaggatattttaaaaatctacgaagaaggtgttttaaatgccgaagaaaatatagaggaagatattttaaaaataagtaaaacagcacaaccttcaagctcagatttaaaacgctataaattatggttagagcaacgttatcgttcaccttatacaggtcaaatgattccgctgaacaaattatttagccacgaatatgaaatcgagcatattatcccgcaaagtttgttttttgacgacagtttgagtaataaaattatttgtgaatcggctgtaaataaattaaaagacaatcgaataggtttagccttcattaaagcatatcacggagaagttgttccgttaggaaatgggaaaaccgtaaaaattcttgaagtgcaagattatgaggattttgtgaagcaaaattatagtaagaacagaacaaaacgtaataaattgttgatggaagatattccagaaaaaatgattgaacgtcaactgaatgatacacgttatataagcaaatatatcagtcatttactgtctaatattgtgcgtgatgttacgccagattcaaaagatgatggaataaattcaattaatgtattacctggaaatggtaaaattacgactcgcctaaaacaagattggggattaaatgacgtttggaatgaattgattttaccacgttttgagcgaatgaatgagttaacgaattctactgattttacttcaacaaatacaaatggaaaagtaattccgacggttcctatagaattatcaaaaggtttttcaaaaaagcgtatcgatcatagacatcacgctatggatgctttggtaattgcttgtgcaacgcgtgatcatgttaatttattaaataatgaatcggcaaaatctgaaaccaaaagatatgatctgaatcgtaagcttcgtgtttatgaaaaagtaacctataaggatcaaaaaacaggagaacaaataactcgtgaagttccaaaagatttcttaaaaccttggactcaatttacaatagaagcaaaaaatgcattagaaaatattgtagtgagttttaaacaaaatacacgtgttattaataaagcaaccaactattacgaaagttataaagacgaaaatggtaatttgcgttttgataaaaatgggaagcctaaaaaggattttgtagaacaaaagggtatgaattgggcggttagaaaaccattgcataaagaaactgtttctgggcaagtacatttagaccgagtgaaggttgcgaaaggtaaaattctttctgctacgcgtaaatctttagatacaacatttaatgaaaagacaattcaatccattaccgatactggaattcagaaaatattattgaattatttaaaggcaaaaggaagtcctgaagttgctttttctcccgaaggaatagaagaaatgaataaaacaatttctctttataatgaaggtaaaaatcatcaacctattcttaaagtgcgcgtttttgaacaaggaagtaaatttcctttaggtgaaacaggcaataaaacaaagaagtttgttgaggcagcgaagggaacaaacttattttttggaatttatgaagataaagcaggtaaacgcagttacaatactattcctttaaatttagtgatagaacgtcaaaaacaaggactttcgccagtttcagaaatcaatgataaaggacatcgtttattatttcacttatctccaaatgatttggttgttatacctaaagatggagatataaatagtaaagatgtttacaaagtggtgagttttacaggagggcgcttatatgtaataccacattttgtatcttctgtaattgtaaataaaattgaatatactcaattgaataaaattgaactgacgaaagagaaagatttgattaaaaaaatagaatttgatagattaggtaatttaatttctaaatcatcaaaacttgaagaattattttataaaagaagaatgtaaaaaagctatagatacaaatattttagtttatgcttttcagaatgataatttgggactaaaaaataagtctattgatttatttatgaatgaaaatctagtagtatcgcattttgtattaattgaatttatacacattatacatacaatttctaaaatggataaacgtgaaactttgaaacttataatagaatcttttagggataataagaactaattattgttatatggagacttataatttagcttattttattgtgaaacgatatagaatttctcttaaggattcgattataattgccgatgcaatcctgaatgattgttcaattttatattcaagagatatgcaacataatcaaatatttgaaaaaaaaataagaataattaatccatttatttaaactatgctaaaacgcaccatttacattggcagtccgtcctatttaaagctgaaggataatcaactgaaaatagaggatacgattacaaaagaagtcaaaggttctgtttctgttgaggatatgggatttttggtattggatcattatcaaattacgttgagtcatcaattgatacttgcgttgcaacaaaataatgttgccattattagttgtgatgagagtcatttgcctttgggattgatgttaccaatgagtggtcatgttttgcatagcgaacgtttaaagcatcaaatcaacatttcggagcctctccgtaaacaattatggaaacaaactgtagaggcaaagatatttcagcaaaaagcattgctaagtaaattgggatttgtagaagagccgatgcaaaattatttaaccaatgtaaaatctggagatacgacgaatatggaagggattgcagcgcagtattattggaaacaactgtttgataattttacaagagaacgtgacggagatgtgcctaataattttttgaattttggatatgctattcttcgaagtatggttgcaagagcattggtgagtagtggtcttaatccaacgataggaatttttcaccgtaataaatacaacccctattgtttggctgacgatataatggagccttatcgtccttatgttgacgagttggtattagaatggataaataaaccatttcgaccaacagaaatgaataaagaagccaaagcgcatttgttatcgattgcaacaaaagatgtgatgatggatggactaaaacgacctttgttggttgcgctaagttctacaacaagttcgttgtataagtgtatgacaggggagcagcgtatgattcgttttcctgaaatggtatgagttttagtcgttataatgcatatcgaattatgtgggttttagttttattcgatttaccaaccgaaacaaagaaacaacgaagtcaggcaacaagatttcgaaaagaattgcttgacgatggttttgcaatgtttcagttttcgatttatttgcggcattgcccaagtaaagagaatgctgaggtacatataaaacgcgtcaaatctaaattacctgaatatgggaaagtaggaattatttgtattaccgataaacaatttggacaaatggagatcttcttttcaaaaaaagaaactaatttacccacaggaccccaacaattagaattgttttagaaataaaaaaaccgatagaataatatgtattctatcggtttttactttttttctcatttctacttttcttctcaaaccctttaaaacaaaggttaataaaaatgaggttgtaattactttgataaatataccaaattgaaaggaactcacaacggagctactgaaatcaccaacaaagaatttgttgtaattactttgataaatataccaaattgaaaggaactcacaacccgtttggcaagtaaatgagaaaggatttagttgtaattactttgataaatataccaaattgaaaggaactcacaactcaaaatgaagttaatataattgtgagctggttgtaattactttgataaatataccaaattgaaaggaactcacaaccttcaccttgagcggctctcactttgttgagttgtaattactttgataaatataccaaattgaaaggaactcacaacaagtttgcttgtttagcgatactttctaaggttgtaattactttgataaatataccaaattgaaaggaactcacaacggcatttggttcgttcatatttatctttatgttgtaattactttgataaatataccaaattgaaaggaactcacaaccgtaaataaagtatcctgtctcatcttttggttgtaattactttgataaatataccaaattgaaaggaactcacaaccgtatgtctaacgaattaacatttttgtatgttgtaattactttgataaatataccaaattgaaaggaactcacaacatcaaagttgagtttgttacaccagacggtgttgtaattactttgataaatataccaaattgaaaggaactcacaacgtcttaaaatcttttcgattttattcattggttgtaattactttgataaatataccaaattgaaaggaactcacaacgaaactcgtcacgtaacatcatttgttttagttgtaattactttgataaatataccaaattgaaaggaactcacaaccgtaatagaattgctaaaaagtttgaagaagttgtaattactttgataaatataccaaattgaaaggaactcacaacgacgctaaacgcgtatctgtaaaattaatggttgtaattactttgataaatataccaaattgaaaggaactcacaaccatcttggattgatttagttcaagaattttgttgtaattactttgataaatataccaaattgaaaggaactcacaactagcatctttaatcgcttgctgtctattatgttgtaattactttgataaatataccaaattgaaaggaactcacaactactccttgtgtgatatctgtgatttgtgcgttgtaattactttgataaatataccaaattgaaaggaactcacaacaaatcttctatattacctccttccaatgtagttgtaattactttgataaatataccaaattgaaaggaactcacaacaactgctgtattcatttttatatatttttagttgtaattactttgataaatataccaaattgaaaggaactcacaaccacgttcttgaatattaaaaccatcagcgcgttgtaattactttgataaatataccaaattgaaaggaactcacaacagtaatgttgagttctttcgtagcgtttttgttgtaattactttgataaatataccaaattgaaaggaactcacaacttgtgtctatatttttctgccattgtagaggttgtaattactttgataaatataccaaattgaaaggaactcacaacgctttcttagaaggttacgaaagccatggagttgtaattactttgataaatataccaaattgaaaggaactcacaactggatgaaataacggtaccggtaccgctttgttgtaattactttgataaatataccaaattgaaaggaactcacaacggtgcgtttcaacttagcacaaccaatacagttgtaattactttgataaatataccaaattgaaaggaactcacaacattgagcattataaagaatagatcctgctggttgtaattactttgataaatataccaaattgaaaggaactcacaacatttttgccgttaattgttttgcttctgcagttgtaattactttgataaatataccaaattgaaaggaactcacaacttggtcgattcgcttttacgcaatgactgcgttgtaattactttgataaatataccaaattgaaaggaactcacaaccagttgcagaatctctggtagacatatctagttgtaattactttgataaatataccaaattgaaaggaactcacaactatttcgatgatacctctctctttcctttcgttgtaattactttgataaatataccaaattgaaaggaactcacaacattacaaatgtcgtttggaaattcaatggagttgtaattactttgataaatataccaaattgaaaggaactcacaacaataacatatatacgctgaatcgttcgattgttgtaattactttgataaatataccaaattgaaaggaactcacaactaaatccttcgttaaaggaatttccctattgttgtaattactttgataaatataccaaattgaaaggaactcacaactgcttttccagcaagatatattttgtcgccgttgtaattactttgataaatataccaaattgaaaggaactcacaacaaaatatcatccttaaaaacaacaaacaaagttgtaattactttgataaatataccaaattgaaaggaactcacaacactctaccgatttatatatgacatttatttgttgtaattactttgataaatataccaaattgaaaggaactcacaacctatccgaacggctgaattggtcgcattgcgttgtaattactttgataaatataccaaattgaaaggaactcacaacaccatctaatgaattacctgcatttgtagcgttgtaattactttgataaatataccaaattgaaaggaactcacaacattaactcggataatgttaacgacgtaatagttgtaattactttgataaatataccaaattgaaaggaactcacaactgattagtgtacacgccaacgccggaggcggttgtaattactttgataaatataccaaattgaaaggaactcacaactaaattattggctaaatcaaccccaattaagttgtaattactttgataaatataccaaattgaaaggaactcacaacgggaggggtcaacggaaagttcgcaacaaggttgtaattactttgataaatataccaaattgaaaggaactcacaacgcaattggtaaggtgattaaatcaaaatttgttgtaattactttgataaatataccaaattgaaaggaactcacaacatctggagataattgaaataaaatgaaattgttgtaattactttgataaatataccaaattgaaaggaactcacaacgaagtttaatattgcaaaactccctttattgttgtaattactttgataaatataccaaattgaaaggaactcacaacattaagaaatatgcaacattagaagtgcaagttgtaattactttgataaatataccaaattgaaaggaactcacaacgcaaaacagtaaatattttaaactcgtggtgttgtaattactttgataaatataccaaattgaaaggaactcacaacagggtaaagctcatagcgatagtatgatacgttgtaattactttgataaatataccaaattgaaaggaactcacaacgagcaggatttgtttgacgataaagttggcgttgtaattactttgataaatataccaaattgaaaggaactcacaacgttaggtggtcgctactgatccagcgatcggttgtaattactttgataaatataccaaattgaaaggaactcacaacatactggattgattgagaaaattatcgaaagttgtaattactttgataaatataccaaattgaaaggaactcacaacttggattccatttcttaggatcgatataaagttgtaattactttgataaatataccaaattgaaaggaactcacaacgaaatgcgtgttaataaaatagattttttagttgtaattactttgataaatataccaaattgaaaggaactcacaactacaatttgctgaaaaatttttaaatcaaagttgtaattactttgataaatataccaaattgaaaggaactcacaactttgaataaattgaaagaagctgatcgtgcgttgtaattactttgataaatataccaaattgaaaggaactcacaactatccattgtattgttgcaaatctgcatttgttgtaattactttgataaatataccaagatttgaaatcaattcacaactaggaaacgaattaattgataaagagattggttgtaaatactttgataaatataccaagatttgaaatcaattcacaactagggtaaaatcattcgtatgaacacagaagttgtaaatactttgataaatataccaagatttgaaatcaattcacaacttttcagaggtaaaaacgtcctccgcaaaagttgtaaatactttgataaatataccaagatttgaaatcaattcacaactacgacattacagctattttaccagcgttggttgtaaatactttgataaatataccaagatttgaaatcaattcacaacttagtatagtggtggtttaggtttttcgatgttgtaaatactttgataaatataccaagatttgaaatcaattcacaactcttccgcttcgtcatatatccagcagttggttgtaaatactttgataaatataccaagatttgaaatcaattcacaactcttctgttgctgagtttgaaataacttcagttgtaaatactttgataaatataccaagatttgaaatcaattcacaactcaatgatgtctggtagatttataaagacagttgtaaatactttgataaatataccaagatttgaaatcaattcacaactatactattagagttaatttacaatcaaaagttgtaaatactttgataaatataccaagatttgaaatcaattcacaacccaatttcagagcgtgattggtgtacttctgttgtaactacttacgtaaaattactaaaagtaaaaggaactcacaacctgtttgttatcctcgtaatgaacccagtcgttgtaactacttacgtaaaattactaaaaaagctcttatccaagagcttttttgttaaagaaatgttttgggtaaaagtactttttaccgagcttaaaacaaggaatcgtcttgtttttcctcatgcgatacaacgttttgtcactaacgttaagtagcctttgcacatctgcactgtcgtagaatccgtgatctttgtccgtgggttgtatattcgtaattaattctactaaaagaagttttaactcgttgctatccttctctttttgtgtaaaaaagtaagtgttttgcatacgtattaattgacttaatttcagcaagatacgtattttaattaaataaaacaaatcataagaggaagtagggatagggagggggtgttaattttttttattgattttctgttttaattattcgaatttctttttttaatgtcactttttttcgtcaaaaaaactaacgaaaaaagacttggctgtaaacctccctactaaaaatgttctcatttcactaaagattttaaaaaccctacgggctaaaaccttttttacgttgcattcaatcattttcttaacgtgtgagttttaatgccggtttcttcatccttttttaatattcaaattcacttttaataaggcattaaaatccgtcatttctgaagagtcgagattgctttaaataagaattttaaaggcgacatacgatttgcagacgagtttcaatccattgaaacaagcgtaaaaaagattagtgagcgatagcgaatcatttaatctttttagtgagtaaaatgaagattgaacgtcgaaaatcgcagtcttgacttttttggttcgtttttgtgtcaagacaaaaatgaacatatgtacctaagctctactagagcttctccttttaatttcaaatgttttttcatcaaggttttccgaagggtatatgttttccttttctttaatgtcactttttttcgtcaaaaaaactaacgaaaaaagacttggccgtaaacctctctactaaaaatgttctcattccactaaagattttaaaaaccctacgggctaaaaccttttttacgtttcattcaatcattttcttaacgtgtgagttttaatgccgttttcttaattctttttcaatattcaaattcattttaacaatgaatttaaaaaccgtccttatttaagaatgtttatttattgacctttaatattttacgttgatttattgttaatgaataggaatttaaaatccgacgatttagaatcgaaatgtaattcaactctaaattattagaatataaaagttggagtgtttgagtgaaacgagttgccaactttatggaaataatttagttagttgaatcattgagagtctactgtcggcatctttttttgtttcgttttttggatgagcaaaaaatgaaagtaagaatttaaaatggtcactgaggtactctaagtgcagaatctttccattacttcttttctaaatcaaattcattttaacaatgaatttcaaaaaccgtcattgctgaagagtcgagtgtcaattcgacgtagcgagtgttaaaatgatttactgtttacattttatatgtgaatgatttaaagcatttagtgagtagtcgttattgaccgatttggaagcactatacctaagctccactggagcttctcctcttaatctcaaatgtttttgcgtcaaggtaaaaatgaatatatgtacctaagctccactggagcttctccttttaatttcaaattcttaatttcaaatttttaatttcaaatgtttttgtgtcaagacttctccgaagggcatatgaattcatttaaaaacaataagaactcatgaataaaaatgaatgtaaaattctttctatcacttttttattcatagcttatttattttaattatcggtattcatatgccctagggggaagctcatccaaaaaaacatttccattgcaatcttttctaatcagaaaaggattttctctacaatccctaacgcaaatacaaatcaatatttacattaaaggaacaatttttataaattactttgtaagtaagcaatcattttctcagcaactttttccgaagatgcaggattttgacctgtaaataataaaccgtcttctacaacatgcactccccagtcttcagttttagagtaatgacctcctaatttttctaattcaacctgaactaagaatggaacaacatctgttaattgtaccgcatcttcttcagaattagaaaaaccagttacattttttccttttacaaaaggttctccattacttaaagtaacattcttgaaaactcctggagcatgacaaacagcaccaactggcttaccagcattatagaaatctaaaatcaattgttgagaatgcacatcatttgctaaatcccatagtggtccatgacctcctggatagaaaatagcatcgtaatcctcagctttttcattagctaatacatgtgtatttgcaattaaagcttgaacattttcgtctttattgtaacgctctgtagcttctgtttgtgcagcttctgtttcgctattaggatctataggagcttgtcctcctttaggtgtagcaatagtaacttcgtgtccagcatctacaaatttgtagtaaggagcagcaaattcttctacccaaaatcctgttttatgtcctgtatttcccaattcatcatgagaagtaacaacaaataatattttcataattttaattatttaaattcaacaataaattcttcgtttggtagtctaacttttttcatagatccaatccagtctaattcaggatcggcaacaccaacatacattaaagatacacttttaagacctagctggtctaattttaaaactttatctacaatagcgttatcaaaaccttctacaggagtagtatcaacttttaactcagcagcttgtgctaatgcaagccctaatgcaatataagtttgacgagcagtatgtgcaaaattttcctctgctgatgtattcaagtaaataccttttattttatctgtataacttccgaaacgacctcttggcaatcctctttcatctgtagtaaaatcatatactttatcaattctttctgctgtatagttgtcccaagcagcaaaaataattacatgtgaa

SEQ ID NO: 1227 - DNA, 24317 bp, synthetic construct
  misc_feature 1..24317: note = Synthetic
  source 1..24317: mol_type = other DNA
ataattgcatctttattgatgtctataatattccaaacattcaaagctcaatctttagaaaaaatgacctggttcaatgagccttctcaatgggaaatcaaagacaaaaagctcacaatgactgtcacgccacagagcgattactggagaatttcgcattatggttttacggttgatgatgcaccattttattattcaacttacggcggagaatttgagaccaaggtcaaaatcacaggtgattacaaagcccgttttgaccagatgggactgatgctcaggatcgatgaacaaaattatataaaagccggtgttgaattcgttgatgggaaattcaatctcagcaccgtagtgactcataaaaccagtgactggagtgtgattgttctggaaaaaataccaccgtttgtctggataaaagccgtaaggagattggatgccgttgagattttctattcatttgatgacaaagactacgtaatgatgcgaaacgcttacctgcaggacaatacgccggttcaggttggttttatggccgcaagtccggatggaaacggtttcaaagccactttcgaaaacttctctgtaaaacatttaccagaccagcgacgactggaatggctgaagaaaaatcaataaaaaagctccagatctggagcttttttttatatcaatcttctcactttgatcaaataatccagatacttttcgccgtgctgcctgtagagaaattcctcttccaatcttatctgtatttgaatcaatacataaccgagaatcaaaaacaaaagagaaaaagcattcggtgtgacgaagaaaagtcccagcaaactcatgatcattcccaggaatacaggatttctggaaatcgagaacaaaccggaagttaccaattcggttttcatatcattatcaatcccgattctccacgagttcttcatttgattctgagcaacaattgtccaaatcaaagaccataacatcaaagtcaatccaaccaatttcagtaactcgacatcaagaaaatcaataatgttttcaacgttctgtaaatcgtgattctatcggcattttcaaactgattttcaatttccgacaaagacaaagctatatcctgagaatccaaaaaatcgtacaccaagatccgcatgctcgtcggtttggtattcttgttcatcagtttattttcaatctcatttctcatcagaaaactaatttttaggagccgggaacctgctttccgttgcaatcttttttgcatcacgttttgtcaagctgaggttctcgaagcccacacaaaaaaggatttcctctacaatcagggctagggatttgtaccttttttcaacatttaatataataaacaagtttgtctgtcgaatcaaaagtctttgatcttttctctttattcttggttcttttctatccaatcaaatccaaaaactgctgctcgtccagaatagtaatcgttccaatgtcttgtgcttttttcagtttgctgccagctttttcgcccacaaccagataatttaggtttttcgaaacggcagagatgttttttccattgtgtttttccaccatttcttcagcctgttctcttgtgaaaagcgataacttaccagtgaatagaaaagtttttccttccaagacattggataaaacttcattcgtgttttctcctttttccaattgaacaccgtaagatttcaaacgttcaatcatcaggatgttttcagaattctggaaaaagtctgtgatgctgactgcgattttcattccgatatcttcaacctgacaaagttcttccaaagtcgcatttttcaattcatcaatcgtagaaaaattcttgaccaatttcttcgccaccgtttccccgacgtgtttaattccgattccaaataatactttttcaaatggaacttcttttgatttttcaatcccgtccagaatattctgagcagatttctccgccattctttcaagtggaagaagctgctcttttgtcaatgtgtaaaaatcagcaggattttcaaccaatttttcgcgataaagctgctcaatcgtttctccgccaagattctcgatattcaaagcttttctggaaacataatgaatcattcttcccactacttgtggaggacaatgcagttcattaggacaaaagtggatcgcctggtcttcaatttttatcagttcagttccacattccggacaatttttgatgtactcgattggggtttgtaaaagcgttcgtttttcagtattcacaccaacgatcttcgggataatttcgccgcctttttcgacgtacacaaaatcgtgctcgtgcaggtccagttttttgatgatatcttcattgtgaagagatgcacgctttactgttgttcctgctaacagaacaggcttcagattcgcaacgggcgtaatggcgccggttcttccaacttgataagaaacgctcaaaagttcagtttccaccttttcagccttgaatttataagccattgcccaacgtggcgatttggcggtgtaacccaattgtctttgttgttttaatgaattaactttcaaaacaatgccgtcaatttcaaaaggtaattggtgtctttcggtatcccaaaatgtgatgaattcttttacttcatccattgttttacacaatttcgcctggtcttccgaaacccggaaaccccagtttttggcttttgcaaggatatcccaatgcgtatctgccggaaattcatccgaaatatattgatacaaaacggccgacaatccacgttttctcacctctccggaatcctgcattttcagacttccactggcggtatttcttggattcataaataaatccaaaccttcctcttcacgggctttattgattttatcgaagttttttctggtaagataaatttcgccacggataaaaaatcggttaggaaaatcacctttcaaggtcagaggaacatcagaaatcgttctcacattattggtgatttcgtcaccctgaaaaccgtcgccacgtgtcacggcctgcgacaattttcctttttcgtaaaggatggaaatcgatgcgccgtcatatttcaattcagctacaaattctacaggctcatcaatggttttgatgattcgtttttcccagtcttctaggtcgtcaaaatcataggaattgtctagagaatacattctgtactgatgctggacggtcgggaaattctttgtgattccgcctccgacacgcaaagtaggagaattagcatcaaaaaattcaggatgcgccgtttccagttcctgaagttctttcagcttgacatcgaattcgaaatcagaaatcgaaggttcatccaaaatgtaataactgtaattatgctgatgaagttcttctctcagggattctatcttttgctgaatgttttcggacattgggaaaatttatttaaagcaaaaataaccaaaacatcaaagtttacaaccaagaaaattataaatttagacacttcgagaatctaattgattatccttcgagagcttcaggatgacagctgttgtcacattgattgaagcctgtagtgagcttgacgaactatcgaaatgtctaaacgctgtcaggctgaggttctccaagccgtaataataattgactaaattagtcatcctaaaaattgaaaaatgaagaacgtattttgcattttatccctagccactactatgtttatcaacgctcaaactcaaatcatcgcccatcgaggtttctggaatacacaaccaaaaacttcggaaaattcgattcagtccttaaaaaatgctcagaaattgaaaatttacggttccgaatttgatattcatatgaccaaagacggtaaactggtgattaatcacgatgaacaccacggaacaatggaaatctcggagactgatttttctgatttaagaaagctgaaattatccaacggagaaaaactaccaaccttgaaagattatctgaaacaaggcaaaaaagatgcttccgtcaaattaatcatcgaaatcaaaccagccaaattcaaagaacgtgaaaacgaaatcgttacaaaagttctgaaaacggtaaaagacctcggacttgacagccaaagtgattatatctcatttagccttaatatttgtaaagaaatcaagaaacagaatccttctgcaaaagtccagtatctggaagggaatctttcgccacagcaaatcaaagccgaaggtttggacggattggattatcattacagcgtttttgagaaaaatccgacctggatttcggaagccaattcgctgggattgattaccaattcctggactgtgaatgatatcaaaatttacgaagaactcaaaaatcaaggtatccaattcatcacaaccaatattcctgaccaattgaaaggtaaatagttttgtcgcataatcaggttaaattttattaaatatataatttaatgtaattgttatctgagaatttttgaacacaaagctcacgaagaatatataatattttggatatttttagttcacaaaggcgcctacgcttatataagtcttgcttttcttttttaagttttacggctttgtgaacttaacaaacaacaatgtataaaaaaactttgtgttcaaaaaagaaatatgttataaagataattgaattcctcaatgataaacttgtattaaatcataagactttattcggattttaaacgtctgtttggtaaatttgcaccttcaaattttataaatcagattatgaatcttaaaggtaaaaatgccattatcacaggcggaggaagaggacttggaaaagctgtagctcagattcttgccaacgaaggcgtgaatgttggtatcacgggaagaaacgaaaattatctcaaaatagcagttaacgaactgaaacaaactggtgtgaaagtagcttacgcagttttcagtgttgataacgaattagaagtaaaagcaggaatcgaagctctggcaaacgaattagacggaatcgatattctggttaacaatgcaggcatcggtgacttcggaagcatcgaggaaatgccgtctgaaacctgggaacaagtgattaaaaccaatcttttcggcgtttattacacagccaaagctgtttatccgtttttaaaagaaaaaggacaaggtgacatcgtgaatattgcttctactgctggtctcaaaggcggaccgaatatgtcggcttatgcggcttccaaagcagctgtcgtttccctttcgcagtcgatgatggcagaatggagaaagcagaatatccgtgtgattacgctgacaccgagcacaattgcttccgatatgagcatcaatggtggtttaacagacggtaatccggacaaggttcttcagccggaggactttgcagaatgggtgagagatatcctgaaaatgaaccgcagagcaatgattgctaatgcgtctattttctcgactaatccttagaacaattattggggcagcttaatccgcctgtagtttatcctgaacttgtcgaagggccccgctcttttaattacactacgttgcgtaaaaaagagctccactcaagtagggctgcatgcaattctatggtaaaatataacgtctcaatattgaggcgtttttttattccgtgacataatccctatctttatcggaatcaaataaaagatatgaagagaaatacgtttttaacaatgtctgcagttttctttgcagctcaaatcaccttaaccaacgctcaaaccaaatctgaagaaaaacttaatccaatcgttcaaagtttcgtaaatgaagtcaataacaattcccaattggaagatatggcttacgagcttctagatggcatcggaccgcgtcttgtcgggacaccagagatgttagccgctaacaattatacagccgataaattgaaatcttggggaatcgaagctaatcttcagcaattcggaacttggaaaggctggcagcgcggaacaacacacgtagatttggtttatccaagaaccaaaaccttatctgcaacccaattggcgtggagtccgacaactaaaaaagcggtagaagcagaagtggtgattcttccaaaagtatcttccaaaaccgaatttgataaatggctgccgtcggtgaaaggtaaaatcgttttgatggcacaataccagaaaatcggacgttcagacgaacaaatcaaagagtttgcaactcccgaattatatgaaaaactgaaagctgaaaaagaacaagctaaaaaggattttgcagattatatcaaatcaatcggttatgataacacaaccttgccggaagctttagagaaagctggagctgcgggaatcgccatttccaactggaccggaatccacagcactaatcgtattttcggtgctaaaaccaaatcaatcccaatgttcgatgtcgatttggaagattacggaatgctttacagaatggcagaaaaaggggcaaaaccgagaatcaaagtggatgctcaatccaaagtgttgccggaagccaaatccttcaacaccatcgggatgataaaaggctcggaaaaaccgaacgaatatgtgattctttctgcacacctcgattcttgggatggtgctcaaggggcaacggataacggaacaggaactctgacaatgctggaaactatgaggattctcaaaaaatactacccaaacccaaaaagaaccattgtcgttggactttggggaagcgaagaacagggactgaatggttccagaggttttgttgcggacaatccggaaattatcaaaggtgtgcaggccgtttttaatcaggataacggaacaggtagagtggtggacatcagcgggcagggtttcaaagactcttatgcttacatcggaagatggctggatgccgcacctaaaaaagtaaaagaccagattaaaactaacttccccggaatgcccggaggtggtggttctgaccatgcatcgtttgtggcagcaggagttccgggattttccctgagttcgcttaactggggttatttcgggtacacctggcacacgacaaaagatacttatgacaagatcgtttttgatgagttgaaaaataatgtgatcctgactgctactttagcttatatggcttcggaggacccggaatttgtaagccgggaaaagcgcatcatgcccaacaacgaaaaaggcgaaccggcaaaatggccggaggtgagagagcctaaaaggagtagtaaggatttttagagaatgaagcatcttatcatccatcttcgataaaatacaaaaagcgacaaatgactgtcgctttttctgtctttataaaatcatcgtcagctgaatccttttcctcgcctcatccacttctgtgattttgacctggacatgttgatgaagttttaccacctcatttacatcagatacaaaaccgtctttcagctgagagatatgcaccaacccgctttccttgattcccagatctacgaaacatccgaaagccgtaatgttattgacaatccctggaagaatcattccgggtcttacatctttgatcgattttacattcgggtcgaattcaaaaactttggttgcttttcttgggtctaatcctggcttttccaattcctttaaaatatccttgattcccagaattccgatgtcgttggttacatatttctcagaatctatcaaagcaattttctctttattggaaatcagatcttcggttttcaaacccagatctttcgccattttttcaaccgttttgtaagcttcgggatgcacggccgaattatccagaggattcttcgcgttcttgatccttacgaaagcagcggcttgctgataagccttttcacccagccttggaactcttttcaaatcttttcgttctataaaagcaccattttctgtccggaaattcacgatattctctgccattttctctccgattccggaaacgtagcttaataatgatttactggcggtattcagattgattccgaccgagtttacagaacgaatcacggtattgtccagttcttctttcagtttggtctgatctacatcgtgttgatattgtccgacaccaatggattttgggtcgatttttaccaactcggctagtgggtcggccaaacgtcgcccaatggaaaccgcaccacgaactgtgacatcgtaatttgggaattcatctctggcaattttactcgccgaataaaccgaagcaccggcttccgaaaccacaaaaaccagaataggtttatcgaatgcgatcttcttgatgaaaaattcggtttcacggctggctgttccgtttcctatggagatggcttctatgttgtaggcgttcaccatggaccggatttttttcatggccattcctgtctcgttttgcggtgcgtgcggatatatattttcgttgtgaagcaggtcgcctttttcatccagacaaacaactttacagccagttctgtagcccgggtcgattgccagaattcttttttctcccaaaggcgaggccaatagcaattgctgaaggtttgccgaaaagacctcaatggccttgatgtccgctttttctttagcttcttgcaaggcttcattggaaagcgccggttccaaaagacgtttgtaagcgtctgtaattgccaattctatctgtttggcagatgaattattacttttaataatagctttatcgatcagatcaagtgcttcatctttttcgatgtcaaccgatacttttacaaaaccttcgttctctgcacgcaacatagccaataaacgatgagacggaattctgttcaaagcttcctgccattcaaaatattgtgagaatttctgagcggcctcgtcatcctttttagctttgactaatttggatgagatcattgcctttcgttgaaaaagtcttctcaggttttttcggacatagagattctcattgatccattctgcaatgatgtcccttgcgccctgtagcgcttcatcttcatcagcaacgatactattgatatattttgaagcgataatatcaatttcatcagaacgctgacccataatgatctttgccaaaggctccaatcctttttctctcgccatatctgcttttgtctttttccgttttttgtacggcagataaaaatcttccaactcctgaaggtcaaaactctgttctatcttttgtttaagttcgattgttaaagcattttgttcttcgatagatttcaggatgctttccttacgtttggtaatatcttcaaactgtttgttcagttttgagatattttcaattgccacctcatccaggttacctgttttgtcttttcggtaacgcgcaatgaaaggaattgtacaatcttcagacagaagttgaagtgttactccaatgctattggcggggatatttagttgattttggataaattctgaagctgtcatttcttgattttgaacagcgaaaatagtgtttttgaaaagaaaaaggcgagttgccccgccttagatgttttcacaacggaataatccttattgtgaattgctttcggttacaaatctaaaaattatttttttaatagttttatggttttccgtaaaatagttactttttttctctttatttttatgctttataaaaactaaaatagctatgactaaaaagatacttgaatttaatagtgaaaaggtcgttcttattttaagaacgacctaagaaagcaattcacaacagatacttgattagttttaaactaaatctgctggttgataatatcaatattatctgttggcagataataagttgggcttggacctccaatcaaatcaatttcgtcaaatcaattttgatattttcttattgtaaagatagaataataatttaattaatcaagtatctaaaaatattttattaaatttgatgatgatttaaaaattaaggaactctcaatattttaaaataatacttttataactataaaaatatcgaatagatgaaaaaaaatatacttggactagatttgggaacgaactcaattggatgggcattaatcaatcaggatttcgataaaaaagatgggaagattcttggaatgggaagcagaattataccaatggatgcagctgatatggggaagtttgcggaagggggttctgtttccaaaactgctgcaagaactgattacagaggggtgagaagactccgtgaacgatttctattaagaagagaaagacttcacagagttctcaatattttgaattttcttccggaacattatgcttcacagattgatttcgaaaaacgattcgggaagtttaaagaagaaacagaacctaaacttgtatatgataatggatttatttttaaaaattcatttgaagaaatgctttccgattttagaatacatcagccacaggtattagaaaatgataaaaaagttccttatgactggacgatttatttcttgcgtaacaaagctctaactcaaaaaatagagaatgaggaattagcttggattcttttgaattttaatcaaaaacgtggctattatcaattgcgtggtgaagattttgaagaagaaaaagataaaacgtttgtacgtttaaaagttgataagattgttgattccggagataatgtaaagggcaaaatattgtatgatgtttatttcgagaatggctggaaatatgataaacaaattgtaaaaacagaagattggatagaacgtgtaaaagaatttattgttactgaatcattcttgaaaaacggtgatataaaaagaacctttaaagctgttgattctgaaaaagattggattgctattaagacaaaaacagaacaagaaattgataattcacataaaactgtcggaacctatatttacgaaacacttcttcaaaatccgaaacaaaaaatcaaaggaaaactggttcgtaccatcgaaagaaaattctataaagacgaactgaaacaaattttagaaaagcaaaaagaatttcatcccgaattacggaatgatgatttatacagtgattgcgttcgtgaattgtaccgaaataacgaagcgcatcaactcacccttagcaaaaaagattttgttcatcttttgatggaggatattattttctaccaaagaccattgagaagccagaaatcttctatttcaaactgtacattggaatttagaaaatataaagatgaaaatggagtagagcatgcacaatatttaaaagcgattccaaaatccaatccttattaccaggaattcaggatttggcaatggatatacaatttgaatatttatagaagagatgatgaacaaaatcctgttacaaaagagtttttaaatacgaccaaagattttgaaaatttgtttgaatttttaaatagcagaaaagatgttgatcaaaaagctttactcaagcattttaaactgaatgaaaaaacgtatcgctggaactttgtagaagataaaaaatatccctgcaacgaaaccaaaacgatgatttcttcgagattagataaggtcgaaaatatttctgatgattttctgacgagagagattgagcagaagatttggcatatcatctattctgtcaatgataaagttgaatatgaaaaagctttaaaatcttttgccaataaaaataatctggacgaagtttctttcttcgaagcatttagaaaatttccacctttcaaaagtgaatatggttctttttctgaaaaagcaatcaagaaattgttgcctctgatgcgattgggaaaatattggaatgaagatgaaattttaagatatagtgaggtttattttaaaaacattgaatatttgttgggagtacttaaacaaaaagataaaaatatttctgacgatgaccgtcaaaattggaataaaacaataaataataaacttcgagaagaattagagaatttccaaaatgcagaaatagaatcttttcaagggttgaggttacatattgcacaatatatcctttatgggaaacattctgaaggagataacaaaaaattcaattcagccgatgatttagaagcttttttaaaagaattcaaacaacactcattacgtaatccgattgttgagcaggtaattaccgaaacacttcgggtagtaaaagatatttggttaaaatatggaaacggagctaaagatttctttaacgaaattcatatcgagttaggaagagagatgaaacttcctgcagacgacagaaaaaaattaacgaatcagatttctgaaaacgaaaataccaatctccgtatcaaagccttgctggctgaaatgatgaatgaccattcggtagaaaacgttcgtccgttttcgcctatgcaacaagaaatcctcaaaatctatgaagatggtgttttaaattcaggtattgaaattgaggatgaatatttaaaaattagtaaaaccgcacaaccttcaccatcagatttaaaaagatataagttatggctggaacagaaatacaaatcgccttatacaggacagattattccgttaaataaactgtttacaccagaatatgaaattgaacatatcattccgcaaagcagatatttcgatgatagttttagcaataaaatcatttgtgaatctgcagttaacaaattgaaggataattatatcggcctcggatttataaagcaatttggaggaactatcattgaacttggtttcggaaagaatgtaaaggtttttgaacaacacgaatatgaagattttgttaaaaaacattacgccaataatagaggaaaaaggaataaacttcttttggaagatattcctgaaaaaatgattgaacgccagataaatgatacacgtcatatcagtaaatatatttcaggagtgctttccaatattgttcgtgtagaagatggaacggatgaaggtataaattctaaaaatatagttcccggaaacggaaaaattacaacacagctgaaacaggattggggactgaatgatgtctggaacgatttgatattgccacgttttgaaagaatgaatcaattaaccaattcaacagatttcacagcctggaatgaaaatcatcagaaatatttgccaactgttccgattgaattttcaaagggattttcaaagaaaagaatcgaccatcgtcatcacgctttggacgctttggtgattgcttgtgctacaaaagaccacgtaaatttattgaataatcagtctgcaaaatccgatactagacgttacgatttgaaaaagaaactgatgaagtttgagaaagtcagttatattcatacacaaacaggagaaaaaaccgaaagagatgttccgaaacagtttttgaaaccttgggaaaactttactgttgaagctaaaaacagtttggagaaaataattgtaagctttaaacaaaatctcagagtaatcaataaagccacaaattattatgaaaaatatgtggagaaagatggtgtaaaaataaaggaaagagtagagcagactgggacgaattgggcgataagaaagccaatgcataaagatacagtttctggtaaagtagatttaccttggataaaagttcctaaaggaaaattggtgacagcaacgagaaaaagtattgatacctcttttgatttaaaatcaataaattctattacagacacgggaatccagaaaattcttaaaaattatttagaattcaagggtagtccggaacttgcattttcgcccgaaggaattgaagacctcaacaaaaatattgagaagtacaatgatgggaaaccacatcagcctattaataaagtaagagtgtttgaattagggagtaaatttcaggtaggacaaacaggaaataaaaaagctaagtatgtagaagcagcaaaaggaaccaatttgttttttgcggtttatgaagataaaaacggaaagagaagttatgaaactattcctttaaatgaagttattgaaagacagaagcaaggattgtctgtagtcgatttaaaaggagtaaatgatttttatttatgtccgaatgatttcgtgtatattccttcaggggacgaaattgaaaacaaaagtaacattgattttaaaaacttaccaaaagaaaatattgagaaaatttataaagtggtaagcttttcaggagggcaaatattttttataagacaagatattgcgacttctattgtaaataaggcagagttttccactttaaataaaatggagcgtgcaatggatggttctatggtgaaggaactctgtataaaattaaatgttgaccgtttgggaaatatttcaaagcatagctcatgataacccgctccatctacatcggcaatcccgcttatctgaaactcaaagatgagcagatgaaaatcctctgtccggaaaccaaaaccgaaaagggcagtgttcctgtggaagatttgggattgttgatgttggaccattttcaaattactatttctcataatctaattcaaaaaatgatgggaaataatgtggtggttgtgagttgtgatgctcatcatttgccacacggaattatgttgccactttacggacacacagaacattctgatagggtaaaagatcagctggaagccagcgagcctttaaaaaaacaactgtggaaacaaactgtggaatataagattgaaaatcagaaaaacgttttgatgaagttggaaaattattacgaacccatgattgaatatcaaagaaatgtaaaatccggagatattaccaatatggaaggcattgcggcgcaacattactggaaatatctcatcagtctggattttttgagacagcgtttcggagattcgcctaatcagtttttcaatttcgggtatgctgttttgagaagtattgttgcaagagccattgtagaaacaggactattgcccgttcttggtatttttcacaaaaataaatacaatccgtattgccttgcagatgatttgatggagccttatcgtccgttcgttgatttgttagtgatgcaatggctaaaaatttatcctgccacagaagagttgacgaaagaattcaaggcgcatattctccagattgcgaccaaagatgtgctgattgatagtaaaacaagacctttgttggtggctgtaaagacaacagcttcatcgctttataaatgttatacaggagaaaaacgattgatttcctatcctgaactgatatgaatgccgaaaggtttaatgcctatcgaattatgtgggttttagtgttatacgacttgccaactgagaccaaggctaatatgaaagatgcgaaccgctttcgtaaggcactcattgatgatggtttcacattatttcagttttcgatgtatgttcgccattgtccgagccgggaaaatgctgaggttcatatcaaaagagtcaagtttatgcttccgaaagcgggtaaagttgccattatgtgtattactgataaacaatttggggacattgaaatcttctttgccagaaataaggaagaaccgccaccgactttccaacaacttgaattgttctaattttttgaatcctaaataattaaaaaatccactgaatttcagtggattaacttttgaggttgtgttatatctcaaagatactcaaaagtgaaagcaattcacaactacttcagccaccacgccttgttgataattgttgtgttatatctcaaagatactcaaaagtgaaagcaattcacaacatgcgggtcggtgcaacgttgaacgtcaacgttgtgttatatctcaaagatactcaaaagtgaaagcaattcacaacgaggtattcctgtaatatcagctattttaggttgtgttatatctcaaagatactcaaaagtgaaagcaattcacaacagactcacctgcttttcctttgcaacctacgttgtgttatatctcaaagatactcaaaagtgaaagcaattcacaacacttacaacgacacctacgaacacccaaccgttgtgttatatctcaaagatactcaaaagtgaaagcaattcacaacgtctttgtcttcatattccttaatctccaagttgtgttatatctcaaagatactcaaaagtgaaagcaattcacaaccgtgcggcaaatggtaatttagtgcctttagttgtgttatatctcaaagatactcaaaagtgaaagcaattcacaacttgaaagtggtttacttaaagggaaaaaaggttgtgttatatctcaaagatactcaaaagtgaaagcaattcacaaccattacattgttcaagttttttaccccattgttgtgttatatctcaaagatactcaaaagtgaaagcaattcacaacaattatacgttcaatcaaaaaaagagattagttgtgttatatctcaaagatactcaaaagtgaaagcaattcacaacagcagccattatcagcctttcgcaacctttgttgtgttatatctcaaagatactcaaaagtgaaagcaattcacaacaaattattgtttaaccgatgaaggctttctgttgtgttatatctcaaagatactcaaaagtgaaagcaattcacaacgggacgcaattcttgaagaaatcgcaaatcgttgtgttatatctcaaagatactcaaaagtgaaagcaattcacaacccttgcgtcgtcgttccgttgtcttcgaaagttgtgttatatctcaaagatactcaaaagtgaaagcaattcacaaccgccgacgatgaattgttttgacgtgatgtgttgtgttatatctcaaagatactcaaaagtgaaagcaattcacaacagctattctttattctttattcatggggttgttgtgttatatctcaaagatactcaaaagtgaaagcaattcacaacccactgtgccgattgaatcacaattttggggttgtgttatatctcaaagatactcaaaagtgaaagcaattcacaacacgacgaccgaatcagtaacgccgaagccggttgtgttatatctcaaagatactcaaaagtgaaagcaattcacaactatgttgcaagatgtatcgaattattcctagttgtgttatatctcaaagatactcaaaagtgaaagcaattcacaactagtgttaataatactttgaacacaaaaatgttgtgttatatctcaaagatactcaaaagtgaaagcaattcacaacaatgattcgaacaggcatatagatagcgacgttgtgttatatctcaaagatactcaaaagtgaaagcaattcacaaccggcgttaatatgccacatatcgacccactgttgtgttatatctcaaagatactcaaaagtgaaagcaattcacaacactaaactcaatctgttttttgaaacatttgttgtgttatatctcaaagatactcaaaagtgaaagcaattcacaacacaatggaaaaagcggaattggaaaaaaaggttgtgttatatctcaaagatactcaaaagtgaaagcaattcacaactataacctcgtctttaattattgttacgttgttgtgttatatctcaaagatactcaaaagtgaaagcaattcacaacgcagtagaaacagaacctacaacttcacccgttgtgttatatctcaaagatactcaaaagtgaaagcaattcacaactcctattctatcaacattaacagttactttgttgtgttatatctcaaagatactcaaaagtgaaagcaattcacaacatgttcgggtatttgccagcaaaaaggcgggttgtgttatatctcaaagatactcaaaagtgaaagcaattcacaacgatactaaattggatttcgtgccagcgttcgttgtgttatatctcaaagatactcaaaagtgaaagcaattcacaacactcacataatcgggggtataaacaacgtcgttgtgttatatctcaaagatactcaaaagtgaaagcaattcacaacaccccgttaaatattcgtataattcctttggttgtgttatatctcaaagatactcaaaagtgaaagcaattcacaactcggcgcgggcgcggcgtttaaatctttcggttgtgttatatctcaaagatactcaaaagtgaaagcaattcacaacatacaaaaggggcggaatttgcgccgacgagttgtgttatatctcaaagatactcaaaagtgaaagcaattcacaacttaactcaaaaagaagtattgaccagctttgttgtgttatatctcaaagatactcaaaagtgaaagcaattcacaaccgccaatatccaccacaagtcttcccattcgttgtgttatatctcaaagatactcaaaagtgaaagcaattcacaacgtccgtgatgtttttggtgctcttgactagttgtgttatatctcaaagatactcaaaagtgaaagcaattcacaacagggcggcgtatcaataagcgaggttaaaggttgtgttatatctcaaagatactcaaaagtgaaagcaattcacaacttccatttataatgaattttttatttccatgttgtgttatatctcaaagatactcaaaagtgaaagcaattcacaacatacaaatataatacttttttaatactaatgttgtgttatatctcaaagatactcaaaagtgaaagcaattcacaacttgttgctttgagttgttcttcgattgtttgttgtgttatatctcaaagatactcaaaagtgaaagcaattcacaacgcttattgaatcatattcttcattatctctgttgtgttatatctcaaagatactcaaaagtgaaagcaattcacaacagtatgcaggtattggcctataacttttcggttgtgttatatctcaaagatactcaaaagtgaaagcaattcacaacgcgaatccgtcaatgcaaacaaagtggtgtgttgtgttatatctcaaagatactcaaaagtgaaagcaattcacaacgctaagtcttctggttgtattttttgaacagttgtgttatatctcaaagatactcaaaagtgaaagcaattcacaacaatctggcggcaacagtttaatacggcaaagttgtgttatatctcaaagatactcaaaagtgaaagcaattcacaacctttaacagctttcttcaatagtttttgaagttgtgttatatctcaaagatactcaaaagtgaaagcaattcacaacaggatcctagatctaaactattctttgaatgttgtgttatatctcaaagatactcaaaagtgaaagcaattcacaactaagttcttttatcttttgtctgtactcccgttgtgttatatctcaaagatactcaaaagtgaaagcaattcacaacgctcttcgtttattggttcatcgtgtcttagttgtgttatatctcaaagatactcaaaagtgaaagcaattcacaaccattataaaaaaatggttctgtattcattggttgtgttatatctcaaagatactcaaaagtgaaagcaattcacaacaatcaaatccctgaattgttctatggtgtggttgtgttatatctcaaagatactcaaaagtgaaagcaattcacaacataattcgattatatcccgcaataaaacccgttgtgttatatctcaaagatactcaaaagtgaaagcaattcacaactcaggaggatgtgtcaagaccggtgatattgttgtgttatatctcaaagatactcaaaagtgaaagcaattcacaacgggaattacttaagaaagtagcgagcgcgtgttgtgttatatctcaaagatactcaaaagtgaaagcaattcacaacactaatatcccataaggcaaataaggcgcagttgtgttatatctcaaagatactcaaaaatgaaagcaattcacaacccatcgtcatattctttctttctgaccatcgttgtgttatatctcaaagatactcaaaaatgaaagcaattcacaactgaatacttattaacaacttcatcatcaaagttgtgctatatctcaaagatactcaaaaatgaaagcaattcttaaaatgaaaggtatttgaggattcacgtgcaatatcgtttttccaattttaaaataacaggaaaatggtcactatatccgcccatgtaccgtgaacccgaataagtgcggtgaggatatttgttgttcttgttgtctttgtttctaagtcggggagagttgtagatttcggctgcgattttatttaaatccaattgttctattagtgatttctctgtgcaaatgatttggtcaaaacaaacgcctttctttccgtgataagttgaaaatcgatcgtcttccaataatgcttcaaaaggattgtcaaggattttctctccattttcattgtgtagtagttctttcaagatttcattatcaggattttcattgaagtcgcccatcaggattatactttcatttttatcaaataatttctgaagtattcctttcaacttctcgaaaatataatcccgttgctcttttttagcatcttgattccttttggaaggaaggtgaacaacaaagagatgaagccttttcccctgatataaaaactctgcgtgcaaaatatcccgtgtctcaaaaattttttcttcatccaattgaaactgtaatgtctgatatttttctaaggtcaatctcctttcatcaaaaagcaaagcaacgcttagataccgggagtcattagatcgttcaaagatgactttataatctttaataggagaatctgctttaatcaaatcgtccaatactgacctcgcaccaatctcagccaagccaatgatagaaggtaattgcccaaaatcctcttcaacaaaacgaaagacgttggtgatctttctgattttcagattgtatttgtgatcatcccaattatgaaaacctagtgattcttgattgggcggataaaaattctcgacattatagaaaaggaatagatcttggtttgtcattttaccacttctttcttctggtataaatgaatgtacaaaccacgatcagaagcatcagtcccaaagtataaaaataaccatgtttatgatgcagttccggcatattatcgaagttcattccatatattccggcaatgaaagtaatcggtaaaaagtaaaccgaatagatggccagaagcttcatcacctgatttgccttttggtcagacaaggccaaaaacatagaaataaggttgacagtttgggcattcacatgatcaaagtcggcaatgacatctttttgcttatccaataaatccatcacttcaacttcctcaagttcaagatttttgaacttcgagatccattcgcctgagatattcagaatcctggtattgagtccggattttcttttcagcttgtaaagtcttcggatttggttcgtctgattcgtatttttcagaaagatttcgttttccatagcatccatcacttccaacagtgtctgactctcatcatcaaaggtcttcataaccttcagggccagtcgaagagccagccgatcacgcgaaatatcctcagggttatctttcttcagttcctcaaaaacctcattgatgcttttgcttttcacccggtgagttgtgataatcagctttggtaaaagaaaaatccccaatttactgctgatatcactgatgctgttcagatttcgcctttctaggtctgtagattctctcgtcaggaaaaacttcacattattcacttcctcatactttggaaggtggttcgggtctatcgtgtcctccaataaaaggtaattgatatgataacgctcgttcaaaaaacggaggtcttcttccgtcggcgcaatcacgtcaatccattcccaattggcagttttgtatttctgttctatcggcatataacaaaactaaataaaatctcagtaataattataattttgtttagggcaactttatccgccttccactcccgcttttttcttttttgagaaaaaagaaaaagagctccgttcaagtcgggttgcgagtggtccgatgctcagagggtttatgagagatagaaaaaatctgttaatctgaaacttatgtattaaataaaatatttatttttgcggatatttttatcaaattctaaaaatgtttaaaagcataataaccggagtaggacactacgttccggaaaacatagtaacaaacgacgatctttctaagctgatgactaccaacgatgaatggattacggaaagaactgggatcaaagaaagaagacatcgcaaaaaccgagtagattctgaagaaacaacttctttttacggtttcaaagcttcagaaatcgcccttaaaaatgcgaatctcacagcaaaagatattgattatattgttttcgcaactttatcaccggattatttcttccccggctctggcgttctcttacaagagttgttgggttgtgacacgattggcgcattagatgtaagaaaccaatgttctggttttgtctatgcgatgagtgttgctgatgcttttatcaaatccggactttacaaaaatgttttggttgtaggagctgagattcattcatttggtttggatatgagtgatagaggtcgtggtgtttctgttattttcggagacggagcaggagcagtggttttatctgcaagcgaaggtgaaaatgcaaaaggaatcttatccgtgaatatgcattccgaaggaaaatatgccgaagaattagccgtgaaattccccgggaccaaattaggctggagtgatgttttgctgaataacccagattctttgacagcagaagacatctatcctgtgatgaatggaaactttgttttcaaacacgcagttacaagatttccggagacaattttagaagcgcttgaaaaagctgggaaaaagattgaagatttagatttgttgattcctcaccaggcgaatatcagaattgcacaatatgttcagcaattattgcatcttccagacgaaaaagtatttgtgaatattcagaaatatggaaatacgaccgccgcttctattccgattgctttgagtgaggcaattatggaaggtagaatgaaacgtggcgatttggtttgtttgtctgctttcgggagtggtttcacttggggaagcgttctgttcgaatattaataaagacaaaagaatcaaataagaagataaaggattttaaaacaacaagagctattcagattctgaatagctcttgttttattgattgattttctgaacgactttatctgataaagatttcaattgttccatttcatcaagattgagattcattgcttttgccagttcgatcgggatacaggtagctttttctttaagttttgcacctttttcggtcaaatagattttaacaactcgctcatcctccttgcttcgttttctttccaggtaacctttggattctaatcttttcaacaaaggtgtcaaggttccgttatccaattgtaaaacctcaccaacttgattgacggtcagatcgtccttttcccaaagagccatcattgcaatatattgtggataggtcaacccaatatttttcagaatcggacgatagcactgcattatttcgcgatgtaaaacataaacggaaaaacagagttgcctgtcaagttttaatagatcttccatgtcgagttttgagttgatctcacaattcaaagataaataattttgctccggttgggggaacaaaatttaatcattgctcacagtcaattttacatcgatgtttcctcttgtcgcattagagtaaggacaaatttgatgcgctttttcaatcaattcctgagcttgttccaaagaaacacccggaatgttggcgtgtaattctgcctccaaaccaaatcctccattttcaatttgcccgattcctactttcgcagtaaccgttgtttcaccagtttcgattttgctttgtttgataaccaaattcaatgcgctgtcaaaacaagccgaatatcctgctgcgaaaagcatttccggattggcgtaatcgtcattcgcaccacctagaccttttggcattcttacttccaaatccagaattccgttatcactttttacgtttccgtttcttcctcctttggctgttgcgccaatactgtacaatgttttcatttttgatgatttaattattatttgatggtacaaatgtattttgaaaaattatattgtgcaaaatataatttcacatttaaatcaaaatctattattgatgtaaactataatctttttaagaattatataaaatcataatagccattagccttaccaagaattttttgatcatcggaattcaaccatcttt

SEQ ID NO: 1228 - DNA, 24317 bp, synthetic construct
  source 1..24317: mol_type = other DNA
  misc_feature 1..24317: note = Synthetic
aggctgcaaaggatttcacggcgtatgtgaaaaatatcggctatgacaacaatacgcttcctgaagcattggaaaaagcaggtgcagtgggaattgccatttcaaactggaccggaattatgggagccaacagaatattcggagcaaaaacatcaaagattccgatggtcgatattgatgtggaagactatggaatgctttacagaatggcagagaaaggagcacagcctaaaattaagatcgatgcccagtctaaaatacttcctgaagcgaaaagcttcaataccatcgggatgatcaaagggaaggaaaaaccggatgaatatgtaattctttctgcccaccttgattcatgggacggagctcagggcgctacagacaacggaacgggtacccttaccatgctggaaaccatgagaatccttaaaaagtattatccgaacaacaaaagaaccatcgtaatcggactttggggaagcgaagagcaggggctgaacggttccagaggctttgtggcagataatccccagatcatcaaaggagtacaggctgctttcaaccaggataacggaaccggtcgtgtggtcaatatcagcggccaggggtttgtaaaagcctatgactatgtaggaagatggcttgaaggtgttccgaagtcggtaagaagccatatcaaaacggattttccgggaatgcccggtggaggtggttctgaccatgcttcatttgtagctgccggagtaccgggaatttctctgggatccctgaactgggggtatttcggatatacctggcataccaccaaagatacctatgacaagatcgtttttgatgaggtaaaaaataatgtggttctcaccgcagcattagcctatatggcctctgaagatccggaattctctgacagggagaaaagggtaatgccacaggatgaaaaaggagaaaccgtaaaatggcctgaagccaaagaaccgagaagaagttcaaaggattataaataaagatttaatttaattggactttatacagaaaaggctgtcttatggcagccttttactattgatatttaatatattaaatttttggaatttattgatgtgaatagatattatgtaaaataaatcactatatttggataaataataaaattaaaacaaatcttatagatttcaataaaaagcagctgttatcagttaagtttctttttatgccatacttctttttcaggccataggtgcacatctaaaaaatctgtgtattcgtggcaaacccataagagaccactcaaaaatgagcggtctctttttaatgcattacatgccagtatcgtttcattggccggagtattattgagaatattattttttagatttaatcatatatcgaagcattgtgctaactccctttattgtttacattatctgttttattcaacattccggtttatatttttatacggttttacgactcctgcgtttgattttctattgtacatatagctgttgtattgtatgaaaataattgcaataaaaatgcaaatgattacaaaataatgtagcggccggatttttaattttaaaaaccttttagaattaaaaaacacaaaatacattatgaaaaagaatatttcgaatcggggaaactccgttcaggaaagtgattctgctgtgaacctctattttgtaaaacagggagaaacactggaaagcatatcctgggatctgaaccttgaaaattatgaatacctccgggaataccacaatgtgcgctgtagcccgttggatcttattcccggagatggaacattaagactcctgcaaaagctttgtattccgtcatcagatgaaatacaggccatcaacaggacgataagggagaacggtgaaagcctgcgttatcttcttcctgaggggagtatcccatttgatatcagcctggtcaacggcgattatgctgtaagacagactgaaagtgatgacggagtgcaaaaatccgaatatgcctatgaattgcatttcacctatgtaaaagaagaggaaggaaggtattatgtgcagttttcaatgggtggttttaaaaaagacggtgaagaacccgggcagaaaatcagtagccttgccgctgattttgtgaaaataatttatccggtaaccctgatcacagatcattcgggaaactttgtagcggcagaatctcataaagagattacagaaattatccgtgaaattgaaaaactgaaaaattaccatacagggccctatgctgcatctcatattgaccagatgaaacagacaatggcagatccgcagaatatgtataatagtttaaagaaaatgttagccatacaattcatttttaaccgcttttatcaggcacattatcactcaaaggataccacatttccttataaggatgagttgtcatggctggctccggctttacctgtcaggatggaaatgatacatcagattttgccgcagacagattccgggttcatagagctcttacagaaaggaagatcggcagattaccgtactgttcaggaattgtattttactcatcaggattatgatgagcatatcaggccgcatccggcatctgtaggagcccgtcataaggctttatatactttggacggtaaagatttttctattctgaagatcaatgctgcaacggaacttcagatgcccggttatgagaaaaaaataacttttgaactggaaaaattaataggccacaattaccattgatacccaccatacttacatcactattataatgacagaaagtttatctgcccatgacggcaagcactttatcgtccggaaaggcaaagcctgctgtaaccagggagatcagtttccccggttcatggttacatcccatcagaaacattactggaatcataaagacgcaacagcagattatcttgcggtaacagaagatgatgtacagtttgatccacccggaccaagttttggaaaatgtaaattaaaacccacctctgccgggtatcttccctgcgcttttgctcctgccggaaaatggaagaaaacatatgaaaagaccaaggtgatgggtaaaagctgcctttcggaaatttctgagctgatgtgctgtaccggcggaaagattaccgtaaaggaacacggccagacgtctgttatgaaccggcagaatataacgtttgctgattccggggcctatcatatgatcaatccgtttatagatttaaaagaatttcagaaagaactggaagatccggatcccgtgtatgaataatcttcaaaatgaacagatatggcaaaattgactattacaggaaacaccaggcctacagtgggagaaacggaaatgtattcgctttctttatccgatccctttacactgctgaatcccgttgcttttccacttacgaagatagaatggaatattcatgtccaggataggaaagggtggcgcataaccaatggaaatctgaaggaagggacactggtgacctataaatttacagataaaagcctccaatataaagcccttaaaattgaagtgatcagagggaaagacaaaggagatctgtatataaaacctcagcctgctgagaatcccggaataacccatgtggaattgctggatattcattctaaaaggattccaaagggaaagctcatgcattataccgatacgataattgtcaaagcctattgtgtcgggatgttcgggcaaaaggttgcttttaccctttgggaagacgatgcaacaggtaaagggcacgatcctgtcgtgaatatgatgaataagatcaatagaattcctcttaccggtgaggtagatcatgaaggagttgccagggtggtcttcctgcttcctgcttatacgctggcagttcagatcgccaatgcaggagttgccaaaggagataagaacgaaggaaaaacacatgaatattatgtaactgcagaagtgatttcaaaacatattctcaaagccagcccgaatgtgaatgtagccaatccgggatatatccctccggtgtctgatcaacgtaaatcaaaggaaatttctttatccggaaatggatcagcacagaataacccgaagccgaaggaaaatacagccaaatttccacaaaccccggcggcaaagaaacaggcagatccggaaggaagaattctgagtgcagagtttacagatggtacaggaaaaactttgaaaaatgccggaacaggagatatcgtttccattaaaataacctctcagaatatgaaagggaagagtgtaaaggtaaagatctgggaagaagacctgatacgctacagcaatgatcttttatacgaaatcccggtagtgttggcctatgatacgtataattttatcaatggaatcccgcttaccagaaagatgtatgccaaagggaatgaatggggcgaaggatcttcacaggagtacttcatagaagtggagcatctcaatacctccgtcacttcctgggtaattccggtaaatccggatgctgaacctgtgaaagtggaggataatgattctgtagtgattattaaagagaaaaaacaagaacgtattgaaaaagcaaagatatgtgaatgtgaagccagactgagagcttttatgagaatgataaggattggtgaaggtactgaagatgaagccggttataccagaatagttggaggaagcagttttaaagatcatggaaaagacatgagcacacatcctaaagtttatattgaaaaatatgattctacggcagcaggggcttatcagattactaaaacaaattggaatagtgaagcttttgcaaagtggagaattgataataatgtcagtgatttctctaaagaaagccaggatatttattgtgcttatcttattattaaaaagaaaaaagcatttgaaaatattaattctaatgatattgacggggctattgataagtgcagtaaagaatgggcaagtcttccaggcgcaggttatggccaaagagaggagagcagagaaaaaattaaaacaaaatataaagcatttttacatcaagaactgtctgatagcagtaacctgcatttaaaaaaaggattcttaaaaagatactttggaatccattgctgtgataccattctaaaaacggaacaagataaatctgatgatattatgatcatttttgataaaaatattgaagttgaaagacaaaaaattgtttctgagaagacaaaaaatattctgaaaaaggcagccaggtcatctggaaataaaaagataatcataacaagtactataagatctccgagaaaacaagcggaagcaatgtataataatgaaagtaacggaagacatattaagtatgcttctcccgggagacaagtactaaatgtttataatttaatgaaaaatcaaggaaaagagagaacgattaatgcaatggttgagaaaatcaatgagctatccagacagggtaaaagagtgtcattgcactgtgttgcagaatcagaatatgcaaaattaaacattctggatgtttcctataccaacggattagttaattatcagcaatttatattggatttggcaaaagatatttcggtgataaagatcattcatcctatagtaagtgttggaactaaaggaaaaataaattacgataatggagaacctgcaattcacatagaaattcaacagtaatgatgaaattatacctgatatgtattctcctgatgttttcatgcagtgggaacagtaaaaaagcagagaaagaaccccttattcatgaaaattctttattctcttcaaaagccggtaatctttctggctgtaatctgaaatataatgaacttggtttagccgtaaaatcaaataatttaaaaagagttcaacagcttttacaaaatggagccgatattgaaacagcaggagaagatgatttcaatgcgtatggagcgttatatgttgctgtagtggctggaaacggggaaatgattaaactcattattaaaaataaggccaatgttaatccgatgataaatgatgaaggctataccttaatgattgccgctatacaatccggtaaaataagtactgtcagaacattaatacattcaggcacaaaaataaatgcggtaaatgatattgaaggaaataaaaaatttgttccgcttctggtagccatcatcaatgagcaatctgatatttttaaattattgattgattcaggagcagatccttttgaaaagaatttcgaaaatatttctgcatatgattatgctaaagagcataatgtgagatttttatcattatttaacgacaggaaatatgacaacaaagaggacacggttattgttgaagggatatataaaaatgattgtaaatctgaaacagggctgataatcctggatgctgaaaatgcatatctggacttaatgacccatgatggctatgtaagattggtgatggctattaagaataatgatatttttttcaattccctggcagcaattacacgtttaaacaaaacattagactggaaatccatttccttagaaaagccggttctgagaatagagccggtctctgaagataaaatttcagtacattggacagggttttatgattcaaggataaaaacagtagaaattccggaaaacccatttattattgaaggaaagaaagaccgtattattgaaagatgtaaataaaataaccgaggcaaacgatacgcttgcaccggcaaaagcaaaaactccaatactgtttattaaacagtattggagttttcagttaaaaaatattcctgctaccaaaaggttatacatacagttccaggtccggaaaagctgcaatagctggctggtaatcatcagtgttcagatgcccgaatccgtatttacagaaaataaatgatagggtattcgattgtgaagcatcataatctgtctgggtatcaccaatatataccgtgtcttcaggagataagtgatttctcttcattatgagctgtatattctctgattttggtttttgggtccggccatgggactcaaaatcggtgaacaggtcattgaactgataatattctaaaaatgcttcgatatacccatcctggcagttgctgacaataaacaggcggtgatcttcagaaagctttttcagggtttcttcaacacccctgtacaagatgccgccacgggcacgcaggacctctttttccttcgctatgatgttggaaagaacttcctgtaccttctggtcagaaataccggatacaatatctttgatgatatctttagccaaaagtcccatataagggttcatatcttcaggtttcagctccctttcgatcagttgatgttcatacaaaacatcgttccatattccgatgatcgtcgaccggggatcccaaagtgttccgtccagatcgaaaattaaatgtttatacttcaaaataggtatttaatagtgttggttaattaggcagtaagcaggaggcaggaggcagtaagcgataggcgggaggcggaagtcactgtctgctttttatatttgatcatgaataaaactgatcaaaacaaaatgaaaagtcagaaagctgttattgatgacttaaaaaagtacttctctcttccagtttccggcttcccgctccgtcactataaaatcatactcagctgaaccctttttctcgcttcatctacttccgttacttttacccttacgtgctggtgaagttttaccacttcattcacatcagatacaaagccgtctttcagttgggagatgtgtacaagcccgctttctttgatgcccaggtctacaaaacatccgaatgcggtaatattgttgacgattcccggaaggatcatccctgctttgagatctttaatgctttttacattagggtcaaactcaaaaactttagccgcttttctaggatccagaccaggcttttcaagctctttaaggatatctctgatccccaggattccgatttcctccgtgatatacgattcaggttttaccagagctattttttctttattggcgatcagttcatttgttttaatgcccaggtctttagccattttttctataattccgtaagcttcggggtgcactgcagaattatccagtggatttttgccattggagatccttacaaaagctgccgcctgctggaaggctttttctccaagccttggtactttcttcaactgcttcctgtcttcaaaagccccgttttcagcccggtaattaacgatattttcagccattttctctccgattccggaaacatagctcaacaaagatttactcgctgtatttacattgatgcccactgagttcacacatttcatcaccgtagcatcaagctcgtttttcaattgcgtctggtctacatcatgctggtattgccccacgccgatagatttcggatcaatctttaccagttctgccaacggatcagaaagtctccttccgatcgaaaccgctccacgtacagtcacgtcatacgtcggaaactcctcccttgcaatcttgcttgcggaatatacagaggctccggcttcagaaaccacaaaaacctgtaacggcttgtcaaaagcaatctttttaataaaaaactccgtttcacggctcgctgttccgtttccgatagagatggcttcaatattataggcgtttaccatagaacggatctttttcatcgccattccgctttcattctggggggcgtgagggtagagggtttcgttgtgcagcaggtcgcctttctcgtccaggcaaaccactttacagccgcttctgtatcccggatctatcgcaaggatccttttttctcccaaaggcggggctaaaagcagctggctcaggttttcagagaagatctcaatagctttccggtccgctttttccttagcttcctgcagggcctcattggaaatggcgggctccagaagtcttttataactgtctttaatggccagggcgatgtgctctgcgctttcattatccgatttaatgatggctttttctatgaagtcaatcgcttcttccttatcaattcctacatgggttttcacaaacccttcagattctgctctcaacatagcgagaagcctgtgtgaaggtgttctgctgaggttctcttcccattcaaaatactgggcgaacttttgggcttcttcctcatcttttctggctttcactactttagaagtcactacagccttacgctggaatatacggcgaaggtttttacgcacatacatattttcattgatccattctgccatgatatccctggctccctgaagagcctcttcctcagatcctacctcattgtttacgtatttcgacgccaacaatagaacatcattattcttctggctcatgatgatcttggctaaaggttccagtcctttttctttagcggcatcagccttggttttcttgcgttttttaaaaggcaggtatagatcttccagttcctgaaggtcaaaactgtcttcaatcctctgtctgagttcaggagtcaaagcatcctgttcttctatagacttgagaatagattcctttcttttgatgatctcttcaaactgcctgctgatcctggcaatctgctcaatctgggtttcatcaaggttgccggttttatccttccggtaacgggcaataaaaggaatggtgcagtcttctgccagtaattgtaaagtattgttgatgctcttctcagaaatattgagctgcttctgtataaatgctacggtcgtcattgtttgttttcgaatagctaaaatagggttttaaaacgaaaaaaggcgagttgccccgccttgaatgttttcacaacggaataatccttattgtgaattgcttttcaaaattattgatacaaatatagatgaaaaactcttaagttgatttacgggaaacctcaattttaataatttttttatttctatttttatgtggtatctaaaaattaataatgatgattaaaactatacttggattagacttgggaacgaattctattggctgggcattgataaagcaaaactttgaaaataagtatggtgaaatccttgggatgggaagccgtattattccaatgtcacaggatattttaggagaattcggaaaagggaattctgtttcacaaactgctgcaagaactgattacagagcaacaagaagacttcgtgaaagatttttattaagaagagaaagacttcacagagttttaaacgtattgaacttccttccggaacattatgcttcgcaaattgattttgacaaacgattcggaaagtttaaagttgaaaccgaaccgaaacttgcatggaaaaatattgatggaaaattttcatttttatttcaaacttctttcaatgagatgctggaagattttaaggcacatgggcaggatttaaaagttccttatgactggacaatttattatctccgcaaaaaggcactctcacaaaaaatagaaaaagaagaattggtctggattcttttaaactttaaccaaaaacgtggatattatcaactgcgtggtgaagaagaggaagagaaccctaataaactgatagagttttattctttaaaaattatagatgttttggcagacgaacctcaaaaaggaaaatcggatatttggtattctttggtcttggaaaatggttggatttacagacgatccagcaaaacatctttgctggattggaaagataaaataagagactttattgttactactgatttaaatgatgatggaagcgtcaaaactgataaagaaggaaatgagaaaagaagtttccgtgctcctggtgaaaatgactggacgcttgtaaaaacaaaaacagagcaggagatagacagatcccgaaaaactgtagggaactatatttacgaaacgcttcttcaaaaccctaaacagaaaatcaaagggaaactcgttcgcaccatagaaaggaagttttataaagaagaacttaagcggattttagaaaaacagaaagaattccaccgtgaattggagagtaacgatctctataacgattgtatccgggaattatacaggaataatgaagctcatcaattgactttaagcaaaaaagattttgttcatctttttatggaggatattattttttaccaaagacctttgaaaagtcagaaatcatctatctccaactgtactttggaattcagaaagtataaagatgaaaatggaatagaacatacacaatttttaaaagccattccgaagtccaatccttattatcaggaatttagaatctggcagtggatttttaatctgaatatttataaaaaagataatgatgataacgttacaaaagaatttctaaacactaccagggatttcgaaaatttgtttgagtttttaaacaacagaaaagaaattgagcagaagccattacttaaatttttgctggagcaaaaggaatttaaaggaaaattactaaatgccgaaaccgaaaagtttcgctggaattatgttgaagacaaaaaatatccttgtaatgaaaccagaacaatgatttctgaaaggttgaaaaaagtagaaaatatttctgacgactttctgaccagagaaatggaacagaagatctggcatatcatctattctgtaaatgataaaacagaatacgaaaaagcattgaaatcttttgcagaaaaaaataatctggatgaaaattctttatttgaagcattcaaaaagttgcctccttttaaaagtgaatacggttctttttctgaaaaagcgattaaaaaattgttgcctttaatgcggctgggcaaatattggagttatgccaaaatcgatctgtattcaaaaaataggattcagaaaattattacgggtgaatttgatgaaaatatcaaagatagggtgagagaaaaggcaattcgtctcacagctgaaaatgatttccagggtttacaattgtggttagcacaatatattgtttacggaaggcattcagaggcatcaatgatcggaaaatggaactctgcagatgatctggaagaattcctgaaagaatttaaacagcattcgcttcgtaatccaattgtagaacaggtgattacagaaacgcttcgtatagtaaaagatatctggttgaaatatggaaatggagctaaagatttcttcaatgaaattcatattgagctaggaagggaaatgaaacaaactaaagatgaaagagcaaatgccacaaaaacaataacggaaaacgaaaataccaaccttcgtattaaagctttattggccgaaatgatgaatgaccattctgttgaaaatgttcgcccttattctccaatgcagcaagagattttgaaaatttatgaagatgggattttaaaatcagatatagaaattgacgatgatattctgaaaataagtaaaacagcacagccttcttcatctgatttaaaacgatataaactttggcttgaacagaagtataaatcaccttacacaggacagattattccattaaataaattgtttacaccggaatatgaaattgaacatatcattccacaaagcagatactttgatgatagttttagcaataaaattatttgcgaatcagcggttaataaattgaaggataattatatcggtttaggatttattaagcaatttggaggtaccattattgagtgtggttttggaaaaagggtgaaagtgtttgaagttggagaatatgaagaatttgtcaaaaagcattatgccaataatagagggaaaagaaataaactccttttagaagaaattcctgaaaaaatgattgaacgtcagatgaatgatacccgtcatatcagtaaatatatatcagggattctttcccatattgtgagagtggaggatggaacagatgaaggggtgaattccaaaaatgttattcccggaaatggaaaaatcaccacacaactcagacaggactggggattgaatgatgtttggaatgaattgattctgccacgttttgaacggatgaatcaattgacgaattcaacagattttacttcctggaatgaaaaccatcagaaatatttaccaacggttccggtagagttttcaaaaggattttcaaagaaaagaatcgaccatcgccatcacgctttagatgctttggttattgcctgtgccacaaaagaccacgtaaatttactcaacaatcaatcggctaaatcggctacaaaacggtatgatttgaagaagaaactgatgaagtttgagaaaacagtgtataaagatcctcaaacggagaaaagaatagagcgggaagtgcccaaacattttttgaaaccttgggaaacctttacggttgatgccaaaaatagattggaaacaataatcgtgagctttaagcaaaaccttcgtgtcatcaataaagctactaattattatgaaaaatatgtagaaaaagatggtgtgatgatgaaagaaagagtagagcagacgggtacaaactgggcaataagaaaaccgatgcataaagaaacagtttccgggaaaattgatttaccctgggtaaaagttccgaaaggaaaaattttgacagcaaccaggaaaagtctggatacctcttttgatttaaaagcaattgcgtcaattacagataccggaattcagaaaattcttaaaaattacctggaatttaaagaaagtccggagttagcattttcgcctgaaggaattgaggatatgaataaaaatatcgaaaaatataacggtggaagacctcatcaacctatcagtaaggtaagagtttttgaattaggaagtaaatttcaagttggccaaaccggaaataaaaaagataaatatgtggaagcagccaaaggaactaatttgttttttgcaatttatgaagataaaaagggaaaaagaagctatgaaactattccgttgaatgaagttattgaaagacaaaaacaaggattatctgttgttgatttaaaaaacgtaaatgattttttcctctgcccgaatgatttagtatatattccttcaggtgatgaatttgaaaacagaggcagtattgaaattgaaaatataacaaaagagaaaagtgaaagattttataaggtcgtaagtttttcaggaagtcagatattttttgtaaggcatgatattgctgtatcaattgttaataaaggagaattttcaacattgaataaaatggaacgggcaattgatggctcaatggttaaagaaatttgtatcaagctgaaaatagaccgtttaggagatgttttaaaagcataagatatatcaaaagaataaattctttcaaaaagcttaaaccatgatcacccgctccatctacatcggaaatcccgcttatcttaaactcaaagatgaacaaatgtatattttagatccttctactaaggaaatgaaaggcaaggttcctgtggaagatttgggattactgatgctggatcattttcagatcactatttcacatcagctaattcagaaaatgatgggaaacaatgtggttgtggttagttgtgatgggcagcatttaccacacggaatgatgcttccgttgtatgggcatactgaacattctgacaggatcaaagaccagttagaagccagtgaacctcttaaaaaacaactttggaaacagacggttgaatgtaaaattgaaaaccagaaaaaagttttaaaacgattaggaaattattatgaaccgatggctgactatcagaataatgtgaaaagcggcgatattacgaatatggaaggtattgcagcacaacattactggaagtatctcatcagtctggattttttgagacagcgttttggagattcacccaatcagtttttcaattttggctattcggtgctcagaagtattgtagcaagagcaattgttgaaaccggattacttccagttctgggtattttccacaagaataaatacaatccttactgtctggctgacgatctgatggaaccttatcgcccattcattgatttgcttgtgatgcagtggctggaaattcattctgatacagaagaattgacaaaagagtttaaagctcatattctgcagattgctaccaaagatgttcgtattgacgacaaaacgagacctctgttggttgccgttaaaataactgcttcgtcactgtacaaatgctatacaggcgaaaaacgtctgatctcttatcctgaattattatgaattccgaaaggtttaatgcatatagaattatgtgggttttagtattatatgatttaccgacagagactaaggccaatatgaaagatgctaaccgctttcgtaaatctttgcttgatgatggttttacattgtttcagttttcaatgtatgtaagacattgcccgagccgtgaaaatgctgaagttcatattaaaagagtgaaatttatgcttccaaaagcagggaaagttgccattatgtgcatcactgataagcaatttggagatattgaaatattctttgccagaaataaagaagaaccgccaccaacctttcaacagcttgaattattctaaattttaaattctaaaaacaaaaataatctactgaaaaccagtagattattttttgaggctgtgactaatcacgaagataataatttttgaaagcaattcacaactaaacaaagcaacaggtcaaaaggatgctggctgtgactaatcacgaagataataatttttgaaagcaattcacaacacttaactgctgctttcttatagcccttgagctgtgactaatcacgaagataataatttttgaaagcaattcacaacatgaaggctataatgttgttgagtatcaacgctgtgactaatcacgaagataataatttttgaaagcaattcacaaccacatgcgataactactatcgcgcgggttcgctgtgactaatcacgaagataataatttttgaaagcaattcacaacgctcggtaaaaacagtttttagcatttacagctgtgactaatcacgaagataataatttttgaaagcaattcacaaccccccggattatataccctggctacagaaggctgtgactaatcacgaagataataatttttgaaagcaattcacaacctaagctttgaatcaaatgtaaacatttttgctgtgactaatcacgaagataataatttttgaaagcaattcacaacacagtacaaaaataattgtacattagcggagctgtgactaatcacgaagataataatttttgaaagcaattcacaacagcccgaacatttgagtaaaatgagtaaaagctgtgactaatcacgaagataataatttttgaaagcaattcacaacaagttcagcaattgcatcttgaacagctttgctgtgactaatcacgaagataataatttttgaaagcaattcacaacttattttcctaaagatcgtttctgtggttggctgtgactaatcacgaagataataatttttgaaagcaattcacaacagagatacataaaacataaagcaccaaatagctgtgactaatcacgaagataataatttttgaaagcaattcacaaccccaattgatctgcagaatataaccgaagagctgtgactaatcacgaagataataatttttgaaagcaattcacaacagaagactggaagggattattaatcgaattgctgtgactaatcacgaagataataatttttgaaagcaattcacaacacattctttgatattgacgccaataagaacgctgtgactaatcacgaagataataatttttgaaagcaattcacaacacgagcccgcctcagttcttctgccctttggctgtgactaatcacgaagataataatttttgaaagcaattcacaacaattgcgtttgctattgttcctgtaccgttgctgtgactaatcacgaagataataatttttgaaagcaattcacaacagctgtcataacagcaaaaacttacgatgagctgtgactaatcacgaagataataatttttgaaagcaattcacaactaccaaccaaattactttttaactcgttttgctgtgactaatcacaaagctattaaatttctaatcttccattaatttattctgtctgcaggtttttcaacgtcctcgccgaaactgtaaacgcatcttttaaagctgtttgtgtatcaacggaattgatatgtgcgtcccattcttcgaaagcaacaatatcactgactacgaaaatagcgccaacggagacattccgaaattgacctactgcgaacattgaagcagcttccatttctactgtgtctatgcctaacttgctataataagcaatttcatctgcggtttcacgatacattgaatctatagtccaggaacttcctgttttataggttgcttttatcgagtttaatgtgcggtcaattgcggcagtcatcgatgttgacgcataggcaaacatttcatcaggaagataatgataggataatccctcgtctctgacagctttttcacagagaatcatagagcctattggcaagtctttttgtaagcagcccgcatgtccgatcataatatgattttttattccctgcgatataaggatctcgagtaaatgagtgctcgctggtccaccaataccaaagtttccaaccactgctatgccttgaaattccccctgaagaatatgtatatccgcggtccaaaatctacccgattcatttttgtaattagcttttatgaactccataagatattcttcataacaaaaaataactgaatgaatgggtttatgttgtaaaaatgaatcaatatcagcgctaaagtgatctttcggagtcaatgcaaccttctggagatattttttcgggaaaacaggtacagccataattataggtattgaattgttggaaatctaagatacaaataatgatccttaattttaaatataaaaaatgaagaaatctttaatgacttgtgaattaaatctatataatattccagtgatattggcagattcacagatgggaataacagacttaatactacatgaccttttttaaaataggttatggtaaaccgtattttagttatgacatgatagtatatttttggaccaattaaataatataccatgaaaaaaataattttacttactgtgttttttgtagtggcaatatcttgtagtggtggtggatctgactccggaggctgttcttacaatggacatgctctgcatgttggtgaaaaaggaggttgctattatgtgaattcttccggcaataaagaatatgtagataaaaagcactgtagtagttgttactgaataaacaattccccactcttgagtgggggattttattactttgcttttgtcatagcttggaaaaagtgagattccttatataatatgccaccatgtagctgccaccccagtacaagatggtcattaacttgtttttctaagtcatatgttccttgaccgacaatgattttgtattgcataatatcactaatttaagctggcaatgtacaaacaattcaaactcagtcattacggtttcccgtagagctattactacagtctatcagtatatttacggaaaaggccaaaatatattattgcgtgatgtattgttcttaaatttactagctttaataaatagaaaactcttattcctcctggggtatccggggaatttttttgtttttttaaatccaatttttaattctcatcgtatatcaaaatacaactgattgactgaaacgattgcaaaatagtttctgatcatttaaatttgcccccgattctcatgtttatttgagttttcatggttattagtttttttatccccggcgaagtccggggatttttttggataattttttttaacacgtcaggtatgtataaaaggcggcggagacaggagagttgtatccctgatggtgtcgacttttgctgtgacttatcacgaagatgataattttattatcaatgtatatattaatcaattataaattaatctttaagtttttactttctttcaatatatcttacatattttatttacctatgttctcaaaaatcaaaactaatagtatgagaacaatattgcccctattcatatgtttttactgcatgatatcctgtatgaataccaatcctgaagaatcaaaaatatgtaaatgcaacgtacaggaatacgaacggattattgtatttaaaaatgaaaatgatggtacttatacaggatattctgatactggatgggctgccaaaggagatcttaagcaagatagtgctgtagattgctttaaaaatcaaatggtgaagaatgaggaattttcaagcaattatgattcgcaatacagaagggagatacaccgtaaatggatttacacttgcaaataacagaaatttgtatttcttgatatatgttaagatatcgtaagggaggtttttctacttttgtacccggaaataaaaatttcaataaacattttaaacattttaacaatatgaaaaaaattagcgtaattgcattggcagcagtaggattacttttagcatcatgtaacaaagaaaaatcagcagagtctgcagctacagcccaggagcaaaccgtagctgagagcaaaggtgaaacactggcagtagatacggtagcttcagtagtaaactggaaagcctaccataaaggggggatggctcctcgttggggaacacttacggtaaagtccggagacatcagtgttgatgcaggccaggttactgcaggaaactttgtgattgacatgaactctataaaagtagatccggcttcagtaacagaaaaagacaaaaaaccggctgatcttgaaggtcacctgaaaagccctgacttctttgatgtagcgaaaaaccctacctcagatttcaaaattacaagcgttacagatttgaaagaagcaccaaaagatgccatagcaggcgctaataaaaccgtaagcggaaaccttaccctatcaggaaaaacaatgaacgttactttccctgctaaagtagatgtagcagaaggtacagcagctgttcaggctaagtttacagtaaacagagcagattgggggatcaaattcggtacttcggaagccgatcctgcagaatggatgatcagcaaagatatcgagattgcgatcgatgtaaaagctaaaaaataattttcagacgtatcaacagtctgcaagctgctttctttgggaagcagcttttttgttttttgaggtaaaacttttattgtagccgggaaaggatttaaaaggcaatcaacattattttccggaagattttgaaaaattcatagggggaaggagtaatcatgaagaatattcagcatggaaagtaaattcagattttaatcgctttacatcatttaacgaataatttttattaatcccagtatgattttcaaaaagaggtgaagaaaatgttttttatattaaaaggtgattattgtttgattttcagttgtttattggtattatttttgaagaaaattgattagtatctgataatgatttctgatatgaccgtaagattttatgaagataagatacaaccaagtataacaccaaaataccaaaatgatggaaaagaatgtaaatcctcaaaaagaggcagacccgtatccgcatgatcttttggctctttttgctgaaattttaaatgttcttcaaaagaaagagccggatcattttccgttttatgacagtgccgatgtcaaacgtttgctgaatatcagcgacagcactttgcaccgcatcaggaaatcagagaagattccgtatgttaagatcggaaacaaaatattttacccgaaatcatttttcaacaacgccttcaaatcatgaaggctttttttatgaagtactgtgctattcagatcaccaaatcttacacttatcttcggacttccttcggacgttcttcggatgagcttcgataaaatgattctttttccgaagctcatccgaagaactatcgaagagctatcgaagaaatggaggatcagattcaaaaaccggggagtattacaaaacgtacactattttctgttgaatgaaataaacaatcaaacaaaatgcaatgaaagatcatttgaatgtttgatttttaagagtaagaatgaaaggcttcaccgttgaaggaggtacatgaccatatccgctttataagaatcaatttcatcgattccattctttgtatccttaaaaatcagcagttttaaaaatagaatctttgcgttcaaaaatcctcactattcatcaattcaaagaacaacaatagtgtccctcaacttttgtagccggtcctaaatggttctgcaacctgtcaaaacctgtcagaacagatcaaaacccgtcactatttccacaggtgatgaattattggaaattcctttatacattcgttatgcgaaccaaaaaaacacgtaaaaatggcaagaataacaaaaggaatccttggcggattctcaggaaaagtaggcaccattgtaggggccaactggcgaggaaaagatattatcagaagtatcccaaccccaagcaacagaccacccagtgaaaagcaaatgcttcagcagatgaagtttaagcttgtggtaagctttttacggccccttggtgctattcagaaaaagtatttcggattgaacagcggctcgaaatccaggatcaacctggcggtatcttataccattaatgaagctgttcccgaaggtcttgaaatcccgaatgttgatttccctgaacttaaagtaaaacctaaattcaatggtaatattgcagagatagactggaaaacctctactgatcccaacgattacctgagaagatatggatatgtgtatgatgctttgaacagattatcggcaggcttttaccagaaaaacaataatccgtctgccaaagaatattttgagaagatggactatgatgccaatggtaatattacccagctaaaaagatctgcagcatcagaacagggtgtttctgctcttattgataatcttacttatgcttatgaaggaaacaggttgaagaccgtcaccgatagttcaacagattacagagggtaccccgatacttccggaagcatcataggatatgatgataacgggaatatgacggaccagaaagataaagggattttgaatattacctacaactatctcaatctgccggattatatcctttttaataaatttctttcaacccgtacaggacagctcagagaaaatacccaatacctttaccgtgcagatggcattaaactgagaaagacctataaatatgcaccttctaaccccttaggtaccgagaccagtctatatataaaaacaactgaatacttagacggcttccaatatgaaactggtacaggtaaaaaagaacttattttcggattaaagtttgttcccacccctgaagggtattataattttgaaaataataagtatatttacaattacacggatcatttaggaaatatacgtttaagttatttcaaaaatgatacaggagtagaagttcttgaagagaataattactatccatttggtatgaaacatgaaggatacaatacattatctggaaatcctaactacaattataaatacaacggcaaagagttgcaaactgaatctgggatgtatgattatggagcaaggatgtatatgccggagttgggaagatggggtgtggtggatccgctggcggaaacttccagacgttggagtccttttgcatatgcatttaataacccaatcaggtttattgatcctgatggacggcaggcggaagataagattaagatatttaataatggtaacatagaaagaacaaaagacaataatccttatgacaccataacaaatgaagatgagtctaagtctatccaaattgcccgtacaaatgtgacagaatcaaatccaacaggagattcgcaaataggaaatataaatacaattccattagaagtacctggaatggatggtgaactgggaggaacacagtttacatcttttcaaattcaaaattatgctgtagcaactcaagtgtttgaatttgcatcacttaatacaaatgttgaatttaggcaagaacaattttctttttccgatggaggctctactaatatgattactacaaatggtatgaaaaatttagttttgggagttggtgatatttttggaaaagattatactttttcagcgggtcataatataggaaattctactaaaatagagatgtcgcattctcaccctgatgcaaatccattttggccttcaggatttaataatcaaggaaaagatagtaatcctacttttacccctggtctaccttggtatgacagaaaatcagcaaccgctacaaataattatgtttttagtaaatatttgcataatttaaatggtggtggttatatcaagtataatacacaaggagcaacatatacaaaaacaaagaaatgagatttttaaaccttatattaatatttttattgatatcctgcaagggacagaacatagaaaagaaacaggataatttaaaaagaattacccaatcctacatcgattttaaaaaaagtattggaaaatttgatacagaaaatgatgttattttgataggagcaaattctattgataagaatacttattggctagatattgtatttgataacagccatactttatatggtatggattataaagatctatatcaaatagatggactaaaggttataatatttaaagatttggataagagtcaattgttggaaaatcttttcgaaaaaattccttatgagaaccttaataaagcaaaatatagtatgacttatgatgtagttccttttcatacagaacttaataataaaaatgaagttttatcaataaaatcaaagtacccaataaaagatatactcccatttttaagaaaaaataaagtgaaattttcaaaggattatatagattaatcctcctgctggcgcgagcgtctcgctcgtgtccattaataaaaaaaaacaccactacaacggcagtggtgtttgctctttcatcatcaaaaaccattatatttaccagcataaggatcatttgggaaatgcaaggatcagtttcggaagaaacagcacaggcgctcttgaaatcacagatgctaatgattattacccatttgggatgaatcacttgagaaccggaaattctttctttggaaagggtgtttatcaaaac

SEQ ID NO: 1229 - DNA, 24314 bp, synthetic construct
  misc_feature 1..24314: note = Synthetic
  source 1..24314: mol_type = other DNA
aaggtaggttatattcctaaaatctttgttagaatgcgagtaggaggagctagtaatcaaagtctcaaaaacataattagagctaataaagaatgttataaagcttggaaagataataacttgtctatttcacctattatattcatcttaaaacctctgtctaaaattttacaatttctaagaaaatgaatacctatctcagtaataaactaaaaatcctatcactaatagcaataatattagtgatctttatccattcttttattgaaaatacaaccaacaatactttgatctctcaatctacagcattcttgcagtattttattagtcaaggaatagctcgtatagctgtacctatattctttataatctcaggttatctctattttttatcttataaaaatacaagagagaaatatatgacaaaaactaagaaaaggataagaacattaatattaccttatctattaatatcttttcttactcttttatgctatacttttgtattagatcctttatttggaagttatattaacaaaatggccaatattttatatgatccgatattggacactttgaaaaaaatatttattaatcccttgccttaccaactttggttcttacgtgatttaattttattaacatttttatctccattcatatatgtattcataaaatatttaaaattttactttattcttatacttatctttttatggttccccctaacatcctttgatttttttattttttctaatgaatccatattatttttttcattaggggcttacttatctaccaaacaaaatatttttctaaagaaaagaaaaggatacacttatttttttactacttttatttggttattaattcttataataaaatcaacagtaaatatgaaattaggtattaataatgaaatttctgatgtgttgcaaaaaataagcatcataataggaggaatttctgtttgggccttgtatgacatttatataaataaagaaacacctaatagttttctacttagcatctcttcttattccttttttatttaccttatacatgagcccttattgttaagcacattaaaaaaactatcaaatactatcatcagaaaaagtgagttttttttaccttttttctattttttaaatcctattattacagtagtgtcatgtattattattgctaaaatattacaaagatatactccaaaactatataattttataacaggaggaagataagtaaatttctatcaagaaaaataaaataattttcgtacctttgcacaaacaaatcactaatggcaaaaaaagcactcattacaggaattacaggacaggatggcgcatatctcgctgaatacctgctaaaaaaaggttatgaagtacatggcatgaagcgccgttcgtccttgtttaatacagatcgtattgaccatctgtatcaggatccgcatttagaaaaccgcaatcttatcttgcactatggcgaccttaccgatagtatgaacatcacccgccttatccaagaggtacaacctgatgagatctacaacttggcagccatgagccacgtacatgtgagcttccaaacccctgagtatgtaggtaatgctgatggattggggaccttacgtatcttggaagctgtacgcttattagggctaactgagaaaacacgtatctatcaggcttctacttcagaactatatggattggtacaggaagtaccacaaagtgagagaacacctttctatccacgctctccctatgcagtggctaagctctatgcgtactggattaccgtgaattatcgtgaagcatacaagatgcacgcttccaatgggattctcttcaaccatgaatcgcctatccgtggggaaactttcgtgacacgcaaggtaactcgcgccctaagccgtgtagccttgggtatgcaagagcgtttctatatgggaaatctcagctctcagcgtgactggggacatgccaaggattatatcaaggctatgtaccttatcctacaacaagatacaccttctgactatgtaatcgctacaggtatcactacggctatccgtgatttcattgctttggctggaaaggaaattggcctcaccgtagaattcaagggtgaaggtatcgaggaaaaaggatatatcaccgcggtggataaagtagttttctctgaaaaagtaggcgaaaaatacctccctcatatagaagaaaaaatagctaaaaatgaagctgtagtattagtggatcctcagtatttccgccctaccgaagtggatttgcttataggagaccctaccaaatcacaaactgtcttgggttggaaacctcagtatgatctcaaatcattggtggaagatatgatgcgttccgatatcaagctctttaagcgggatgcctaccttaaggaaggtggttttactattatgaattatttcgaataaaaaaagactctatggaacttactcaaaagctcagacatatcttcatcagtgacttagaaaagtgctctcctcttatggaagaggatttgaaagggttacttaccaatagtaccattccctaccttgaaggcaaagatgaaacagatgtgagggctttttgctttgagtatgaccatgacgacatgtctatttctttctatgccttaggggaaaagagtgaaataatctcagacatatgcctactccttactgaaagggaagaaaatcactttccttcggataggtatgcctcgcaggaggagatcttggaagatcttttatatgaaacctctctgaggaagcccaaatagaagaccttttaagtgaatatagaaaagaaaaactatctattttcactcattggtttatagctcgttggaaaaatgtaacagaacagctcaacataacgattgatgcctatttctccaaaatcaatgccttatataaaacggatctgaatagcttagagcctatcagcactgaagaaatagaggaaaaatacaacacgtaatataataaaacacaaattcatattattattttatgagaagatttaattttatgtatgctgccgctatgggattgcttaccttgggcagtaatctatccgtaaatgcacagacaaaagtgcattattctgagaaaaggttgaaggctgatacctcaaaagcggattttgatgggccttacatcttctacacccagacagaggcagtggtaaaacaaattgttgaaaaaaatcaacaagcgactctggtaagtgagacgttcaagaatcctattgcaggaaaaaaactcacatgttatgtagacaacaaagagcatttctcttttaaagtacaggagctactacagaaccaaccttctgtgtatcaaatgcctgaaaagctcattgctatctctgacatagagggacgttatcaggaattcaagcagttccttatcgccaacaaagtgatggacaaaaactacaaatggacttttggtaaaggacatttggtaactgtaggagatttctttgatcgtgggttgttagtcaatcagacactttggcttatctactctttggaagaacaagcagaaaaagcagggggaaaagtgcattttatcttaggaaatcacgacctcatgaatatgaagaatgacttccgctacactcgcaagaaataccttgaaaatgccaaacttatgggcgtagaatactacgatttgtacaaacctaatacagagttaggccgttggttagctactaaaaatatcttagaaaagattggggactatatctttatccatgctggtatttccaaggaagtaagtgatcttaaccttggagtagagggtattaataagttcgccagaaacttctacttcgataatgtagaggacagagcaggggtggatcctttgcgttctgtagtctatatgcgtggaaaaagtcctacctggtaccgcggatatggtaaggaaactattgacaaaaatgagtttgctgccatcgctaagaatatgggggctaagaagtttgtcatcggtcatacccttcatgagtcagtaacctaccttatggacaagcaagtaattgacttggatgtacttcatgctcaaggaactacccaaggactactcattgaaaacggacaagaatacatggtggatatacaaggacagaaatccgctatcaaagaacgtgctaaggaagttgatgacgattaatcatttataaactaacaactatgaaaaatcaatttagaatactttcttggttattctaaattgattttttttacttattacactattatgaacaaaaatgcgaaaatttatgtagctggacaccgaggtcttgtaggatcggctatttggaaaaatcttaaaaataagggatatacaaacctcataggacgtactcacactgagttagacttgcgcaatacacaagaagtcaatgctttctttgaaaaagaaaagcccgagtatgtattcttggctgctgccaaagtaggaggtatcttggccaataatacctatcgtgcagactttatctatgaaaatctcatgattcagaataatgtgatccatgcagcttatgagaatggagtaaagaaacttcttttcttgggtagtacttgtatctaccctaaggaagctcctcagcctatgcctgaggactgtttgcttacctctcctttggaatataccaatgagccttatgccattgccaagattgctggcatcaagatgtgtgagagctataacttacaatatgataccaattttatctcagtaatgcctaccaatctctatggacctaatgacaattttgacttagagaaatctcacgtattgccagctatgattcgtaagatccacttggccaaagccctccttgagaatgattggcagacaatcaaaaaagacctcaacaagcgccctattgagggctatatcacaggagagagcaaacaagaagatattatcttggcacttgccaaatatggtatattcaaggacaaagtagaactttggggtactggcacacctctgagagagtttctttggagtgaggacatggccgatgcgtgtgtgtttatcatggaacgtatcaactttaaggacacctatactaccgataacaaggaaatacgaaatactcatatcaatataggtactggttccgatctaagtattaaagctcttgccgaactgattcgtgaagctattggctacaagggaacaatagagttcgatagctccaaacctgatgggactatgaaaaaactcaccgaccctaccaagctacacaacttaggttggaaacattcggtttccttagaaaaaggcgttaagatgatgtacgaacattacctcaaatgaaattccaattagtatccgattttaaacctatgggcgaccagcctgcagccattgcctccttagtgaatggtattaatgaccaagaaaaataccaaacgctcttaggggttacaggctctggaaagacttttaccatagccaatgtagtagagcaggtacaggtgcctactttggttttagcgcataacaaaacccttgcggctcagctctataatgagttcaaggctttcttccccaataatgcagtagagtacttcgtatcctattatgactactaccaaccagaagcatatatccctgttactggggtatatatagagaaagatttgtctatcaatgaggatatcgagcgaatgcgccttagtactacctctgccctactctctggccgtcgcgatgtgctcgtggtagcttctgtgtcctgcctgtatggtatcggaaaccctttggagttccagaagaatgtcatctctatagaagaagggcaaacgctcacccgtaccaagtttatgcaccaactggtacaaagcctctatgcgcgtactacggccgacttccttcacggaaacttcagggtaaagggggatgttattgatgtcttccctgggtatagtgaaacacctattcgggtacatttcttcgggaatgaaatcgaactaatagaatcctttgaccgcgagacgaacaagaccatagaacgcttggataaactcaatatctaccctgccaatatgtttgttacctctcccgatgtgctgcaggccgctattcgtgatattcaagatgacttggtcaagcaaatagagttcttccaatcggtaggaaaaaccttggaagcaaagcgtttggaagagcgtactaattttgacttagagatgatacgtgagcttggctattgctctggaatagaaaactattcgcgctacttggacaggcgtcccccagggagtcgccctttctgcctaatagattattttcctaaggacttccttatggtgatagacgagagccacgctaccgttccccaagtacgcgctatgtatgggggcgacaggagtagaaaagagaacttggtagagtatggtttccgccttcctgcagcgatggacaaccgtccgcttaagttcgaagagttcgaagcgctacagaatcaggtgatctatgtgagtgctacccccgcagactacgaattgcagaagtgcggaggcgtatatgtggaacaggtcattcgccctactggtttgctcgaccctaagatagaggtacgcccaagcaaaaaccaaatagatgacctcttggaagaaatacagaagtgtgtagaggaagaccagcgcgtactggtaaccacccttaccaagcgtatggccgaggagctgactaagtacctaaccaagatggaggtacgttgtcgctatgtgcatagtgatgtggatacgctggagcgtatcgagattatgcaagaccttagaaaagggctttttgacgtacttataggagtgaacctactcagggaaggattggatttgcctgaggtttctttggtcgctatcttggatgctgataaggagggatttttgcgctcagctcgttctatgacgcaaacggtaggacgcgctgcccgtaatatagacggacgtgcaattatgtatgccgataaaattaccgacagtatgcgcgtaaccattgaggaaactgcctaccgaagggaaaagcagatgaactataaccttacccacggcatcacccctcagcctctccataaaaagattgaaaatgcgctcagcaaaagccccattacagaatttcattacgagaataccccgaaaaagaaagaacactcccctaccaaacctatgagcagaggagaacttgagaaagaaatacaacaaactcgcaagctgatggaagccgcttccaaagaattggacttcattcaagcggcacactatcgagacctactcaaggagcttcaggaaaagcttcaagaaagctccctataggcattgtgtatcagcaaataatcggcaagcaccaaggctgacatcgcctctacgatgggtaccgcacgaggtactacacaggggtcgtgtctgccttttccttggaactgcaccacctcccctgccctattgattgtctcttgctcttgcataagggttgccaccggcttaaaggctactcggaaatagatatccatcccattggaaatgcccccttgtatgccccccgagtagttggtacgagtcgttccatcaggtaggaatatatcgttgttttggctacctctttttctagtagaggcgaatccccctccgtactcgaaaccttttacagcattgatagagagcattgctttccctaactcagcgtgcaggcgatcgaaaacgggttcacccagtcccacaggaacgccttgtatgacacaagaaacaatccctcctacggtatctccgtccttgcgtacctctttgatataggcttccatttgctctgccaacacagggtctggacagcgtacaggattcttttctatttgggaaaaatcaagcaattggtgatccttttcaggcaatgccaactcccctacagctgatacataggcagtaatttttatcccctttaggaactgcttggcgatagctcctgccactacgcgaacagctgtttcccgtgcagaactacgtccgcccccacgatggtcgcgcaagccatatttctgctcatacacataatccgcgtgagaggggcgatatagctccctcaagtggtcatagtcctgagaatgttgttgggtattggctatgataaatccaataggtacccctgtggtctttccctcaaagatacccgaaataaactgtaccttatcagcttccttacgttgggttacaatagctgactgcccaggccgacgcctatcaagctccctttgtatttcctcaaagtccaatgcgattcccgcagggcaaccatcaatcacaccacctatagcctctccgtgtgattcgccaaaggtagtgagcctaaaaagatgcccaaatgtatttcctgccataatactgtttttattcagatagttttttgtccatgtaggcaatctacaaaaatacgtcttccctacaaaatagtcaataaaaaaacactattttcttcacaaaataaggttcagttaaaaaagagccttatcaatatgctttgcaataaattgcttttcctcctcaatcataagatccaacttttcaataggataagcttctgagccgcctctaattttcatatatttgagtatattatattggaggtaatgatgatgaatctctgccttaatatcattgcgttttattgcattttctatttcttctgtatgtaatagagatccatttagcaccctatccaatattctcttagatttacgttgttgagcttcatctcctcttccaaatactagagtcattttatccataagggctttagctttttgaaattctttcctctcttgatatatgaagtattctaatatcagaacatctctcactttttcccaaatgagcatatctcctgtaaactctattttatcaattatactagaagtttgtaaagctaattctgcatttcccaatacttctaataatattgccaatgtttttatactctgtatggtatctacattctctaaattagcattcgtcttttttataaattcaatattttttataaatacggtctgaggataagattgtaatatcctatctaaaatatcttctacttgtgtgtccatatcttttatcatctaatttttactaactttatccctctatcggtgtgatagtaacttcatagagctgctcaaaaagctgttctacatagctggcttcagccttgcgcacctctataaggagcgtgcagttcagttctaaggtctgggaaacaatagtgagatttctatccttgatgattttcatcaccttattcatatccttataatcaaagacaattttgtaggtaaggtcaatggtgcgttcctctatctcggcttcttgtagggtgagctgagcggttgttttgtaggcggtaataagtccgctcacccccagcttgatcccaccaaagtagcgcactacaatcagtaggacattggtcagctcaaaggattgtatctgcctgtaaataggtagccctgctgtgccactgggttctccatcatcatttgccctataagtaaagtgctctttgcccaactgataagcatagcaccaatgtcgtgctgaaaagtgttctttcttaaccgcctccaagtgcatttttacttcctcttcggtagtaatagggtacaaataacctataaacttactgctcttatccttatagataatatcggtaacaggttgtatgatggttttataggtatctgtcatagggagtgaaaagtgaaaaagaaagtggaaagatataaaaacaacccctatattactataggggctcctttagatgttttcacaacggaataatccttattgtgagttgctttcaaatatgggacaaaagtacaactttttttctaaataacaaacttaaatatgattttttttattaaatttgtagcgaattaaacttattaaatatatgaaatacataaaatacatattaggattagacataggttccaactccattggttgggcgcttattcagctagatctcttgcaaaaaacaaaaagaattattgccgcaggaagtagagttattcctatggatcagaaagttttaagtgattttggaaaaggaattactatttctccgactgctcaaagaacctcctatagaaatgcacgacattgtcgagaacggcatttgctacgtcgtgaacgtcttcatagggtactccatattttaggcttcctgcctactcactatgataagcagattgatttttcaaagagatatggtaaatttgtagataatacagaaccaaaaatagcctataacgaagggaaattcctctttatggatagttttcaggagatgctagttgattttaaaatacatcagcctgacttattctataccaaaaggaatggagaagaaagcaaaattccctatgactggacaatttattaccttagaaagaaagcgctttcaaggaaaattagtaaagaagaattagcttggattattttaaatttcaaccaaaagagagggtattatcaattacgtgaagaagaggaaaataaggagaatgattttgagattatttcctcaaaaattatatctgttattaagaaagataaagataaaaaatataataagtattggtatgatataattttagaaaatggattggtataccaagctgctttttataatgattttgtatataactggattaatcaagatagagaattcataatagaacgaacttctttaaagaatgggactgaaaaagtaaaactttcatatctacctacttttgatgaaattgataagatggataagaaagaacaggataaatactacaaaaagataaaaattaaaaccgaaaatagtattggaaataaaacagtaggatgctatatctatgatcatattctgcaaaaccctaatgaaaaaatcaaagggaaattagtccgtacgattgagcgaaaatattacaaagaagaactaaaggctattttagaaaaacagatagccctacagcctgaactatttacagatcaattgtttgccgattgtattcgagaactctatagcaagaatgaagcacaacaacgaaaccttgctgcaagagatttcgtacatttgtttgtagaagatattattttctaccaacgccctttgcgcagccaaaaatcaactattgctaattgtagtttggagtctcgttcctacatagataaggatagccatacccgtaaagaagtctccttgaaggtatgtcccaaatctaacccttattatcaagagtttagagtactccaatggttacaaaacctcaaaatatacgaaatagagagcgatcgagaggtaacccatgaatttataaagaccttagaagacaaacagcaactctttgattttctaatggctcaaaaagagattgattgtgaggaattattgaaatatttcctgagtctaacttatccaaatgccaaggaaaaagcactaaagagtgagctgaagaaatggaaagatacttatcgctggaactatgtatatgatataggagaaaaatcgtccaagaaatatccgatgaatgagaccagatatgaacttaagcgacatttagaaaaagtagccaacttgcctgataatttcctttcctctgaggtagaatacctgctatggcatctgatctattcggttactgataaggtagcatatgagaaaggtttaaagaaatttgctcaaaaacatcacttagataaagattcttttgtggagagtttcaagaaattcaaaccctaccccagtgaatatggtagtttttccgaaaaagctatccgaaaactacttcctctgatgcgttttggctcttattgggattttaatcatatagataagaatactcaaaaacgtatagaagaccttataacgggggtagaaaatgaggaaatacgtactatcctcagagaaaaagctgaaaagtaccaacttgaaaaggaaactgatttccaaaacttacctctttggctggctcaatatatagcctataaccgacatgctgaggcttcctctcttgagaaatggacttctgtgaatgacttggagacctacctcaatgagttcaagcaacattcgcttagaaaccctatagtagaacaagtagttaccgaaaccctacgtgtagtgagagatatttggcaacaatatggacaaggaaaagccgatttctttgatgagattcatatagaactcggtagagaacttaagaaaaccgctaaagaaagagaaaaactatccaagcaaaaccagaagaatgaagataccaatttatctattaaagaaaaacttaaagaattggaaaagtataatacaagagcttactctattacacatcaggaaaaatataaactatggttggaacagaaacatatatccccttatacaggacagattatctccctcgaaaatctctttacagataattatgaaatagaacatattatcccacaaagtcgatttttcgacgatagtctttctaataaagtcgtctgtgaatctattgtaaataaagctccttacaaagaccggcaattaggtttagaattcattaaaaatcaaggaggaagaatagttaaagaactctccaaggaaaataaaaccataaaaatatttactgaggaacaatacagaacatttataaaggaacattatagtaacaaccctgcaaaaacaaagaaacttcttttagaagaaattcctgaaaaaatggttgctcgccaaatgaatgatacgcgctacatcagtaagtttattccggaaattctttctaagatagtacgttcagatgagcaagacgaaggggttcattccaaaaatgttattctatgcacaggtaaaattacctctatcctcagacaggattgggggcttaatgatgtatgggataaccttatcttgcctcgttttgaacgaatgaataatttgttacaaaaagaaaaatttacaatatatagtatagaaaaacagaagaaaattcccgtagttcctatcaatgatcaatttaagagtttccaaaagaagcgtatagaccaccgtcatcacgccatggatgctatcatcatagcttgtgctacccgagagcatattaactatataaataaccaacatgccttagaaaaaggaaagaacaaagaagaaaaacaaaagtctcgtatagacctaagaactatcctttgtgaaaagaagtacaatgataatgccaaggaaaactacaattggatattcaaaaaaccttgggatacttttacacaagaggtacgatctgccttagaaggcatagtgataagtttcaagcaaaacttgcgagtaatcaacaaggctaccaactactacgaacattgggtagaagaaaacggaaagctcttcaaaaaaatggtaaaacaggagggtactaactgggctatccgaaaacctctgcatgaggaaaccatttcaggtaaaatttatttagatagagaaaaaataaacaagaatgatatacttacagctactagaaaaactgttgatagtagttttgatgaaaaaagaataaaaaaaattacagacacagggattcaaaagatactacttaattatcttaagtataaaggaagtcctgaaatagccttctcgccagaaggattagaagagctcaataaaaatatctctctctataacgatggtaagcctcacaagcctatccgtaaggtacgcatttttgaacaaggtagcaaattcccattaggagaagtaggaaataaagccaccaaatatgtagaagcggctaagggtaccaacctatattttggagtatatcaaggaaaagacaagcgctccttcgcaactattccgctcaatgaagtgattgaacgccagaaacaaggtctgccctctattcctgaatataatgaaaaaggagatcccttactctttagcctatctcctaatgacttggtatatatacctatagaaggagaaatcatagaagatattgatttccgaaatctttctaacgaacaaaaaggaagaatatataaggcggcaagttttacaagaaatgaatgcttttttataaaatcaagtatagcttcccttatcaagaactatgatgccaaaacaaaaattggagaattaggtagccagaataaattggaagtaactatttgtaagggaataagaatcaaagaagtctgtatcaagctaaaagtagaccgtttggggaatattagtaaagcataaaaagtttaataacaataagctatgttatatcgttcgtttttattcctaaagtagaataaaagagaaggttttttctttttgaacttttgcgataaccaacagacaatcaattctttttaaaaattgaggttgtttgaggtcacaaagttacgaatttgaaagcaactcacaaccaagggtgttaattccttaatttcctcgttgttgtttgaggtcacaaagttacgaatttgaaagcaactcacaacgcaggaacgactcaatattcgcaaggcattgttgtttgaggtcacaaagttacgaatttgaaagcaattcacaaccatatacggagaaatcatacttagccgcagttgtttgagatcacaaaattacgaatttgaaagcaattcacaacatactgctatgcagttgattaagcacaatgttgtttgaggtcacaaagttacgaatttgaaagcaactcacaacctgaggaaaggaaaaacctgataataacatgttttttgaggtcacaaagttacgaatttgaaagcaactcacaactacttccatatatagctatttcattgtactgttgtttgaggtcacaaagttacgaatttgaaagcaattcacaatgagaaagcccaacaagtacaagctcaacaggttgtttgagatcacaaaattacgaatttgaaagcaattcacaaccgggggttaggggtcttgcagcccccccgttgttttaggtcacaaagttacgaatttgaaagcaactcacaacgtgcctgcattccttgccttatggttagtgttgtttgaggtcacaaagttacgaatttgaaagcaactcacaacgtaaggatacgactgatacttttgccattggttgtttgaggtcacaaagttacgaatttgaaagcaactcacaaccctggcagtcaaatattacatgtgcgtgcagttgcttgaggtcacaaagttacaaatttgaaagcaattcacaacttctcttctctatagcttcgggtaaggacagttgtttgagatcacaaagttacgaatttgaaagcaattcacaactaacgatggagtaattttggtctttttcatgttgtttgagatcacaaagttacgaatttgaaagcaattcacaacagcacggagataaacacctatttggtattgttgtttgagatcacaaagttacgaatttgaaagcaattcacaacagggctttattgctcctattgaaagcgactgttgtttgaggtcacaaagttacgaatttgaaagcaactcacaacccgacagcctgccatcctctgtaatgggacgttgtttgagatcacaaaattacgaatttgaaagcaattcacaacaaagtaaaataggcagtagcccccttaacggttgtttgagatcacaaaattacgaatttgaaagcaattcacaactcgtagtttcttctcactatagagaagtttgttgtttgagatcacaaaattacgaatttgaaagcaattcacaacagctcttcaattgtgtaggttataggttctgttgtttgagggcacaaagttacgaatttgaaagcaactcacaaccaagatttcagccctgctagaaagcgtgctgttgtttgaggtcacaaagttacgaatttgaaagcaactcacaaccaagttcctgcattggttgtaagttcagctgttgtttgaggtcacaaagttacgaatttgaaagcaactcacaacagtctatgtactggttggcaggggtctcacgttgtttgaggtcacaaagttacaaatttgaaagcaactcacaacaatgctttctatcttgtccgttatctgcttgttgtttgaggtcacaaagttacgaatttgaaagcaactcacaacatgatttgcaggcgcaactgctcgctgaaagttgtttgaggtcacaaagttacgaatttgaaagcaactcacaacagaaattcgggtcggcaaacttgctctcgtgttgtttgaggtcacaaagttacgaatttgaaagcaattcacaacccaccactaatgggttgaattttcgaggaagttgtttgaggtcacaaagttacaaatttgaaagcaactcacaaccgagaagaccccgcacatccatttcatcagttgtttgaggtcacaaagttacgaatttgaaagcaactcacaacgctgtcgcaagtggatacgttcgtgattgagttgtttgaggtcacaaagttacgaatttgaaagcaactcacaacggttagttgtcgcgcactcatttcgagagagttgtttgaggtcacaaagttacgaatttgaaagcaactcacaactctccgaccttgatgtctatgttatatactgttgtttgaggtcacaaagttacgaatttgaaagcaactcacaactggttatatgtactgaattttatttccatgttgtttgaggtcacaaagttacgaatttgaaagcaactcacaacaattcattcaggaagtggatagcttcgagcgttgtttgaggtcacaaagttacgaatttgaaagcaactcacaagtagaaataataaaccaaagtgcaaagatacaaaaaagaggctgtccgaaaagtcttattcatgaagagcgatttgcaaacaacccctacaacaggatctaaaacaactgattttcaatagaataaaatttaaaatatttgatttaacctttgaaaaataatgtttttggacttttcggacagcctcctaaatgttttctaaaaggatataattagcttcttaatcaaagaatagcggaaaggactaatacctaatcactacacttccccaggtgaaaccactaccaaaagcagctaagacaagcaaatcattttccttgacacgtccttgctctaccgcttccgctaaggctattcctatagaggccgctgtagtgttcccatatttttgaatattgttgaacacctgagcctcggaaagtttgaatttctgttggataaactgggatatacgcaagttggcttggtgggggatgaatagatctatatctccttcggtaaggttgttagccttaagcccctccataatcacctctgagaaacgtactacagcattcttgaagacaaactgtccattcatataagggtaataggaggtatcttctgggtcattttccttgataagatcggtaacccacttcttccctaccccaggggtaacgatggccaattcctctgcatgcgcaccctcactgtgtaggtgtgaggagagaatacctttaccttcttgggtagtgcgagagagtaccacagctcccgccccatctccaaaaagcacagccatattgcgcccacgcgtagtgaggtctaaggcgggagactgcatctctgaagcgattaccaagatattcttatacatccctgttttgataaactgatctgctacagatagggcatatacaaagcctgaacattggtttcgtatatccaaagctcctatggtaccaagccctaactctttctgagctaaaaccccgcaaccagggaaataataatcgggactaagggtcgcaaagataagaaaatcgatatcttccttatttattttcgctttttctatagctctctcggcggcacgtacccccatggaggtagttgtatctttccctcgggtggcaaatcgtcgttgttctatccctgtacgctctctaatccactcatcagaagtatccatcagcttagagagatcatcattggttacaatattttctggcacataataacctgtgcctatgataattgaattatacataagttatttaacattaaaaagaaagccttgataacaaggctttctattacaatatgatacttggttactttagtacttcttttactttgtcagctgcttcttggaactgaatagctgaatgcacagccaatcctgatttgtcaataatctctttagcaatctcagcattagttccctgtaggcgaacgataataggcactttaatatcagttcccatattcttataagcatctacaataccttgtgctacacggtcacaacgtacgatacctccaaagatattcaccaatattgcctttacatttggatcttttaggatgatacggaaagctgtttctacacgagcggcatcggcagtacctcctacatccaagaagttagcaggttctcctcccgcttgtttgataaggtccatggtagccatcgcaagaccagcgccattgaccatacatcccacattaccatccaagtctacatagttaagacccgcggctttggcttctacctcgataggtcgctcctcacgagtatcacgcaattcagcatagtccttatgacggaaaagagcgttatcatctatggtaactttggcatctactgcaagtattttattatcagaggttttgagcactgggttgatttcgaacaaattcgcatcagaagtgatataagctttgtatagagaagttacgaacttgaccatttccttgaaagcctctccttccagtcctaaattaaaagctacatttcttgcttgaaaagggagcaatcccaattctgggtctatctcttctgtaaagattaggtgaggagttttctccgccactgcttctatatccatacctccttcggtagaatacataatcatattctttcctttagcacgattcagtaggatcgacatgtagtattccttaggctcgctttctcctgggtagaatacatcctcagcgataagtacttggtgtactttttttccttccttaggggtttgtggagttaccaaatgcatccctatgatttgggaagaaatttctttaacctgctccaagttcttagcaagcttcacgcctcctccttttcctcgtcctcctgcatggatttgagcttttactacataccattgtgttcctgtttgttctgtaagcttttctgctgctttgacagcttcatcggctgtagtggctacaataccacgctgtacacgtacaccgaagcttgagagaatttcctttccttgatattcatgtaaattcataatataactttaatttgtagtggcaaatgtacaaaaaaaatatgacatttccatgtttttttcatattttttttctcaatccttttttccttagaaatcagtcttgtgtagagagttcttttaacaattctcctaccaaggcatagatctctctgtaggaaagttcctctttgctcatatagagcaacgccaaggagtaggtacgctctgtagagagcagcaccttctgatggcgatagctctcccttatcaggcgcttcattctattcctatccactgcttttttcataagccttttaggaacactgatgagcagttgggtaggttgtgtagagccttctataggggtatataggagcttcaatggatattttttcaatacctttgcctctcggaagagcttgtttaccctatggtaattacacaatctttcttccttgggaaaggtatttcttttttcttttagagaaaccattttatttagataaagtcgcataagcgagtatatgagtaaaaaccagccagtattcacagctgtatatgcaataacaggtaacaaacaaaaacactttgcctattacctgttattttatctttttatgctatattaggcgttttcttcttcctcttcttttcctgtaagaagtcggaaaccttcgccatggatatttacaatttctacattctcgtctttcttgagatatttacggagttttgctatatacacgtccatactacgagaagtgaagtagttgtcatctttccatattttgttcagtgccaactcacgaggcatcaaatcattttcatgaagggctaataggcgcaatagttcattttctttaggagagagttttaggggttcttcatctctgtagcgaaggaaacgaagcttagagtttaggaaaaagtctcctatttggaattcgaattttttgctatctattactgtatcaattgactttctttggagcattgcacgaatcttcatgagcaatacttctgaatcaaaaggcttattcaagtaatcatcagctcctgatttgtatcctttgatcacatcctcacgcatagttcttgctgtaaggaaaatgataggcactttctcattcttttcacgaatttccttagcgagagtaaaaccatctttgtaaggcatcataacatcaagaatacacatatcataaggatccttgcggaacttatcaaaaccttccatcccgttcttggctaaagtaacatcgaagccactcatggataggtaatctttcaatacggtcccaaagtttgggtcatcttctacaagaagaatttttttattaactgcttccataatttcaacatttaaaaataatatatttttttacgtttatacaaaatttcatttattagatgataaggggcaccttgatcacaaacgtacttccttttcctttttcactctcggcatatacttccccatcgtgatattttacaatacgctttacataagcaaggccgagtccatgaccttttacattgtgcaaatcgcctgtatgttccctgtaaaatttttcaaagattttcttcagtacagccttgctcattccctgtcctttgtcctgtatacggatcaccaatttgttatgagcaatttctgtaaagacatctatatctggcgcctgtggtgagtacttaatagcattctctaatatattgacaatcacattggtaaagtgcatttcattggctaatatatctgagttttctgcatgtaagtgcttcttgatctttcctcctctatcatcgatcagtagctgtacatgagcgatggcattgtctatcagctcatgagcatcgagtggctctttttctatttctacttggttcttgtcgagctttgagatctgcaaaacattttccacatgggcatgcatacgcttattctcatctcggagcattttcagatagaaagacattttttcagtatccttcatcaccacagggtttttcatcgcatccaaagccaaattgattgtggctataggggttttgaactcgtgggtcatattattaataaaatcggttttgatttcattaatctgtttctgagtacgcatttggataaaggtcttggcaaatgcccagatgataattgctgtaaaaatacatacccaaatagccattacaataactgaggatagcagatagcgttgcttatcagggaaatgcacctttagctcataatgagattctccttcttggtttctgaacaagggtatggtgtacatattccttgctgaagggttgaaccttgaactagcaacagaggttttttccttatctacagaaagagacttatcatatacggcaaattcaaaatctaagttcagtcctctgtttctaagctctctctctataagtatctccagctgcgaagccgttatcctattctctatagagagcttcactgaaacttcccgaaagagttcctcgaacatggctttgtcaaaagaggtaatgcgacctgttttttccttaatggtggtactgctgaatcgctgtccgtctaaccctttactagggccaaaagtacgagaggtctgtcggcttacataattgcgtatctgagtagtatctcctttaggcaaattgaaaagctccgaaggtacggtatagccttcctccaatacttgatgcttgtaagtgaatgtctcctttgtattcttattctcttgaacaaaaaccaaatcacgaatctgtgaggatttcaaagaacctaagctatctttccctttcaattctatgaatcgggtgatatacttatttatttccttcagttctactgattctgaaactgaattcaaagcctgtttcaccgaatgggtaaaagcttcttctttattatctatagaacccttaacccaataaaactgaatagaaataagacctataagagctataggcattaatattaaagtaacaatataacttctcttattcatcaggcaaaattataattattttttttatataattcatttttaacaacgtttaactttttggttaatttcttacattttcagctgtcattttcactattttagaatgaattatttcgattttatccaaatttttatcgatttctctattttcaataacaaatgttgataattctatttttttttcatcattccattgattttttattctcttttccaccgtttctctatcaatcttatcacgaagcataactctttttattcgctcttctaatggagcggttaccataataataaaatcacaatctcggtaggagccactctcaaagaggatagctgcttctttgatcacatagggcgcctgctgggattgcttccattggaggaagtcctgctgcacataaggatgtattatagcattgagtttgtccaatttttctttattagaaaaaacctcttgagctacaaaggaggtattgtaccttccctctacaaaggcttcttctcctaagagggtaactatttcctgctgtagttgcttgttattcaccacaagttcctttgccttggtatcagctatatatataggtatagaaaagtgtaaggcaaacagattggctatggttgtcttgccactacctatccctccggtaagtcctacagttgctatcattcgtgtattataaggtattctacttctttttgttcggtaaaattcacgttcaaggatgtgggtttcttccttacctccaatggtatatatctatctttacgctgattataatctgctactatagtaatgtccgttggcttgagattgcgtatggtctccacatctcctgtgagcaataggggtacttcttctggaaatagcttcacttctactgagaagggctggtgtatgagttgcaccttggccttaatttcttgctcagttacatgtaccatttgcagggagaaggttactttgtctgtatcataatgcagcttaggggtatcagtaatgcgtatttctcctgaataagaggtggttacattcctcttatatttcttctgcaaatagactcctgtgatggtatccaaatcggctgccaaaccactcactacaaccgaatcaggaaatactttataagaatctacttgataatcctcttgtaaagttcctgaaaattgtaaccttacaggcaccttcttctgctttatctttttcaaatatatttttatagtatctggctgtatttcttctattctcacatctggaaaatactgcctattaagctgctgttttagattttctgtaaaaacatacttatcttttcctacttttttcaacttgtgtactgagagggaaaccactgggggcgagaaggtatatttgaacaaagaaaaacctactcccctgagttttacttttattgtaggggatgcctccatctctacaaatctctcagtaggcacttccatgtagcgtaacttaatagtatattgctgggtcgcttccttggataactttcctaccaaccaagtaagtgctgccaagagaatacagaaaagtatccctatagttcgttttgaaaaaaaatatctattgagtttcattgtggcaaaattataattttatttttaaaaatacaaaaaaatttcctacttttttacacaaaaaaatacactttgcaaaaataatcttacaaagtgtatgcttagtttttatatagatttaggcttcagcctcttgtgaggctacaggggcttcttcgaggaatcctttgtcaataagtatgttataccattgtataatcttctttatatcactgggatataccttatcttcatcataattaggaattacagagaagaaataagcttccaattcatcctctgttgccttgtgagaaacggctgttttttgcccattctctttttcttttatggctttgaatacttc

SEQ ID NO: 1230 - DNA, 24314 bp, synthetic construct
  misc_feature 1..24314: note = Synthetic
  source 1..24314: mol_type = other DNA
gccggatggcgtaatacatagcggccgcgccggcgagcgcaaacaggagagaaccgatacggtcatcgagacccgcgaaaggcgcgatcacgaaactaaaaacaggaccgtaatggttgatatcaaaatactctttgggatattctacgtacaggggttgctgatggatgacgtgaaaaaatacctgcttgaagatgtaatagttattcatgttgccccggccgatctccgtgatcgtgcctataaaggccaggccgaaccacaggaaaagtatcaaccactccttctcacctaagtaagtcagcacatttcttttttcacgcattacgatagatttctatttattaattcgctacagtacgcataataacgccgctgtgagctatttccccctatgtgcagcggctattcgttattggcctgccattcctttgcctgcaaattgatagcggtaacagcgcctgttaccagtaatattactaatactgtaatgataataaagaagatagtcatggtctgcatcctgtttttgtgtgacaatcggggctaaaattacgaattacggattaagaattacgtgaggagatgatcatctcctcacaaatccgtaattcttaatccgtaattcgtaatttcattgcatgagcgctcataggcgaaaagaccaacagaaattatcttttaaagagaggctggcggcattacgtaatcttcctgcatttttcaggatggtatgggaaaccagccccggactgaccatcgccaacacgatcttacgtgtggcgcaatccgcgatgccactggcattgctgtatgtcggcaaactgatcatcgaccaggtggtgcacctgagcaaaggcggcgatcatgatactaccaggttatggcagctggtagtcgcggaatttgtgttggcaatcctttctgatgccctcagtcgtgcgatctctttaatggacagccttctcggcgatctcttcgccaaccacacctctatccggatcatggaacatgctgccatactggatcttgaccagtttgaagatgctgaattttatgataagctggaaagggcacgccagcaaacagtgggcaggaccattttgttgtcgcaggtgttgagccaggtgcaagacctcatcaccatgggattcctggcggcgggcctgattgtattcaatccctggctcattgtgttgctgttggtggcagtgatacccgccttcctgaatgagtcgcgcttcaatgataaatactacaagcttacctggggccaaacctccgaccggcgcgagcttgactatatccgttacctcggcgccagcgatgaaacagctaaagaggtgaaagtgtttgacctgtcgaagttcctgatcggccgctttaaaaacatctctgataaattttatacagacaagaaaaacctggaggtacaacatgcctactggggttctttctttgcactgttgggcagcgcaggctattatgcggcctatgtgatcatcattttgcgtacgatcaacgggcatcagtctatcggtgatcttacattcctggcgggctctttccggcagttgcgggtcacttttcagggcatactgatacgtttttccagtgttactcaaggcgcgttgtacctgcgtgaccttttcgatttttttgagatacaacccaagatggtggcgccaccgcagccaaagcctttcccccatccgatccgcgaaggcttcacatttgaaaatgtgggctttaaatatctgaatgcagaaaaatgggcaatcaggcatctcaacttcacgctacatgcaggcgaaaagctggcgctggtaggagagaacggcgccggcaaaaccacgctggtaaagctgctcagccgcctctatgatccggtggaggggcgcatcctgctggatggcgttgacctccgcgaatatgatctcaaggaattacgtacacaggtgggcgtaatcttccaggactaccaacgttatcaaatgacggtatcacaaaatattgcagtaggtaatatctcggaagccggcaaccagtcgctcattgacgatgccgccaaacagagcctggcagcgcctttgatagaaaaaatgccactggggtatgagcagatgctcggacgccgcttccatcaaggtatagagctatctggcggcgaatggcagaagatcgcgctggcacgcgcctatatgaaaaatgcacaattgcttatcctcgatgagcccacctccgcgttggatgcccgcgctgaatataatgtgttccttcgcttcgctgatctcacaaaaaataaaacggcagtacttatctctcaccgtttttctacggtacgcatggcaaaccgcatcctcgtattagagaaaggccagctcatagaaatcggcagccacgatgaattgctggaaaagaaaggccgctatgcagaactattcacattacaagccgctggttacaaataactactgtatctggaaccagggcaccccatttttgccttgtggatgatgcaccgatgtttttacatttaccccggcaatctcaaaccaggggaaaacgctgcgcccttgcggatgataagctgttgtgtaaatcttatcttcccttatctcgaaccagggatgggcactggacccgttggcatgataaatagtaggatacaccagattttcccggacttcatacagcggcgccggatcgtagccttcggggtgttgtatggttttgtagatgttcatgggttaaaatttttaatcgtcaacgcaatggaggttgaaagttaaggttttttggggagaggtagagtggttgaggttggtaatccgtgtcacttaccgggctgcgcgacatacatctgtgctgctgatattgccaatgcttccttgaaatatttttccagttctttatcttcgcaatatacatagcagcctctcattccccttgtcattaatgtcctgtaagtatttttaatgattgcccgaatcttcttctttgcttcttctggcttttctgccagcattttcttatacccccggatagatttatcgtcctttgctcgtttggatgggtccacttttacctgaccattctccactatcatgtctttacctatgataactccgatataatctacatccaacccctgacttgtatgtatacatcctacctcactaatagagttgggatcaatgatccaggctgcattatagttttgaaaattccacttcatcttaaagttatgttccggaatagtaatatcatagatattctcatttcttctgctgtcccaattccaacaataacctgctaccaaacgagctttattattcactttattcttctcgtagatgatgtcgtataactcgttcggtgtatcaattactctgaaatcgtagttatatgctgcgccatcaaatgaaatattggcggtttccctgatctgtaatagctggtcgatccaagccaaatagccatcagatcccccacaacggaattgggatgcaagctcaacacagtgtatattagcccctgcagcggtcgcgatatctttaattacttcaatagtcgcataatcatccatatgtaccgtctgatcttcatcgatgaagaagatgggacacaaagcagtgtcaataagctctttaacctgatttgtaccatttcgatatggtccacttttttctgtcaaccggtgggcttcgtcaatgataagaacagggatgctatttgacgtagccgttgtaaatgcccctgaaccaacaaagagatttcttagttcggtcattggctttacgccgctcaatttgctgaaatacacattccttggcgcctgagtttttgtaacgtactttgcagccagtccattcgaaatcagtcctgccaacaatttaattgctacaagcgattttcctgtgcctgggcctccttctacaatcagcacatttttattcgcaacgtgcgagttacgtgcaagttccatcgctatctcatacacttctttctgatcatcgataagtaccagatcatccctgccatccattacgtcagcaatacaatccataagccctcttcctggtcgcatatcactcttctccagtcgggcaagtatatttgcactttctttttgtttaatgaattggcaaataaaagctcgtaattcagcggcatctgatcttaaaaacacaggcgctttatctaaataattcttatagataacattcgtaatggtgtcatcttttgaatagttatataaatacgcacatggcttcacatgaatttcctcttcttcaattactgcattaaagtgcttgagcaatgaggcatacgaccatgcctgataagctggatgccaggtatttttaaacccatgtttgaattgtgtgtttaccattccgtcctgggtggtaagtgttgcacttttccatcctttcaattcaataattacgatagcttcgcgctgcccgtccgtaccggtaataatgaaatcagcccgcttcgaggttaatgggaaatggtattctatcgcaaccagacaatcattcggaatgtccttatggctaagtactattcccattttctgtaatgaggtctcgaaggagctcaattctccttgtccggtatttttgccggttttctgtttgatggctgcggcaatgatattatggatatcattggaggataaatcttcaataaagtcctgcttacttttctggtaaataatcatatagggaagtcaaatgcgggttgaggcttataattcattatattttttggctgaccctttcgctttgtgaacaggatatttttccccgttcttctttatcttctcgagtacgatctccttcacatctaatttgtgcttatcggccaacagaaaacaaaaggcaaaaatatctgccagctcttcttttaatctctccttgtcgacctgctcggaagcggcaatatctttccaaagaaaaagttcatttaattcagctgcttcaatagaaatggcggctgccagatttttggagtcatggaattgctcccaatggcgctcatcacggaagtggattaaggctttaattattacatcaaggtcagacataacagaatcgctggatttatgtaatgctactactaacaaatatagaattaactgctcattttctaaaaaccaattatctacctgattggggtattgtcagatttttttattattatttggaataatcaaaaaaatatctccatctttgcaccgtcaaaaaaattacacatgatacgcaacgaaagaaatataaaacacacaagcctgtttagctggacacccagtttcaccagccgttgcggtgcatgttatgatgcagaacagtaaaataactgattcaatataacacaggccccgcaagcaattgcggggcttttttattttaaaacattgcaaatgatcaaacaattgatacatacatcatttattggcggtagcagatggacaactgtatacctgcatcaacgaccttgttgtcaacacgtgtaatagctacgtgaaaattgaaaccggtcgtttagttatggccggtttttttatgcctatacctatcgtggcctgtggcgcagtggtgagcgcagctgccttatacgcagtggagcgccggttcaaatccggccaggccaaccataaagatcttcctgtttggaagcctggagagtgatcgcaatgcaaaccggatgagggtttcacaacaccccatagtgcggcgccataaacaccgtatgctgttgcaacgaagacgcatccttgtattatctgtgtgttgaaggttcgagtccttccgcttcggcgtagctcaatggatagagcaacagtctggatcatgtatccatattcgcagaagcccgccgcttctataaacatggcgatgtcttaaaatcaccggtattggccgctcaggaaggaattcttccaatcgttccggcactttgcaggccggctggcatcacatacggccgcttacatacaagtgcgcacctggggcagcaagtgtttcaatgtagtaagcgaaaaggtgtgatcatatggcctccgcgcaggtttgatgagctacaatgccggtgatcattattcagaaccctaaaaacaagcatatgaaaaaagtagtagtgaatgcctacgaaagaggattggtattcaaaagaggtgtttaccaggagatgctgaaagaaggcagatattggttcttcggtaatgaagaggtaaaaatctatgacatctatcaaccgttcaatgcgccgctggagctgaacgcgctcctgcaagacgccgcattggcagccgcattacaggtagtgaatgtgggcgataatgaaatcgcgctgcaatacgaaaacggtttgctacaaaaagtactgacatccggaagatatacttactggaaaaatacagtcgattataaattcgttcatatagatatcagcaggatagatatccctgcagagatagatcccttcatcctgtcgtccaggctgatggcggcttacgtgagaagctaccgggtagaagaacatgaagcgggcctgttgttcatcgatgcgaaatttgcaaaagtactgcagccaggcatctaccaatggtgggtaaatagcaccgttatcaacttgcaaagagtagatatgcgtcagcagcaacaggaaatgaacggccaggagatcctgacgaaagacaaggcggctttgcgtatcaatgcctgggcacagttccgcatcagtgatatagcgcgtgccttgttgcagaacaaggatcacgaaaagcagttgtatacccttttccagttagcactgcgtgaatacgtaggtgcgttaacgttcgatgatctgctggacaaaaaagataccctgtcaccattcatcctggaagcggtagcctcaaagacagcagggctgggcatttcagtacaagacttcggcatcagggatatcgtgcttccaggcgatgtgaaagagatcatgaaccaggtactgatcgctgaaaagaaagcgcaggccaatattatcatgagaagggaagaaactgccagcaccaggagcctgctgaataccgccaggctgatggaagataatcctatgctgtttaaactgaaagaaatggaatatgtggagaagattgcagagaagatcaacaacattagcgtcaatggcaatggggtgttgatagatcagttaaggcagatcttcattagtaagtaagaaggctggccgcatgagcggccagctttttaatatctcaacgtaaatcttaccggcaggttcatctcttctgcatgcactaatccgagccgcatgcccggtttccacactggcatcaggctcaccactctggatgcttcattatccaatggtgtgccggcgcttgtgcaaacggtgatattgctgatacgtccatctgttcctactataaatttgagtatcacggtgccttgcatacctttctcctgcgcgatccgcgggtagcggatattcctggccaggaagcggttcaaggccatttctccaccagggtattcaggccgaacactcagggtatcgtacgtataggcggtaccgttacctacgtgttgacctttaataaaaatgccatcgcggtattgctgctcttctgttttctgtccggaagcgtcgtatatttcccatatcccatcaggaaagccgttcttgatggttactttaccggtagtcttataatctttgtcgcgctggataaacaagccattaccatcgcttacctctttcttgccagtgctatcccaactattaatgatacgacgactgtaaatcctggtatccagtttttgttcagttttgtcggcctcgctcaatacgatgtattctgtctgcaattcgccattgcggtagaaatcataccaggtgccggtaggctgacctttggaatagctgcccttgcggcttagtttttttgtttctttaaagtaccagacaaattcgccttcttcacgaaggaattccctgctggtggatccgcccaccatctgtggttctcctgttacaaagaaatcgcggaagatgtacacgggcctttctttattcacaccggtgatcaggcggacgtaggcagcatcttctttcttatctacctcgcaccattctttattcagaaaagcgagatgggtggagtcgtcgtactggtatttctgtgaaaagaccgggagtgttaacaaacagctggcggcaagcatcagtaacttcttcatataaatgttgagatataggtatcgttcttatcaagaacatgttaaagagcggaagacgggactcgaacccgctacctacagcttgggaagctgtcgctctaccgggtgagctacttccgcaggtaataactaaaggtaaaaaaatctaatcaaggataatgcgctcatcggaaaaatttctccaaacggttcccgtcccaaagcctactccattcaccgcggtagctctattgcggttagagatatatacttttctcccaagataaatcgcgcgctgcatgaggaagctctcgcatagttgtcttgaagtgataggatagaactcgcgctggtctttcgaccgcaggcttccatcactttgaatagacaaaatcatcaggggttcattgttcctcttgtatagttgcagggaacggccatcaccggcgtaaatgcctgtatacatgttccgcagcgatatcttcatcgggcgattgccttcctgtatcaacaggtcgttatcggtgtagaagcgttcataactattgttattctgtagataaatgatctcggacgtatcatcagcaatggagatgaacagctctttcatcttcttggtggagcacccctctgcgatgcgcaggctatcgtcatgttggagggcttgtaagaaggccggatctttgatcaccaccttacggcggccgaatacctcaaggcggttcttgaagtcctgatcttcataaccatattcaacaacgccttcatcatatccacgcaacgtatagaaatcatctttgcgtaaacaaatcctcccctgtacatcccaccattttttgtcgataccgatacgcgggggcgacaagaaaatatcactttccctgctaaaccgctcgttgatataagccgcaaatccgcgaccagtgaagttatcagcatctacgctgcaaacgatttcgttggaagccagtctgagcgccatattcttcgcatggctcatatgaaaaaactgcggttcaggattacggtaatatcgaagcaggcctttgtttacataagactgtaaggtttgccgcgcccagtcgtacatatcatcgcgggagccataatccagcagcacaaactcgacagggtggtaatcgagattatcaatgatattttgtaacagggtttctttgaggtgcatcgccctgttcatacaaacggtgcagaaagagatgctgtattgcatttgttatattctttctttaatggtgatgagaggggtgtactgggatataacacgtgagaggggagattgttgtgtggggcagcctttcattatctcaaaacaagcatcaattaatttccggaggtatgtacagaactcatatctttttattatatttgttagataggcgcagtcagtgaatgctggcaggcctgttaagagttgctttcaatccctgattaactttatttcaaagcaacttgccttccatgcaatggaaaacggacacattgtatcaaccttaaagcttataaactgtagtgaatacttcaattttaacaatccccaaaggataccagaaagagttaatgacagcagtctgtatgaaagaaaggcgtctattcatttagtatgagcataccacaaatcatgaaagcagtcttaataaaaaaaaggcgagttgccccaccttacatgttttcacaacggaataatccttattgtgaattgctttcattgttgaaggtagattatttattcaataataaaaaatgaaatgaaaagaatttttggtttagatatcggcaccaattccattggttggtcactcatcaagcaagattttcctaataaaatcggagagataattgcttcgggaacgcgtattatacctatgtcgcaggatattttgggggaatttgacaaaggtaattccatatcacaaactgcggaacgtacacggctcaggagctcacgaaggttacgcgagcgatttttgctgcggagagaacgtcttcacagagtattgaatgtaatgggatttctaccagcgcactatgcggctgcaattgattttgaaaaacgcttagggaaatttaaaaatggagagcccaaacttccttatgataaggatggtttcatatttaaaaagtctttttcggaaatgctcgctgacttccaaatatcccaacccgaattattaaaaaacgaaaagggggaacagaaactcataccctacgactggacgatatattacctccgtaaaaaagcgcttgctgaaaggatagagaaagaggaactagcttggatattattgaattttaaccaaaaacgtggttactatcagctcaggggggaagaagaggaagagcatcctaataaacttgtggaattccactcgttaaagatattggatgtgtcgacagatgaagaacaaaacaaaaaaggagagacatggtataccttaacgttggaaaatgggtgggaatacaggcgctccaacaaggtgccattatatgactggaaaggtaaaacaagggacttcattgtaaccacagacctggataatgatggcaccattaaaaaaaggagcttccgggcgccttcagaaggtgactggacattgttaaaaaagaaaactgaaaaagaaatcgaaaactcccgaaacacggtaggcgcctttatttacgaccacctgctaaaaaagcctgggcaaaaaataaagggcaaattgatacatacaattgaacggagattttatagacaggagctaaagcaaatcctgttaaagcaacaggaatttcatgcagcattaaaacaggaggaagtatataatcattgcattagagagctatacagaagcaatgaagcccgccagcttgtcttaaaggaaaaagatattttacatctcctcatggatgatattctcttttatcaacgcccgttgaagagtcagaaatcttctatagccaattgcccgctggaatatcgtacctataaagataaaaatggcaccgtccaccagcagtacctcaaagccattgctaagtcaaatccctactaccaggaattcaggatatggcaatggcaacacaatctttctatttacaagaaaatggacgataccaatgttactgctgattttataaccaatattgaagaccgggaagagttattcagattcctggataacagaaaagaaattgagcaaaaacacctgctgaaattcatcctggaaaaaaaggggttcaagggaaaagcactaagcgcggaaatcgaaaaatatagatggaattatgtcagtgataaaatatatccatgtaatgaaacaggagcgcttataaaaaacagattggagaaagtagatgccctaccaacaggatttccaacgaaagaacacgaatatcagttatggcatattatctattctgtaacggataaagtggaatatgagaaggcgctaaaaacctttgctgaaaaatatggcatcgatcaggtaacatttgttagttcatttaagaagttcccaccattcaaaagtgactatggatctttctcagagaaggccataaaaaaactcctcccactgatgcgtgtggggaaatactggaattgggaggccatagatgagtcatccaaatccagaattgaaaaaataattaccggtgaatacgatgaaaatatcaaagacagggttagaaaacatgctatacatttagtccatgaaaacagcttccagggcttgcaggtgtggctcgcacaatatataatatatgggtatcattcggaggcgacgagtacagataaatggcgttcaccacaggatatagcatcctttctgaaggatttcaggcagcactccttacgtaatcccattgtagagcaggtggtaatggagaccatgcgtgtagtcaaagatgtatggcaacaatacggaaatggcgccagtgatttcttcgatgaaattcatatcgagcttggcagggagatgaaaaatcccgcagatgaaagaaaaaaaattaccaaccaggttttagaaaatgaaaataccaatttgagaataaaggcattgctcggcgagctgctaaatgaccctgacatcgaaaacgtacgcccttattctcccatgcaacaggaaatattgaagatctatgaagaaggggttttgaattctgatatagagatcaatgaagaaattatcaaaatcagcaagatagcccaaccctcgtctgctgaattaaaaaaatataaactctggctcgaacaaaaataccgttctccatataccggggctatcatcccgcttaataagttattcactccagcatacgagattgaacatatcattccacaaagcaggtattttgatgatagtttttcaaataaagtgatttgcgaagcggccgtaaacaagttaaaagacaaccaggtaggacttgaatttatcaaaagtcatcatggtgaaatagtacagacaggattgggaaaaacggttcgtatttttgaagtaaaggaatatgaagattttgttaaccaacattacgcaaagaacagaagtaagcgcaacaagcttttaatggaagatattccggagaaaatgatagaaagacaactcaacgacactcgttatattagcaagtttatctccggacttttatccaatattgtcagatcagcaactgatgacgatggcgttaattcaaaaaatttaattcagacgaatggtaggataactggcatattaaaacaggactgggggttaaacgatgtctggaatgatctgatccttccgaggttcgaacggatgaatgcacagagcaattcgtcgaactatactgcctggaatgagacttatcaaaagttcctccctacggtgccgctaaacgaatcaaaaaacttttccaggaaacggttggatcaccgtcaccacgcgctggatgcattaattatctgttgtacgacaagagatcacatcaacctgttaaataatttgtatgccaagtcgccggtacgctatgatctgaacaggaaactgagaagatatgagcaggtcagttatatccatcctgaaaccggcgaaaaaatagaaagggaaattcccaaagagtttcataagccatggcaaaactttactgtcggcgttaaaaacgcgctcgaaagtattattgtcagctttaaacaaaaccttcgcatcattaacaaggctacgaatcactatgagagctgggttgtaaaggatggcgttaaagtcaaagcattacaaaaacaaaacgggcagaactgggcaatacggaagccattgcataaagacactgtctccggcctggtgaacctgccgagaatcaaggtacctaaagggaaaataataaccgctacgcgtaaagatattgacacgtccttcgatctgaaaactattgaagctatcacagatacaggtattcagaaaatattaaaaaactacctggcggccagggaaaataaccctgaaatggcttttacccccgagggacttgaagagcttaacaagcatatcagagactataatgacgggaagtttcatcagccgatttataaagccagggtctttgaattagggagtaaattccagttgggtcaaagcggcaataagtccaggaaatttgtagaggcagaaaaaggtacaaatttattctttgcggtgtatcagggtgaaaaagggaagcgcagtttcgaatcaattccactaaacatagttattgaacgacagaaacaaggcctaagttcagttcctgaacgggatatcaagggacagccgctgctgtttcatctctctcccaatgacctggtatatctacctactgaagatgaattacaacaaaactcaaatatctcattcagggataaacatccgaagtatgttggcagaatatataaagtagtgagctttagtggaaaccaggttttctttattaaacatgaagtagccacaagtatagttaataaagttgagttcacttcttcaaataaaatggaacgatctatagatggattaatgatcaaagaatcttgtattaaactaacagttggcagattagggaatattaacatttgacctatgatcaagcgtacgctttatttcgggaatcctgcttatttgaaaacaagaaatgagcagttgataattgagctgggaacaacgggagaagagaagcaggcggctatcgaagatattggcttattaatattggaccatcagcaaataacaataacacaggctgtattggccaagttattggccaataatgttgcggtgatcacctgcaatgacacacatcatccaacaggtatgctgcttaatctggatggacactctcttcaaagccagagatttcagtttcaaataggcgcatcggttcctttaaagaagcagctttggtatcagacagtagtggctaaaatcaccaaccaggccaacttattggaacagaaaagaattgccaataagtatttgctgaaacttgctaccagtgtcaaaagtggggacagtgacaactgcgaagcgaaggccgctgcttattattggaaaaatatatttcctggtgctacagatttcaggcgattaagggaaggggctcctccgaacaatctccttaactacggatatgccattctaagggcgttaacggcacgttgtctggtagggtcaggtctattacctacgctcggtatttttcaccggaatcaatacaatgcatattgcctggcagacgatattatggagccctataggccatatgtagacatgatagtggcagacattgtgaggatgaacggtagctatcttgagatgacgccttccatgaagcagcggctattggggattcccgcgatggatgtgatattggacgaggaaaaaagcccgctaatgaatgccatgcaacggactacatccagtttggcaaagtgctttgaaggtcaatccaggaagctattatatccggtcatgcaaacgacatatttaatttaatatgaaatttgaacgattaaacgcctatcgcgtcatgtgggtacttgtaatgtttgatttgcctacggaaacaatacaggacaaaagaatatatgcaaaattccgtaaaaacattcttgcggacgggttctcgatgtttcagttcagcatgtatcttcgccattgtagcagccgggaaaatgcagaagtacatattcagcgggtcaaaagaatccttcctgctaaaggtcatgttggaatattaaatattactgacaaacaatttggtatgatggaaatatttcatggccaggagcaggtgggtacacctgctcctgtacaacaactggaactcttctaataccaacattaaaattttgcggattatagccataaaaaaacgggaggatctcccgtttttttatgctgttccggaggctaaaccctctacgggcaggcattccataaaagtcagttgtttggaaccaaaggtaatgtaaagtttgaaagcaattcacaactacgatgaaatgctggaacgtgccatattagttgtttggaaccaaaggtaatgtaaagtttgaaagcaattcacaaccgccggctatcggtgtgatcgatatcaccgttgtttggaaccaaaggtaatgtaaagtttgaaagcaattcacaacttgcccctatggtagatgatcaattcatcgttgtttggaaccaaaggtaatgtaaagtttgaaagcaattcacaacttatcttggtgtgaagcctgcagagctttgttgtttggaaccaaaggtaatgtaaagtttgaaagcaattcacaactacatggttttcgtaatgtgtatgaagctcgttgtttggaaccaaaggtaatgtaaagtttgaaagcaattcacaacgttcagggcagatacttattccgaagttcagttgtttggaaccaaaggtaatgtaaagtttgaaagcaattcacaactacatggttttcgtaatgtgtatgaagctcgttgtttggaaccaaaggtaatgtaaagtttgaaagcaattcacaacgttcagggcagatacttattccgaagttcagttgtttggaaccaaaggtaatgtaaagtttgaaagcaattcacaactaatagataaagaaacaatactcataaacgttgtttggaaccaaaggtaatgtaaagtttgaaagcaattcacaacaagcgataaaatgtcattagcattaagaagttgtttggaaccaaaggtaatgtaaagtttgaaagcaattcacaacatgcgtgggcggcgggaatccaattgcgaggttgtttggaaccaaaggtaatgtaaagtttgaaagcaattcacaacacctggagactactggtaccctctattgggttgtttggaaccaaaggtaatgtaaagtttgaaagcaattcacaacagcatatgcttaatttgagttatttttactgttgtttggaaccaaaggtaatgtaaagtttgaaagcaattcacaacttcaagaggggccaccagccgctcaattttgttgtttggaaccaaaggtaatgtaaagtttgaaagcaattcacaacattatacagttaggccttataaactaatacagttgtttggaaccaaaggtaatgtaaagtttgaaagcaattcacaactgtcgcttgcgtgaaacttgatggtcttcgttgtttggaaccaaaggtaatgtaaagtttgaaagcaattcacaacagctatcttcgtagcacaatggcacatctagttgtttggaaccaaaggtaatgtaaagtttgaaagcaattcacaacaggcggcagccagatatccatatccagcaaagttgttcgaaaccaaggttaatgcaaagatcaccaacaatagatatacacagaacagggcaaagcgataacctaccctaaaccatatttattacatgccttgaaccctctacagtatacaacagcctatctataaaaacctcttaactccccaaactaatcatctgtgaataccacgtctctttcaacattttcaccagatgattgaaatacttatcggaccccaagttggtcgatatcgctatctgcgccgcccagtatggttctgtgaggttggtatcatccagcaggctaaaaatagaaagctgattggtaaactctttcgttcctttctttttggcggggcgaccatagtctcttaaaaagatgttataagccaatgtgcggtgtacgtaatctttcgtggagtcggccacaaattccggcgcaatcactaatatagcatcatgtggatacatcctggatgctattcgaatattctcatcagtgacgtggctcacatctcccagatacattagcgaagaagagaacgcttcgtttttaagctccttgtcaagcgcatatttcacatcctgcgctatctttctgctggacatgggtcctgctgaaagtatcaacaactttttaatctgccgttcagtggtattttccttaatactggttacaatagtgggatcaccagtttgtgcataggcattaatgaggcccgcagccagcaacagtaacagtattattttcttcatggtatagcaaactataaaataaaaaggcctgcattactgcaagccttcaatgttttgctccccctgctggacttgaaccagcgaccctctgattaacagtcagatgctctaaccaactgagctaaggaggagtgtttcccgtatcgtttgtgcgatttgggattgcaaaaataggtaaattttcatttttgcaaaatcttatttcattttttttgaaatttttttcgggagataagaaaaagtagccaccacaaagggtttcagattgatgataaaaaatcattttctcaccctcaccagctcccgctcctccaaagtgctgaccctggtggcttttcgcacaaagggcagatccagtttgctcaccctgaaatggggaaaggattgtatcacctcgcaggtgaagcctttttgctgtagcgatgccaccgcctgcggagtggcgaacaacaccttcggcgatgccgccaacgcgggcaggatcgtagtgctatcgtaacgcgctaccggcgcatggagatagaaatcgaaagcgtagctgttatcgccgtacagggctaccgtggttccgggtaacgatgcattggcatagcgggcagcttcactgccgctctggtagcgcatcatatcgggatacaggatggtattcaggtaaaggttcaacaggatgctgatagcgatggtgcggtaaaatacagccgccttggtagatttgtcgagccagttatgcagcagcacatacaacagtatcagggcgccggcgggtatgagccaggcatagtgcatggcgggcttgtacagcaggtctatcaccgtgcccagtatggcgatgaggatgataatggtatattgcgtagtgcggaaaaacttcatccagcgctcgctttgctgcgagaggatataatttgcggtgaggatggcaaagaaagggaagatgatattcaggtaatgcggcagctggaacttcgataatgaaaacagcaggaaagtggccagggcgccgcatatgcagtaatattccgtttgttgcttccatcgcctgatgaacaggatcacagcagcatagagcatgattgaccatggcaggaaagcccacagcaaggtgtgaaaaaagaaaaaaggatcgcccgcacctttgataggaccggtgttcatgaaccggccaaactggctgtcccagaagaaaaagcgcagaccggaaacgccggtacgaccgaaaactattttctccgggtgttggtcaaactgatggtataatgcatacagttccggtgtgatgaacaatgcgatgagcactgctgccagcagccatcgccagtgcagcagttcgcgccagttacgggtaaagagcagctggccgccgatggccgcaccgatgggcaccagcgcaaaagggcctttcgtcatcacggcacaagcggcgaagatggcgccgggcaatatcttcttctgataaaaaaaataaacagcagcgatgataagccccgtcaggtatggttctgcgcgtacgtcgttgttggagatcaccaggtgttcggcggtaagcaggatacataccgcccagcgggctacctgctcattataaagagataaagcaaaacgataagtataccaggcgcccatcaatgaaaacaatatagcgggcagcttgtacgaccaggtatgaatgccgaagatattgaaactaagcgccaccatccagaaagggaagtggggtttatcgagccagtcgcggccatccgcatagagattccaataatcatgacggagcaccatctgcttggatatcccggcatagagcgcgccatcgggctccaggatgggtacccacagggcgctgaactgcaacagcaccaccatcgccgtgatcagcagccagacctggttttcattcagtgtaaacttacgtgtaggtgtaattagcatagcgaaatttactggcatctgccggttacttcaacaatacacgctactcttaacacaaaaataattcctaccagaaccagcctgtcttctctaggccaagatagtagccatcttccctttgttctattggatatgtcttcagatgatatccttcgccggtggtgttatgcccgtttttgatgctgaagcggtagcgatgtaccgggcatacgatgttaccatcattgtccacgaagccatcggccataatgccgctggcatgcgggcatttgtaggcgaaagcgaagagctgcccctgaaaacgggtgcagcagatcatcttaccatttatttccagtacatggatatctgtttcgccgacaggtaaactgccctcatcgagtttataccacgaatatcttttggccatcagtagaaaaattccgttttataaggataacgttcccggtacagctgtgaaaccttgtccataatggttttgcgcagctcctcgatatttcttttctccagggcggagacaaatacacagttgccgttggttttaacctcccagctttctttcagctgtttgaggatatcttctttcacatcctcttccagccatttatcgaaggtattggcttcgtaaaggtccatcttgttaaagatcatgatggtgggcttttcgaaggctttcagttcttgcagggtgcggttcaccacttcgatctgttcttcgtactgcggatgggagatgtccaccacatgcatgaggatatcgctctcgcgcacctcgtccagcgtggatttgaagctctccaccaggtggtgcggcagtttgcggataaaccctactgtatcgctgaggaggaaaggtgtctggtcaaacaccactttgcgggtggtggtatccagcgtggcgaagagtttattttctgcaaaaacctcgcttttgctgagaaggttcatcagcgtgcttttgcccacgttggtataaccaacgagcgctacacggataaactcaccgcgttccttgcgttgtgtgagcgcctgtttgtcgatctcgcccaaacgcttgcgcagcaaggcgatcttgtctttaacgatacgacggtccgtttcaatttctgtttcaccggggcccctgctgccgataccgcctccctggcgttccaggtggctccacataccacgcagccttggcaggatgtactggtattgcgccagttccacctgcactttggcctgtgccgtgcgggcgcgccgggcgaagatgtccaggataaggtcactgcggtcgatcactttcactttcagcaccttttcaatattggcgatctgtgagccggtcagctcatcatcgaatatgacgattgatatatctctgcccgttataaactgatgtatttcttccagcttgcccttgcccacaaaggtggctctgtcggggtgcgacagcttctgggtaaagcgttttacggtctgggcgccggctgtttcagccaggaacaccagctcgtccaggaactcctgtacctggcgctcagactggtctttcgtgatcacacctacgatcactgcccgttcttctttttgtaccgcttgttttttctcaatcaaagtatttcagaatttcctgcaaaaatacttgaaatttttctcggaaagcgccccttcgcttactttacggactttgcgggaaactacctacatttacgcgatccaaaacaacaccttcacatcatgtataaacctcttttattgacaggactattcatttcaactatggtatcagcccaggacaggatgacgcccgaactgctatggcagttaggccgcgtaagcggagaagcggtgagcgcagacggcaaaaccgttatctacggcgtttctcaggtaaatgttgcagataataaaagcgagaaaaatctctttgccatccccatcaccggcggcacgccaaagcaacttacccaaacaccaggcgcagaaaacgatgtagccatattgcctaacaacaagatcggctattccctcaaaggccagtggtgggagatgaacaccgacggctccaacccaatacagaaaacgaatgtagaaggagggatggataacatccgcctctctccggacggtaaatttatcctcttcaccaaagaggtgaaagtgaaaaagatcaacggtaaagaccattatcccgatcttgccaaatcaaatgtacagatctatgataacctcaactaccgccactgggatgcctgggaagatggtaatttctcccatgtattctacgccacctacaataatggcgaagtaggcacaccggtagacatcatggcaggcgaaccatacgactgcccgcaaatgccctctggtggcccggaagacgctatctggagcgtggatagtaaaagcatcatctacgtatgtaagaaaaaatacggcaaagattatgcgatcagcaccaacaccgatatttacgaatacgacctcacggccaaaactacccgcaacctctccgaaggcatgatgggctacgatgtgcagccggtattcagccccgacggcaaatacctcgtgtggctcagcatggcccacgatggctatgaggccgacaagaacgatgtgatcatcctcgatcgcagcaccggcgtcaaaaccaatatcaccaagggttgggacggcaccgccaatgcagcgcgcttcagcagcgatagcaaaaagatcttcttcctcgccgtgatcaaaggcaccgaacaactcatggagatcaacctggcaaaagaagtagcgcaaacgaacgaaaaacatatccgccagatcacagaaggcgatttcgatatcaacggcatcatcgcgcagagtggcaacaagctcgtggtaacccgcaccgatatgaaccacgccgcagaagtgttcaccgttgatctcgcgaaaggcgatgtggaagcgctgaccagcgtcaacaaaaatatctacgacaagatcggcagctgcaaagtggaaaaacgctgggtgaaaacgaccgatggtaaacagatgctcgtatgggtgatcttccctccaggctttgatcccgcacaaaaatatcccaccttgctatactgccagggcggcccgcaatctgcactgtcacaattctattcctaccgctggaacttccagctgatggcctcccagggctacatcgtggtggcgcctaacagaagagggatgcccggtcatggcgtgcaatggaacgctgctatcagtaaagactggggcggccagccaatccgcgactacctgagcgcgatcgacgacgtgagcaaagaaagctatgtagacaaaaaacgccttggcgcgatcggcgccagctacggcggctattctgtatacatgctcgccggcgttcacgaaaaccgcttcaaaaccttcgtggcacacgatggcctcttcgatctgaaaagctggtatggcaccacggaagaactatggttcgccaactgggacctcggcgcttattgggacaaggctaacgtgaacacctatacgcagttcaacccgagcgaacacgccaacaaatggaatacgcccatcctcatcatacagggcggcatcgacttcagagtgcccatcgagcaaggcttacaggccttccagctggcgcagctgaaaggtatcaagagcaaactgctctacttcccggaagagaaccactgggtgctgaaaccacaaaacgcactggtatggcaacgtgagtttttcagctggctgaaagaaacactgtaaaatttggggatttacggatttccggattttttgatttgttggaaatccaaatccgaaaatcaaaaaatccgtaaatccataaatcaaatatccaaataataaaataaccaaataactaaatccttatggcatcgctactgattgatatccagcgtggcatcgccaccattaccctcaacaggccggatgtgtacaatgccttcaatgatcccctcagctacgagctgcaggacgctttaaagcaggcggaaaaagatcccaacgtcagggtagtaatactcacgggcgcaggaaaggcctttagcagcgggcaagacctcaaagccaccctggacactggcaaacgcagtctcagcgaatcgctgcacatgcgttacaaccccattatccgggccatccgcaacatgccgaaaccggtgatctgcaaactcaatggcgtggccgccggcgcaggatgctccctggcgctggcctgcgacctgatcatcgccagcgaggccgccacgatgatagagattttcgttaacatcgcgctggtgctggattcaggctcttcttattttctgccccgcaccgtgggctatcaccgcgccttcgagctggccaccaaagcgtcgaagatcagcgccacagaagctttacagctcgggctggtgaacaaagtggtgcccgccaacgagctcgatgccgccgtacaaacggaagccgaatactacgctaacgcccctacgaaagctatcgcgctcatgaaaaagatgctcaccaaaggcctgacagaaaccctggaccaaaccctcgaatacgaggcctattgccaggaaattgccggtaat

SEQ ID NO: 1231 - DNA, 24314 bp, synthetic construct
  source 1..24314: mol_type = other DNA
  misc_feature 1..24314: note = Synthetic
tgagttaataggtgaatgagtgaattcgtaaaatcattaattagtttgtacgattagctaattttacgattccacgattaaacaattccacaaattaacaatctataaaatactcagcagatcgtctttagaaagactactgaagaatgaagtctcagtagtaataagatcctgagccagttttttctttttcttttgcaggttcatcattttttcttcgatggtaccagaacatatcattcgtacggctactacatttttggtctggccaatgcggtagctgcggtctatagcctgattttctactgcaggattccaccagggatctacaagatatacatagtcggcttcggtaaggttcagacctgtgccaccagctttcaggctgatcaggaaaacccgtacttcctcattattctgaaagtgctgcactttatcaccacgattccgggtttgtccggtaaggtattcatagcggatgtttttctcatccagcttacctttaatcagatccagcatttcaacaaattgtgagaataccagtattttgtgttccctggatttgttttctatctgttccgtcagaatttcaatctttacggcatgatctccggaatgaccatcttttagcaaaacaggagagttgcatatctgcctaagtctggtaagccctgttaatacatgcatgcttttattatggatctcgtcttcgtcagtagctgatataaaatcccggacctccttttcatagaggtcgtaaatcctgcgttgctctgtattcatttcacaatagatcagcatctctgttttctccggcaattctgtagcaacctgcttttttgttcttctcaggataaaaggttttattttcttttgaagctctgtagcccgtttgctgtactcaaacttgtcgatagggatggcgtatatatctttgaagtattgtttgcttcccaatagtccggggcaggcaaaagatagctgtccgtataaatcgaaagtattattttccacaggggttcccgttagtgcaatcctgttacgggattgcaacaggcgtgctgctttatacctttccgagtttggatttttaatggtttgtgattcgtccagaaatatataattgaatctgaatttcttcaggaatgtaatatccgaaagcaacatgccataagtggttagtacaacttcgtatttttgaaaatctgctgtacttttctgtctgtctgcgccataatgggttagtacttttacagaaggtgcaaatttagccaattcctcctgccagttgaaaagcagggaagtaggtagtaccacgaggttggttgtatgaccatgcttttctctttgcgagaggataaaagcaataatctgtattgtcttacccagtcccatatcgtcggcaaggcagcctccgaaattatgactgtccaggaagtttagccagttcagaccttcctgctggtaagttcttagttcagcattcaaggctacaggcactgcaacttcgggaatttctgcatttacagaaaaattgtgtatataggaagctatttctgcctgtacttcgttacttagaacttctttctcaaataaatcctgtatttcggtatagctgatcttcggaatcttcaagacctcttcgtcgatatcgccggcctgaaagtaacgtgcaattttatgtatccattcttccggtaatattccaagagtaccatcatccagttgtacaaatttacttttgtttcggatggccttgtgtacctgctttagagtagcttttttatgtccaaaacttactttcagctgcgcattgaaccagtcgattccgcttgtaacctctatagtaattttggcacggtgcgcattgagattgttatttttgatattgttgaaacccagaatgttgatatcttcgtttcgccatgtctcaaaggcgttcaaaaaccattcatcatccaggaacttatctttgtgaaggtaaaagtattcctgttcttctatttgttctctgaaatccgggtgttgttccattaccactctggttagccggatttcagcattatgatcacgctcaattttaaattcatttccgttctggtcggtatccagcagctgcttgcgggagtacaccggaatttccacattgccgtatttcattactggtgtaatggatatataattgccttcctgatgcagataaataagcttttcggttgtgtaatctttatcggcaatttccgtaggtgttgcctgacggatatagctgtaattaatctgtacccgttgttccagctgggtcagtatactctgcatgaagacttcgtatctggagctgtgaacgagtaatatttcgttgttggatttaaagaactgtatcacccgcagcatatcgggatctgtaatcagataataggtattccggtagtaaacaaaatattcgtttcggataacaacctgactgaaggggagtgttgtatctctgaatagcaattctccggttatttcataaaaaggctctttccggaagacatggagctggatttcagcctgcagtgtattcagatgcacggggactaatgactttgccgatatgctttccgctatagctctgtcgtggaaatagacttccagattcaatgggttttgcacaatatgcttcagtgcttcagtttctgcaggatcggtttctccgtactgattgttgaagcttgtaatagcggtatagaacttaatctctgaagcctgttctgctttccacagcaacttcattgcatcgatattgtttaccggatttttaagctttccggtctgggtcgtatcggcttccatgagttggaaattcagctgattgtaatagcggtgtttaccaataaccagtatctgctttttgttggtgtcctgcgtggccagatcctttatgatggatgtacggcgggggagcaaatctcttttcagaatatgctcgtctacctgcagtaattcttttattttagggcttacctgaagccggccattaagataatccagccgaaaatatatatccagattaccttcttcttccagtccatagcttttagcataggggagcagggttttgtgccgcagataagcatcaaagaaaatacggtagtctctttcttcaagcaggcaataaataatctcggcctggtgtatacacagcttatcttcagccgaattacaggagcacgacgttaccatattggcaccgacctgactaacagcgactctggggtagtccgacaaagaagaacttttcgtaaacacaccggcatttaattccagtgccacagggtagatatcctgaaattccttcacagctataaaatctgcatttgctgtatgctttagcaggtcgtatatatgcagtgttcttatattaaagtctggtaagatatattccttaggcagttccatgcgctgaattagtgaagaacaaaagtaaggattttagtgaagctttacttctgtataagtacatctgaatctgaaaaaataagcgctattgttacagcagtattttatctccggtaatacctactttgtaccatttgttattttcatataaagcggcctgatgatctcctttgtgctgatttacatctacgcccagtacttttttattatagtaaaatccaacattggtttttacaatcgtatgacctacaataattctttttacctgaaacaaggatagcgtttggtctacaactttctcatctactacaggttctttaaagtatccgcggtaccagaaaatgccatctgtgctattgaatattttcagaatggtagcatcggtaacggtatttttaaggtttttccacccaatataaggtctggctatttcatttagtttttctatggtcagccccagactgttaacatccggagaaataccaccatgcatacacagattatcgccgattttttcaatcagatttttacttctcagccaccgacccagttctgttttttcactgtataaatctgcataggaaaggtttagcttctccgcattcaggaaatatttctggtctacatatttaaagttgcctgccagattcataatgtcgtgattgcccaaaatagtatgaacgtagccacctttcagtttagcttcttcttccagtttataaagcaaccacatcgtagcaggtacttcggttcctctgtcaaacagatctccgcaaatcaccagatgcccgtctccatagatccattcgtattttttattaataactttgttcgccagtaacagctctcttagtgcatcgaattcaccttcaatatccgagagtaccagcattttcttaggctgtgctgttacagagggctcattcgaaatattttgttttagttttacctcgaagtttttctcgggtgcatccgaaaaactgatgcgcagttttatagctttcttatttttttgaaggtaatgttcttttttctggttgccagcctcaatttgttgcacaagaatactgtcacctttataagtaacatatggaccatcggacgaattgacaggtcttttttcctgtccctgaacggagcataaactgatagaaaataataatagtagcgcagattttataggagaaaacatcatgatatagtattaatctgaacaaatataagggataatggggacttgggaatggggtatcggttgctagttgttagttaagtacgaagttagaagttagaaaaaagaaattagagatctgccttaagtgatttcatctggctaatcaaaagctcctgactatatcggttttttataattaattacccggatattttatagcatccgaaagttctataggattgttgttttttcttattgtaaactgtttttgtttcgtaagctcattgaaattaggtgtaactggcttaccagattcatcaacaaatttcatttttactttaccggttttggcttctttatttctttataaagatcttctattttattaaccagtcgataacaagatctgtcgttgattcggcatcttttgagataattaaaatcattcaatacatttaaaattatccattagaaactgcgcttcattctttgaaatatttttagaaataacaagtgttaccttattctttttattgcattttatggtttttataaaattactgtcagggtattttttttgacctgcggaaatatcaaaaaagtgttcgaatacagtagtattattatgataagttgtaaaggcatataataatttgttccgacttttaaaaggtattttattagttatagacttatcatccattattttcctgtattgctgcatattttgtgcgtaaacaaaatctccaaacataagcatcataattttataatattcattggtataccgataataattaccatttgaataaaattcagatttgttcggaatcgagttataggaagcatacttactataggatgtacagttggttaaaaataaaattaaggcaaataaaagataccttgatttttgtacacctttaactggataaaattttaataacatgctgtcaaattatttaagtgttatatcacttcattttttaaatcttcaaattagcaaattttcaaatggctgcttcttcaaattgaaataattttatcttatttttgcccgaatattcactaatacgaggattcatggaattaaattataagctagaggaacaggattatttacaattgtatatgtatgctgcttctaaaaatcaggttataaaacagcagcgacaaagggtattatggcttctgattataatctacatcgtttgttcattgcttatgtttagtatgagtatggtttctttgtttgtttttatagcagctgctattactgttacgcttatttatatatattactatgaacgtaagcgctatgaaaagttttacttaaagaatataagaactaatcttaaaaacaggataggggttaactataagactgtatttggccctcacgatgttattctgacagagcctaatgctgaagcaaagtttaaataccccaatatagaacttgtagaggaaattaatacctattatttctttaaaatgaaaaccggtgaaagattcattgtgactaaaagtgctattcaggattctcaggaatttaatcagataatcagtaaactgtctaaagattataatattcagttgtgtcaggaactcaactggaagtggagataggagattagttattggttgtcagtggttagttgctggtgaaatgtgtaaccataaaatcgtattaccttattcacatattatagttgtaaaatcgtttaatcgtgtaactgtgtaatcgtaaaccgtataagcaaatttacgacttaacgattgcacgaattcgcatattccaattagtttacataattgcataacattattaatgaatttgtaaattaatatttacatctgtttcctgtattttattctttttttcacttatttttgaattataataaattgcattaactagagatatggaattgaactataaagtaagtgaacaggattatttacaagtatatatgtatgctgctacaaaaaatccaattataaaaaaacaacgtaaaaatgggctgataagaatgattgtttttagcataattggtttatgcttaatgtataatactagtataatttctttacttgtttattttctattcgttgtctttacattttgtttttattttttatattatgaacgtaagtactatgagaagttttatctgaaaagcataaggacaaatctgaaaaacaagatagggcttaatagtaaggttgtttttggtcttcatgatattattcttacagaacctattactgaatcgaaatttaattattccaatatagagcttatagaagaagtaaaggattattattacttgaaaatgataacaggagaacgacttattattcctaaagttgttatactaaattctgaagagtttagtgagattattaatagattgaaaaataactataatattcagttggaacaagatctcaactggaagtggagataggattagttattggttgtcagttgtcagttgttaaactgtgtaatcgtaaaatcgtgtaatcgtattacctcattcacctattgactcattgacataattataattgtaaaaccgtgtaattgtgtaactgtttaatcgttttacagtgtaaacaaattcacccattcaccaattgactcattgatatagtatagttgtaaaaccgtgtaatcgtgcaactgtaaaactgtatatacgaattaacgattacacgaattcactcattgacatattcacccattcaccaattgacccattgatatagtatagttgtaaaactgtgtaaccataaaatcgtgtaatcgtttaactgtttaatcataaaagcaaattaacgattacacgaattaacaaattcacatattcacatatttacctgttcataaatcttatttttttcttttggcttataatttgtagttgttttattttaaaataagaaatatttactttattttaaatgatagaaataaaattatactgaaattaacttgtgagcatagtacgggttgacgtctaaaagcagattctgttaatatctacaacttgtaattgttctgattaataaaacactgatgaaatctcaagatgaaaaatttaactacaacaaagggcaaagcctggcaccggaggatatattaaaggctctgctggatgcattgaaaaattacgaaacctcgggagagaagttttacgatagtgccgatctgaagcgtctgttgaatattagtgacagtacgctttaccgattgcggaaaaccaagagtattccttttatacattttggaaaaaagtacttttaccctaaatcgttttttgataaaaaagccgaggggtaaattattgaattttaaacgcaaagaacgcaaagtttcattttcttttatgttgtttttaaggctcgccaagccgctaacacttagcaatgagcactaaaaacttaattgccttaacttctaaatgttgaaaataattttatcgtaagataaaatctttgtgctctgaaagcagcgctctatcaacatcacttttgtgtctttgtggttaaccttctaatagtcctaagacttatcataacactaaggcacaagatatgtttatctgctttgctttttaaggcacggattgcttcgcaatattcagttttcaattgtggcagttcgagtgaaattattgaagtttaaccgcaaagagcgcaaagtttcattttctttgatactgctttaaaggttcgccaagccgctagagctcagcaatgacgactaaaaacttaatttccttaacttctaaatgttgaagataattttatcgcaagataaaatttttgtgctctgaaagcagcgctctatcaacatcacttttgtgtctttgtggttaaccttctaatagtcctaagacttatcataacactaaggcacaagatatgtttatctgctttgctttttaaggcacgaattgcttcgcaatactttttgtttattatattttcagcgtcagttcgagtggaattattgaggtttaaacgcaaagagcacaaagcttcattttcctttatactgctttaaaagttcgcgaggccgctagtgcttagtaatgaccgctacaaattactccgtagaatcttcgacttagagttaaataacttccttccaggttacatactagtgtactttagcagcacttttgtttcactcttgttcggggtttgttcgggaatacccccgtttttaggcaacattcccgaagcatcctcgaaggatccccgaacaaagccattaaaaagcattggatgtataggcagtaaaagcctttactcatggtgtttttcagtgttttcagacagaggattgtatcgtatttcagaggtttataccggtcaaaaccagtcaaatgcagtcataatcggtcaaaaccagtcacgaaaactgaaaaataacttttgaaaacaataagtctataccttggctctgcaaccaataaattttatttattatggcaacaattagtaaaggaatccttggtggattctcaggaaaagtaggcaccgtagtgggtgttaactggagagggatggatatcatccgaagtgtaccaaagcggtcgcgaaaacggccgacagataatcagatgttgcaacagtacaaatttaaactggtcgttagcttcctgcagcctctgcgcagtatccaggagttgtatttcggaagtccgcagggaagtctgtcacgggtaaacctggcaacatcggaaacgctgaatacggctttggaactggtgaacgatgtgccggaattggtattcgaaagaatactgattaccaaaggcgagcttaccggatttcagaatctgaaaatcagtccggaaacggggagtatcctgaatctggaatgggaggacaacagcacacaaggtaatgctaaagaaacggatttgataaaccttatctgttatctggaaacacagaatgcttttgtcatctttgaaggactggtagcccgtaagcttattaaggctactgcaaaactgccggatgtgtatcagggaaaggaggtgcatgcctgggctttcctgaacaacgagaagaaaacacaggccagcaccagcgtgtacctcggcaaaattaccttaacctaaacaaaagaccacccgaaagggtggttttctgttttatatgtaaagaagttttgagaaaagtaaaataaaaacataaaaaatcccccgtattggaagacgaggggggcttgaatgttttcacaacggaataatccttattgtgaattgctttcatttacaaatctatgtaaataaaattaatttcaaatacggaaaaccgtaaaaatgaataaaaaagtctttttatatttagtgggtatttgaaatgaagacaattatggttaaaaatatacttggattagacctaggaaccaattctattggatgggcactaatcaaacaggattttgaaaataaacagggagaaatcctcggaatgggtagccggattattccgatgagtcaggatattttaggggattttggaaagggaaattccgtttcccaaactgctgaacgtaccaaatacagaagtgtaaggagattgcgtgagcgttttttgttgcgaagggaaaggcttcatagagttctgaatgttttagattttctgcctgaacattatgcctcacaaattgattttaataaacgcttcggaaaattcaaagaagaaacggaaccaaaattagcttatagtaatgatggttttattttcaaaaaatcatttgaagaaatgattccggattttaaaactcatcagccacagctattagaaaataacaaaaaagttccttatgactggactatttattatctccgcaataaggcactttctcataaaattgaaaaagaagaactggcttggattcttttgaattttaatcaaaaacgtggatattatcaattgcgtggtgaagattttgaagaagagaaagataaagtgtttgtcagactgaaagtagacagagttgttgattctggagaaaatgtgaaaggaaggattctttatgatgtatattttgaaaatggatggaaatatgaaaaacagattgtaaaaactgaagattggataggacgtacaaaagagttcatcgttacagaatctattctgaaaaatggtgatacaaagagaacctttaaaactgtggattctgaaaaagattggattgcaataaaaacaaagactgaacaggaaatcgacaaatctcacaaaacagttggagcatacatttacgaaacccttcttcaaaatccaaaacaaaaaatcaaaggaaagctggttcgtaccattgagcggaaattttataaagcggagctgaaaaaaattctggaaaaacaaaaagagtttcatccggagctaagacaagatgatttatacaacgattgtgtccgcgaactctataaaaataatgaagcccatcaactgacattgagtaaaaaagattttgtacatctttttatggaggacattattttttatcagcgaccattaagaagccagaaatcatccatttccaactgtactctggagtttagaaaatataaagacgaaaatggaacagagcatatacaatacctgaaagctcttccaaaatccaatccatattatcaggaatttcgcatctggcaatggatgtataacctgaatatttacaaaaaagaggatgatacgaatgttacaaagcattttttgaacaccaaagccgattttgaaagtctgtttgaatttttaaacaatagaaaagaagttgaccaaaaagctttgctgaagcattttaagctcaatgataaaacgcatcgctggaagtatgtagaagataaaaagtatccttgcaacgaaaccaaaacgatgatttcagaaaggttaaaaaaagtagaaaatatttctgatgatttcctaacgagagaaattgagcagaaaatctggcatattatctattctgttaatgataaagttgagtatgaaaaggcactgaaatcttttgccggcaaaaataatctggaaaaaaattctttcttcgaggctttcaaaaagtttcctccttttaaaagtgaatacggtgctttttccgaaaaagctattaagaaattgttgcctttgatgcgattgggaaaacattgggattacagtaatattagtgaacaatcaaaatccagaattcaaaaaattattacaggagaatacgatgaaaatattaaagacagagtaagagaaaaggctgttcatctcaccaaagaaaccgattttcaggggttacagttgtggttagcacaatatattgtttatggaaggcattcagaagcagcaatgttgggcaaatggaactccgctgacgatctggaagagtttctaaaagaatttaaacaacattcacttcgcaacccaattgtagaacaggtaattacagaaacacttcgtgtgataaaagatatctgggtgaaatatggaaatggagctaaagatttctttaatgaaattcatattgaactgggtagagaaatgaaacttcctgctgaggatcggaagaaaatcaccagccagatttctgaaaacgagaatacaaatctccgcatcaaggcgttattagccgagatgatggctgatagttctgttgaaaacgttcgtcctttttcgcctatgcagcaagagattttgaaaatctatgaagatggtgttttaaattctgatatcgaaatcgaagatgatattctaaaaatcagtaaaactgcacaaccttctccatctgatttaaaacgatacaaactctggctggaacagaaatacaaatcgccctatacaggacagattataccattaaataagttatttacaccggaatatgagattgaacacattattccgcaaagccgttattttgatgatagctttagtaataaagtaatatgcgaatcggctgtgaataagttgaaagataatttcattgggcttgggtttataaagcaatttggaggaacaattgtagagtgtggaaacggaaaatcggtaacggttttaaaagaagatcaatatgaagattttgtaaagaaacattatgctaacaaccgaagtaaaagaaataaactgcttttggaagatattcctgaaaagatgattgagcggcagatgaatgatactcgctatatcagtaaatatatttctggtgttctttccaatatagtaagaacagaagacggaacagatgatggcgtaaactctaaaaatatagtgccggggagcggaaagataacaaataccttaaaacaagactggggactgaatgatatctggaacgatttgattttaccacgttttgaacgaatgaatcaactgaccaattctacagattttacagtctggaatgaaaaccatcagaaatttttaccaactgttccggtagaattttcaaaaggattttcaaagaaaaggatagatcacagacaccatgccttagatgctttggtgatcgcttgtgctacaaaagaccacgtcaatttattgaacaatcaatcggctaaatcagatacgaaacgatatgatttaaaaaagaaactgatgaagtttgaaaaagtagtctacaaaaatccgcataccggtgaaaaaatagagcgtgaagttccgaaacagtttctgaaaccttgggaaacttttacggttgatgctaagagtcgtttggaaacaataattgtgagttttaaacagaatttgcgtgttataaataaagcgaccaactactatgaaaaatatgtagaaaaagaaggtaaaaaagtaaaagaaagagtagagcagaccggaacaaactgggcgataagaaaaccgttacacgaagaaacggtttctggtaaaataaatttaccgtgggttgaaacaagtaaaggagaatttattactgccacaagaaaacctttagatataagctttaatcttgagaaaatcaaaaaaataacagatactgcaattcaaaagattcttgaaaactatcttgagacaaaagataacaatcctgagttagctttctcaccggaaggaattgaagacttaaataaaagcattgaaaagtataatggaggtaaattacatcaaccaattatcaaagttcgagtttacgaaaaaggaaaaggtagattttctttaggacaaacaggaaataaagttgataaatatgttcaaggttcgccaaatttattttttgcagtatataaggatgaaaatggaaagaatagctttgaaagtattcgtttggatattgtgattgaaaggatgaagcaaatgctaaatcctgttccagacctaaatagcaatggagaagaattgtttaaagttctttcaccgcttgatttagtttacatacccacagaagaagaattacataatatagaaactcttgattttaacaaaattgataaaataaaattagaaagattatataatgtaaatgatttttctggagtaacaatttattttagtcaaaattcatttgcaaagaatatttatccaaaagaaatggatatgagctggaatgaaaaaagacaaaaaacttcaggttcttttgattccaagacagcctcatttaataaaaaatctataaaggaattttttgtgaagcttaaaattgaccgtttaggaaatatttcaaaagtatagttttatgatcacccgttccatctacattggcaaccctgcttatcttaaactcaaagacgagcagttgtatattctatgtcctgaaactaaagaactaaaaggtaaagttccggtagaagatttagggttgctgatgctagatcattttcagattaccatatcgcatcaattgattcagaaaatgatggggaataatgtagtagtggtcagttgcgatggtcatcatttaccgcacggaatgatgttgcctttgtatggacatactgaacattcagatcgggtaaaagaccagctggaagccagtgaaccccttaaaaaacaactttggaaacaaaccgtggaatgtaaaattgaaaatcaaaaagaagtattgaggcgtttgggaaactattatgaaccaatgatagattatcaaaataatgtgaaaagcggtgatattaccaatatggaaggtattgcagctcaacattactggaaatatcttattggtaatggttttttacgggaaagatttggagattctcctaatcagttttttaattttggctattcggttttgcgcagtatggttgccagagctattgtggagactggtttattacctgtgatgggtatttttcataaaaataaatacaatccttattgtctggcagatgatttaatggagccgtataggccgtttgtggatgtattggtgatgcaatggctccaaaccaatccggaagcagaagaactgactaaagagtttaaagcatatcttttgcaaatcgctactaaagatgtaaagattgatggaaagaccagacctttgctggtggctgtaaaaacaacagcatcatcactatataaatgttatacaggagaaaaacgtttgattgcttatcctgaactgatatgaaagccgaaaggtttaatgcttaccggattatgtgggttctagtactttatgatttaccaaccgaaacaaaggaaaatatgcgggatgccaatctatttcgtaaacgtctgttagatgatggcttttcgctttttcagttttcaatgtatatccgccactgtcccagtagagaaaacgcagaggtccacatcaaaagggtaaaagtcatgttgcctaaagctggaaaagttgctattatgtgtattaccgacaaacagtttggtgatattgaaattttcttcgccagaaataaagaagaaccaccgccgacctttcaacagttggaattattctgatttttaaattctaaaaaataataaaatccgttgattttcaacggattaaattttgaggttgtgttatatcacaaagatatctaaaattgaaagcaattcacaacacgctgtttttaatgcctcgcttaatgtatgttgtgttatatcacaaagatatctaaaattgaaagcaattcacaacgggggaaacgtttacaaattaatcaatcgggttgtgttatatcacaaagatatctaaaattgaaagcaattcacaaccgtaattggcaattggtgccgtttttttcggttgtgttatatcacaaagatatctaaaattgaaagcaattcacaacaatgaaaaaacatgggagtctttgcgggctgttgtgttatatcacaaagatatctaaaattgaaagcaattcacaacaagttcttctttaacactgtaccagtatttgttgtgttatatcacaaagatatctaaaattgaaagcaattcacaacttattattccaaaatgttataatcaacggcgttgtgttatatcacaaagatatctaaaattgaaagcaattcacaacgtcattggatgtttctttatgtccggttctgttgtgttatatcacaaagatatctaaaattgaaagcaattcacaacgaaaagtaccatcgtttaacgagtttatcagttgtgttatatcacaaagatatctaaaattgaaagcaattcacaactttgagtgatgcagaaacagaaacggggctgttgtgttatatcacaaagatatctaaaattgaaagcaattcacaacaagtaaacaaaccagtacccacgatcatttgttgtgttatatcacaaagatatctaaaattgaaagcaattcacaaccatttttctattttccccgctttgacataggttgtgttatatcacaaagatatctaaaattgaaagcaattcacaacaatcttcgctgagattccatacttctgtatgttgtgttatatcacaaagatatctaaaattgaaagcaattcacaacttctacttcggcataacaatcaattacgttgttgtgttatatcacaaagatatctaaaattgaaagcaattcacaacgagcccgctactgtaagtcgtggtaaattagttgtgttatatcacaaagatatctaaaattgaaagcaattcacaacatatctgttgacatgaattgaatagccttagttgtgttatatcacaaagatatctaaaattgaaagcaattcacaacagaaactttccataattttcggcgtccaatgttgtgttatatcacaaagatatctaaaattgaaagcaattcacaactctgagactatataaggagagaaagtgtaagttgtgttatatcacaaagatatctaaaattgaaagcaattcacaactacagtccgtcttggtgtctctccacacaggttgtgttatatcacaaagatatctaaaattgaaagcaattcacaacttaaagctgtccctacaagtttagccgcgtgttgtgttatatcacaaagatatctaaaattgaaagcaattcacaactaatgcttcgtttactatttcaactatggagttgtgttatatcacaaagatatctaaaattgaaagcaattcacaacaggatagaaagacattatttttagacgttagttgtgttatatcacaaagatatctaaaattgaaagcaattcacaaccagtcttagaatcaaaccagtatctaccatgttgtgttatatcacaaagatatctaaaattgaaagcaattcacaactcaaacttattcttgcttgacttaataggtgttgtgttatatcacaaagatatctaaaattgaaagcaattcacaactttctccgtttacttgtttgtcgtaaatctgttgtgttatatcacaaagatatctaaaattgaaagcaattcacaacttgcctttccccttgtgcctttgccctagtgttgtgttatatcacaaagatatctaaaattgaaagcaattcacaactggacataattatgtagtagcactgaaatcgttgtgttatatcacaaagatatctaaaattgaaagcaattcacaacgccttttcttcgtataatcttttttcttctgttgtgttatatcacaaagatatctaaaattgaaagcaattcacaacataattgtgccggaaaagatgcgcaccaatgttgtgttatatcacaaagatatctaaaattgaaagcaattcacaactgtgaatctgttctattatcaacaggcatggttgtgttatatcacaaagatatctaaaattgaaagcaattcacaactaatatcattatgaagttgtaaacaaacatgttgtgttatatcacaaagatatctaaaattgaaagcaattcacaacgaaaagataagtgatacattttggaaagttgttgtgttatatcacaaagatatctaaaattgaaagcaattcacaacaaaaagccatagtaaacatcagttgttcctgttgtgttatatcacaaagatatctaaaattgaaagcaattcacaaccgggcgttacgtattcgcttaacacctcaagttgtgttatatcacaaagatatctaaaattgaaagcaattcacaactaagacttagaatatccttacaaaaaaaatgttgtgttatatcacaaagatatctaaaattgaaagcaattcacaacgtaaatagcgttattcccatgttatgaaacgttgtgttatatcacaaagatatctaaaattgaaagcaattcacaactaaatcctgcctgtcatgcaaacgtgcttcgttgtgttatatcacaaagatatctaaaattgaaagcaattcacaaccaattccaagcatacccaacataccgaaacgttgtgttatatcacaaagatatctaaaattgaaagcttacaataaattaaggtgtttttattgtaaattagatttacataatgagccttttgtggttaaccctgtttagtcgataaagatcattataaaaaaacaaaaacctttcagtactcctgaaaggtttttttgtatggtttaggtttttaattttaatcgtgcatttcgctttcgacatagccttcatcttcgatctggaaggtcgtatggctaattttgaaattactggtcgcctgatcggtgagtatccgaagcatttggttatgcggaatgctttgatcggagacaacatgggcgctcatcgcattgataccagaggttagcgaccatacatggaggtcgtgcaggcttttaacacccggaactttttccatggtactgcgcagttcatcaatatctacatctttaggagtaccttccaataatacatgaatagcttccatcagaagtcgccatgttcttgggaagatcagtaaaccaatacctgcagagatcagtggatcggcgtagtaccagcctgtggtcagcataaccactccggcaatcattactccgacagaggtcagcatatctgataatacttcaaagtaggcacccttcatattcagactgtcaccagagctttttctaaggatcatcatcccggcaatattcactaaaagtccgattccggctacgataagcatagctttgctctgtacctccggtgggttcaggaagcgctggtaagcttcataaagcacataaacggaaattcctaaaaggactacagcgttgattactgcggctaatatctcggtacggtaatagccgaatgttttggaagatgtcgcttttcgttcaccaatccggatggcaatataagccagtaagaggcctacaacatcggtaagcatgtgtgctgcatcggctaacagagccaaactattggtgataattccaccaatgacttcagcgataaggtaaaggccgctgaaggaaagtacaatcagtaagttctttttgtgcttactggaggctgaggctgtttgtatatttgtttcactcatgatgtttggtattacatttcgtagtataaaggatttctcttcttctgcggtacattttgctcaccagtcatttccctcaggttgatttctatagtctgtgccagggaagtcatcggggtgtctactggggtgttttcaaacggatcctgcatgataatagctgttttttcaatcgcgataaagagggtagggatcaggatggtgattccaatttctatgattaacaaacaaagctgagaatcgtcgaatccaaatggtagaatggcagcaaatacatagatgagactatgtaccaaaatgctgtaagaacgtggaaatacggtatttttgattctttcacattttcccatgctgtcgcataaacgtgctaatgtttcattcagttgtatgagtctgaactcactgatcagccctttgtccgccaattgctttagctgcaaagaatgttcatccagtaatgcattgggaatattagtggcttctattctgtgatcgataagataatcctgaacacgatccgagaaagggagctttctgagggattccccaagagcatagttccagataatctgacgctgtgcaaattcctgaataatagtctcacttcctaaaggaagtgcctgggtaatctgacggataaatgtgcgggaatcgttgacaatagcgccccatatcatacgggcttcccaccatctttcataggattgtgaaatccggaaggccagcaggagagatacagctgtacctaccaatgcaggaatggtaagaggaagtgaaattttctgaaaagcaggaagcaaatctaaaataccaatagcgactgcaaacatagagatcagtaataactgggatttgattaaattaatgaaataccagatggatattttcttttttagcagcatagtgtgttgtgttatggtttgcgatgtataaataaaaaggtgttttttgttataaaaatgtcagcccgggtgtttaatggaaatgacgataaatgacaattaaagcgtaataattaataatactaaacaatataaattaaacttctgaaaccatattcaattataaaaatgattcaaagtattacactggtttacccggactgacgtgtttacattagtgtgtgtttttgggttaatgtaaatttattttaatgttcgtgctcaccaacattggtaagcttagcattgacaaagaaggctccttttacgacaattttagcatcaggtgcaagctgccctacaggcgttattgctgtatagcccatgtcagatgttccttttataacctctactttttcgaagttgacggttcttgcatgtgattgctcagcaggagcagtttcttttttatcttttgattctgcttcctcatgtgcttccggctttttgtctgtttgtataaagacatagaatttaccatcagcttctacaattgcttcggttggaatagcaggtgtagtactgtgatccaggctcactactccggtaatattcatcccgtcgataagcccggtcttgttaccgattacagtacagtgtaccgcaattgttttgctttcgttctcaaaggaagatccaatgctgtataccttagcatcatattctgtttcaggattattagtgagtttgaaatgtacaatctgaccaatacgcattcttggcaggtctttttcaaatacctgtaaatccaggtggagcgaagtgttgtctataatttcggctacgggagcggatacatctacatagctgccaatctgtgctctgatattgctaattgtcccgctgattggagcggtaatagccaaacctgttctcatgcttgcattggtaacagaagccggattaatacccatcatttgtagttgtcgggctaaagaagccttttgggtagacaatgttctgagttcggaagaagaactctgaaggttctttttggttcccgcgtcgttgttatacaactcgttctgtcttttaaattcctgttcggcaaaagcaattctactgatagtagtaagatactgttcctgtacgcggatgtattccgggttggcaatggtggcaataacctgacctttgcgaacatagtcaccttccagaatattaagtgtttttacgactccgctgaaaagagctgctacagtagctttattgttattgggaacacgaagcagaccattggcttttacagtagccgttagttccttcatttctattggacctgtagtaacgccgactgactgtatctggtcttcggtaagactggcaatagtaggagctgcctcttcatggtctttagctttagccgtctgttcggttttactctcgggagcggcttcttttttgccacagctggtgaagattaaagaagcggttatcaggtagattatggtttgtttcagtttcattttattgattaattatagaattaataataaccacagattggtttacttgctgtatggattccagatatttcagctggatattggttgatgtctgcagagcgaaaaggtattctacataagaaatatctccggtgcggtaaccgagttgtgctgctttagcgattttttcggcattaggaatggcctgttgtacataataattgtactggtccacgtcctgtcggtattggcgcatagcagtatcaaactgtgtagtcagctgttgctgttgcaatttggcgttgttttccgcagcctgtctttggtattccagtgattgtattctggctttggttgcgccaaaagtaagcggaatgcttacaccaacgtttaccgaattaaaacggttccagccattgtagtatttttcaccaccattattggttgggtgcatacccgtaagggactggctggtgacgcctaatgtgaattccggtaagccctgagctttttctatttttttgtttttatcagcaatttccatttcctgataaaaagctcttaccgatggattattggcaattacactactgtccagtacatagtctatttttaaagggagatactcctctttaggagctacttctatagattctgaagtgttcagtaaggttttcagattcttgtaagcattgtccagatagacctggttctgtttaagcaataagttaatttctcctttttgggtttctgcagtactgatttcaatcttcttgatatcgccggcattataccttacagtagcaatacggatgaaatcctgatagagattgtccaggctctccagtttagttttgttaaactgaaggtattcaatctggtaataataggatctcacctgtctcaataattcatttatagagacttctttctcaatctctctgcttttgatgttggattctatcagctcctttcttgccttgaagattgtagggaagggtacagtctgagagatcgcaaatgaattatcgaatttcggactattgtattgtcccagctgtgcagatacacttagttgtggaagttctttggctgtaggtcttagtgctttggaagtcataatattcagatctttggacttcatcaacaggttgttttcaacagccatttgggtggcctgctgaatatcgatggttctggtctgggctttcaggccttgccctgccaatcctgataacatgatgaatagtacaactacagtagtcttagttttcatctttagaatacggccttttactttttcactgaaaataatatataacatagggagtacaaatagggtaaggaaggttgctgtaatcagtccgccgataactacagtggccagtggtttttgtacttcagcacctgctcctgtagatatagccattggtaaaaaaccgatagaagccacggtagcggtcatcagaaccggacgcaatctggttttggttccttcaataactcttttcagaacatcggtttcgccttcttttttcagctgattaaaggtgcctataagaacaataccattaagaaccgcaacaccaaacaaggcaataaatccgattccggcactgatgctgaaaggcattccccgaaccagaagggcaaatacaccaccaatagcactcatcgggatcgctgtaaatattaaagcagcctgtttgaaagagtggaaggtgaagtataacagcataaaaattaaaagtaatgagatgggtacagctatcatcagtctgtcgctggcttctttaaggttctcgaactgacctccgtaggtaaagtaataaccggaaggcagttttatttctttatccagtttttgctgaatatcttttaccacgctggcaacgtctcgaccgctgacattgaatccgattacaattcttcgttttccgtcttcacggcttatctgagctgcacctaatttgtaatcgatgttggccacctgtgaaagcggaatttgtaaaccggattttgtagagatcatcaggttgttgacatcgtctatattagtacggcgaaggctgtccaaacgtacaacaagatcgaatcgtctctcgttttcgtagacctgtccggcagctttaccggcaaaggcggtactcaggacatcgttgacgtcctgaatgcttagtccgtagttggccatacgtgtacggtcgtattgtacattgatctgtggcaggccgcttactctttcgatctgaggagcggtagctccgggaactgtctgaataactttgcctactttatcggcatatacagcaagggaatccaggttttcaccaaatatcttgaccgctacatcctggcggatacctgtcatgagttcgttgaagcgcat

SEQ ID NO: 1232 - DNA, 24305 bp, synthetic construct
  source 1..24305: mol_type = other DNA
  misc_feature 1..24305: note = Synthetic
aaaagattatttaaataataaattacttttaacaaaagtagattatatttataataattacaatttgttatggaagacagagactctgacacctgattcagatttaattagtgaatccgccgggcaatccagttcaatgagtagatttcttcaggctaatattttatccgacaatacaggaaccagtatgtttaagaatggggtccaaattcttaaccgttcaattaaatttgataatctaactcatttcaatcccacttcagtaactacatataatttaaatgatccaaatataaacacccctgtagacggaacttttgataaatataactcaaagggcaaaatcttgcagtatactaccaaagaagggtcaccagttacagttatctggggatataagcaaacccatccaattgcaaaaatagaaggaggaacttattcacaggttatgcaggcttttggattagatactaatgataacaattcatacctgcaattaaatatcgttaaaaaatcagatctggatacagatgaatctactgaatctagtctaattgctgaattagataattttagaaagagggtggagtttaaagatttcaaaattaccgtgtatacttatgaccctttaattggagttaaaacaatcacttccccatctggcttcagagaattctataagtatgatgcatccaacaggcttataagggtattagataaagaaggtaatatcctcaaagataataaatacaattttacaccaaccaagcattatagttcaataaagagtgggacttttacacgtaataattgtggtcccaatgctataggtggtaactatacctatattgtaccagagggtcagtatacctcgattatcaatcaggatgatgcaaatcaacaggctcaaaatgatgttaatagcaacgggcaagcagctgcaaatctgtatggtacctgtactacgatgaattgctctgtaactaagggaagcgggatcaaccaatttcattatggatcaatttttctaaataatacaaatgagttcagagtgcagatgggattcagatattttagtaatcttccttggagcacaggagttgtagtaggaaagattagtggaaactgtataccttcagggcagcgttccagtagtacttttgctaatggagtttggttgttaacaattgatcctaacggaaatatcacggctaagatcagttctgcatctccctctctggttaacgacatgaatatggtttttgactttaccttctctataaattaattaatgatgaaaaaattattaagtacgctcattttactctctgttattgtacaaagttatgggcaaacagcaacagaaaattatatacaatcaagaagttatcttgaacctgtaaccgctacaagtacaaccgctaaacaaattaatacggttcagtattttgatggtttgggaagaccgaaacaagtggttaatgtaaaagcatcccctttaggaagagatgtagttaatcatttagaatatgatgagttcggaaggcaggtgaaattttaccttccggtaccacagtcgctgacgcaagacggagagctttattctaatcctttgagtaacgcaacacaatccgatatatatggatcggaaaagatttattccgagaaaaggttagaaagttctccactagacaaaatgcttcagcagatcaatgttggaaatgattggtcttcaaaacctgtaaaattcgattatgatacaaatacagatggagaagtcagaaagtactttaccacaactacatgggtagaaaacagaaccagctctattttgaaagtagctgtgacaaattcatcaaacggattttttatagctcaacaattatataaaaatatcaccacagatgaagatggaaatattagaatagaatttaaaaatctggaagggcagacgttacttagtagaaatgtcttaagccaaacagaaaatgcagatacttattatgtttataatgagcagaaccaaatcgcatttgtaattcctcccaaggcttcagatatgatcaaaagtttgagtcccggaactgtagttccagatgctgttttaaatgaactatgctatcagtatcgttatgataaaagactcagactcgttgagcgaaaactgccaaataaaggtttagaatcctttgtttatgacaggcaggatagattagttgctacacaagatgctaatttaagggaaaaggggcaatggcagtattcgaagtatgatcagtttggaagaatagctattgtgggaattaatactggtggatcaagaattgcagagcaagaaattgcagacggtctagcgtttaataacgtcaatagattgagcaccgctctttttgaaagacagggtatgccagtatactacggaaatccagataatacatatcccaattcttctaaatgggttacattactttctttaaattattatgattcttacccaccatacagctttaacccgactttcccaacatctgttttaggccagttatcgtctacggatagccctacagcagatgtcagcacaaataatcttccagttatgagttttataaagaatcttgaagatgacaactggacaaagaactataactactatgataaaaaaggccgtggaattggtacttattccattaatcatctgggaggttataccaaaacagaatcgaaactggattttaccggggtagcacaaactatggttacaaaacataaaaggctggatgcggacaccgaaagagtgattactgaaaactttacatatgaccatcagaacaggcttcttgtccacaaacataaagtagacagcaatcctgaagaaatcctggtacagaatacctataatgagctttctcagatttctaataagaaactgggaggtattacagcttctgccacacttcaaagcattgattacaaatacaatatcaggggttggatgtcccagatcaatgatccggctaaccttaacggaaaattatttggatatacactaagatatactgatcctgtttattcgacaattgctcccggcagatacaatggaagtattgctgaaatagactggaatgtgtctactctcaataatctcaaaagatataattatacttatgataaacttaacagattaactgatgctgaatatgcagagccagagactaccaacccgcataataaaaattatgacgagcgtttaacctatgatgtaaacggaaatattgcttccttaaaaagaaatgcagttcctgtttccggcacaactgccacaacagtggataacctaacctatcagtatacaggaaacagattggataaagtaaccgaaagtgcgcttaatgacaccggatatgagggcggaaataacaccattgattatgacctgaatggtaatatgatcaatatgaaagacaaaggaatccagagtattgtgtacaattatcttaacctgccggatagcttttccattatccttcccgacccattcatgttgggacagccttcaagtgccacgttaacttatctttaccgtgccgatggaacaaagcttcgtaagaattattacaagcaaggccgtagaggcgcctcaggctccacccatattacagattatctggatggttttcaatacagctatttagaaggcggaggaatatgcctgacctgtaaaacggataatgcttttgaagagcaggcgtacaccaacgtagcaaaaacttttcctgatattgacttaacaccacaatggaagctggattttgttccaacagcagaaggattttacagtttcacggaaaaccgttatatttaccaatacagagatcaccttggaaatgccagggtaagctttgcaaaaaacagcgaaggacttctggaagtaacggataagaatgactattacccttttggattgaaccatattcaggggattttcgaaggagctaatcttggaagttattatagttacaagtataatggaaaagaactacaagaaactgggatgtatgattatggggcgagattttatatgccggatttgggtagatggggagttgttgacaataaagcagaaaaatatttttcattatctccctaccattatgcgggtaataatccaataatgtattttgatattgatggtaatgaattcacagaagatgcttggatatgggttaatagattaattgctgatattaattctaggcaagccaaaaataatgttaaaataacagattttgaatctaaaatagctgctggaggaaaagctggacaaattaagagatggaaaagcaatatagctgatttaaaagcaaataatgctgatttagagtcagttagaggtgaaacggcaactatggcagcttcaaatcaaatttatgatgtaattgaaaatgatgacttgagtgattctagttttaaaactggagcctttggatttaattataataatggaaaagcttatatggtactcccaaaaaattctggtcttgcaatgtttgcccatgaattaaaacatggttatcaatttgaaacaggagaaagcggaagtgtaacaagagatcaagacgaaaaaggtgttgcttttttacatgataagacagatgaagttgttggttatcagagaggtaagttgtttgggcaaaatgattcatatagtacaggaagtctaccagatgcatataaaaatcttcctactggtccaataaatacaactaatcacccagaaatatcccgagctatgaaactaccacctgctcaacgaaaagtagctttacaaaatatagcgaatcaaggaaaagcatttcgtgttgaggggcaaacctattataaaaaatgagaaaactaatttttatattattgtgcattttcctagttaattgtagttcacagttaaaattaggaaaatatgagaatatatgttattctacggatgcaccaagtaatatcttatcactaaaaaaaaataatgtatttgtattaacctatccgagttctatcgagaggttgtcaggaatttggatgattaaaaaggacactttatttttgagttcccaatatcagagttcattgaaaggaagtgatagtattgcttatgtagaggaaaaaaaatttattttaaaaagaaaaaaattaattaatcctctaaatgaaaaatgttatttagttttaaaaaataaaacaaactcttcacaaaaatagactgcaccaaaagtttagacaaattaaacaatattttgacagaaaagagttcggtattccaccgggctctttccttttacttctttttaaactcttcgatctttgttaatttttttttataagatttagtgttctaaaaaaattcgattatgagattatctaggttgttcacttttcgttatatactctgaatgattcctttttctttagtataaagagcatttcgaaaaaataaatacttacaaaataaatcgatttagaatcttggatagcacaaactgagtcgaggattgaaccgcaatctaaaaaggaactagaaaacattaacacagttcaaattatgttaaccggatccaaatacttttgaaaacttttaatgcgacacagtttgtcgcatcagctatttaatttagtattctaaaaattaaatatgatgaatataccattttattattccttcagagaatttacagatcattataaagctgacctaaaatattggttaagagggaacaaggagaggaatgaaataaaatatcttaaaatcctttattccagggcaggctttttagtaggctacagagaatttaaattcaaagaccccaaatatgctgtaatagatatgtcatttggtgttgaaggcattacaacagaatatgatattcagaattatgtatctatctgtataggtgttcttgaaagcaattttaggaaaaagttcaatttatgtaatgataatcggctggtagagtttatttacgattttgaagatgattttattaattttgttcggcatgaaaggttttattttaataataccatttatcagctgcttccattctttaagataggtaaggagatagtagaagcaagagttgtgtatgacgataataatgaacctgtcaaagatggtgaaggaaatacgatgtttgaagaaggaagatttaaaatgggtgttatactctttgattacgatcaatactttgcttttttaaatgaaatgaaactcatcaatacatttattttagaaaagatcactcctgaaattaaggaagaagcagagatgaaaagtaacctgacaattcctgaaaaaatagctcttctggagcacttgggcatgtttgccaaacttgttaaggatggagtaagctccgaaaatgaatataaaattatttataatctgattggaggaagctataccaatgtaaaaaaatactgtcttaacagaaggagcaataataaatcttccaaagattatcagataaccgaaaaacatagaatgaagatcaaaaatttctataactcaaagagctactgaagctatattctgaaattatattaatccatctactaccgcaacactacctcagatctacccctatcaagtaaaatacagtaagcataattttaatctttgtattgtgaaacagcgataaaaaatcacaatacaatggaacaaattaattttatcggagtagaacccgaaaacttcatcaatgaaatcgtaagtaaagtaaaagaatccttacttactgatttggagaaaaccttcaaagaaaatgaacccaaacgctatctctctgctgatgaagtatgtgagcgttttggtgtgtctaaacctactattcatgagtggcgtaagcgtggaattctgaaaccccataaactcggctccagagtttactatagactggatgagatagaaaatgcaatgattgttaatgattaaattttctctcatgccatacttaacaaagaatcgctatcaaactattatctatagtcttgatgaggttaaaaagaccttcaggcaatatagaagaaaagatctgaactcaaccagaaaagatcatttcctgccagaattgctgcgcattgaaaagaataatggttacaatacctttagtggcttcaataaccttttgaggctgcgggatgcctccagctggtctgtctgtacacgcctgggattaagacctaccggagtaggtaatttctattgtacagatgtaattatagaagagagaaaacttttatgtattgtctattattctaaagataatcagtttattgaactcagtatttttcctgaattttatccgtgtgagaaatccgtttttaaggaaaagataatacggattgttcaaagtgtagcccataaaaaagggatataagaagatattatatgccttttcgttattcaaacctgacaaaggtttaaccttttgtctttacaaggaaatgaaattatgccgatcgactttgtaaaactccaatatacagataagaattatgatctgcccacagacaaaactgattttattattactgtcaataatgaaaccggagaaaccgacaataaaaaggagggtgaatattttggaatgcagatcattaaatatccttccggacggataatcgtaaagggtagcattcataaattttttaaccggacagattttaacggaaatgattttgatttgcaaaacttttcctcagcattacaaaatcttgaaacagaactcagattaaagcctgggtattgcagactggaaaatattgaaataggtgtaaacattgagttaccttttgatccgaataaaatccttcaaaaccttttgtttcaccgatccgtagaatttaataaaaccatttcggggtctttttattaccagtcagccaaaacagaatatatcattaaaatttacaataaaactgctcagtatgaaaagaaattaaagaagattgccccaaaaccaaatataaaaaataagcaggaacagaaagaaatcaactttttgaaaacaacgatagaaaaacaattaaagcctaatattttacggtttgagattaagtttttaaaaatgaatatactaaatgatttagggattatgcatttaccggatgttttaaagcctgaaataattaaacccctcaaaaagcttttattaaaagaatttcatgaagtttatttctatgattatacaatggatgaagcaaagatgaagcccctggagaggaacaagctcaaagattatagaaaccctaattactggataaatctcagcaagaaagacaaatactaccacaagaatagatttgcgggaatgacattgaaatattctcaaaatttaaaaggcaaggtttcggaattaataaaacaaaaaatggaagaattaacaggaaaaagtttagacttttttaccgataatttcaacgaaaacaaaaaacaaaagtttggacttttttaccgttcagatatagggtcgaaaagtccaaatataatagtctgaattgaaggaaatgaaaaagacaatttcagtaacgaaaagaggaacaaaataaaggtgctgggaattatgattcatctaaaaatatgcatgaaaatagtaaagaccacaaatagaaatatatgattgaaaaaaatgaaactgagttttcagatttagaagttgattttttgtttttggtagacgcggaaaggaatataccaaatatagatctacaggaattaaatatggaactgccggaattgagtaataattttcctggtgtagaattctcaaacatggatatagacttaatggctttacgagttgtattaaactttgatattgaaattgtattttgactttattgccgattaatagggtgttttagaaatagaattaggaaaaatagctgttttaagtagttgttatttttggatatgttccaaaatgtctcagaagtattatgaatagggagtttgaaatgaaagccaagtaatagatttaaaaagttccttaataatttaggttattaattttagttgggaaagagatggaaattttattgagcttcagcaaaatttaataatgtgaatataaaagcagtgataaaaagaataacaaaaaatataaattatgggaagatggagcagcaatcccgatgaggttgaaagtttgaaacgcataactattaatgatttgaaaaagctgggttacttaaaacccaatgtgcatcttaatcaaaatgttttctggacagatcggaatggagaaaagaccagttctattaccgttataattgaaaccacagacacagaaggtatagttacatttgattatacctggcaacagtctcatattaactataaagtacgacttataacaagaccttccaatcttggaaacggactgttatggttctttgtatgtccaaatacccagaaggtatgtagaaagctacatttaaacagtgggtactttctgcacaggacagcatttaatgatgtctattatgaaaagcagctggaatctaaaaaatggagggagtgggggaaagtttttggtcctttagatgatggaatttatgagaaaatatataaaaagaattttaagaaatattacaaaggtaagcctacgaaaaaatataaacaactgatgaaaaggctgaactccagacaacttatagattttgaagatattgaaaagtttttgttggcgtaaaaaatagtatagatactttagaagttttagaattcctgaaaaactcttatcttaaggaagtaatagaagatgaagttatatgaaaaatgccccgaagatagtcgaggcgctaaatgttttcacaacggtataatccttattgtgaattgcttttcaaaattattaatacaaatataaattaaaaattattagttgatttacggaaacccataatttggataacttttttctttctatttttataagactatgaaaactaaatgaataatcatatgaagactatacttggattggatttaggaacaaactcaattggatgggcattaattcaacaggattttgaaaataagcaaggggaaattcttggaatgggaagcagaattattcccatgtctcaggatattttaggtgaatttggaaaaggaaattctgtgtcccaaacggcagagcgtacaggttatagaggggtaagaaggcttcgcgaaagatttctattacgtagagaaagacttcatcggattttaaatgtcttaggatttttgccggaacattatgctgctcaaatagattttgaaaagagatttgggaaatttaaagccgaaacagagccaaaattggtttatgataggagtagatttatttttgaaaattcttttgaagagatgctgtcagatttcaaaaagtatcagcctctgcttttagaaaatagtaagaaaatcccttatgactggacaatttattatcttcgaaaaaagtcacttattcaaaaaatagagaaagaagaactggcttggattcttttgaactttaatcaaaagcgaggatattaccaattacgtggtgaggaagaggaagaaaatcctaataagttggtagaattttattctttaacaattgtgaatgttttagctgatgaacctcaaagaggaaaatcagacatctggtattcattgattttagagaacggatggatctatagacgttcgagtaaaatccctttatttaattggaaagataagacaagagattttattgtaactactgatctaaatgatgatggaagtgtcaaaacagataaggaaggaaatgagaaaaggagttttcgagcaccaagtgaaaatgactggacgcttgttaaaaagagaacagaacaggaaatcgataaatctcataaaactgtcggaacctatatttatgatactttgattcaaaaccccaagcaaaaaatcaatggaaaactagttcgtacgattgaaagaaaattctataaagctgaactaaaacaaatcttggaaaaacagaaagaatttcattcggaatttcagaatactgatttatatgatgactgtataagagaattataccgtaataatgaggctcatcagcttacattaagcaaaaaagattttgttcatttgtttttggatgacattattttctaccaaagacctttgagaagccagaaatcatctgtttccaactgtactttagagttcagaaaatataaagatgaaaatgaagtggaacagatacaatatttgaaaacgatcccaaaatcaaatccttattatcaggaattccgtatctggcagtggatatttaatttgaacatttacaaaaaagatgatgatacgaatgttacacaagagtttctgagtaataccaaagactatgaagttctgtttagttttttaaataacaggaaggaagttgatcagaaagcattgctgaaacattttaagttaaatgaaaaaacacatcgatggaattatgtagaagacaaaaaatatccctgcaatgaaactagaacaatgatttcaacgaggttggaaaaggtcgaaaattgtccggtcgattttatgacaagagaaatagaacagagtatttggcacatgatctattctgtcaatgataaaacagaatatgaaaaagcattaaaatcatttgctcgtaagaagaacttggatggaacatcattttttgaatcttttaaaaagtttcctccttttaaaagtgaatatggttctttttcagaaaaagccatcaagaaactcttgcccttgatgcgtttaggaaaatattggaattgggaaagtattgctggagaatctcagaaaagaattgagaaaataattacaggtgaatttgatgaaaatattaaagataaggtcagagaaaaggcattacatcttacacaagaaaatcattttcagggtttgccactatggctggcccaatatgtagtttacggtcatcattcagaagcttctgttttaggaaaatggaattctgcagatgatttggaagaatttttaaaaggattcaaacaacattcacttcgtaatccaattgtagagcaggtaattatagagacccttcgtgttgtaaaagatatttgggttaaatatgggaatggaacaaaagacttcttcagtgagattcatattgaattaggcagggaaatgaaaaataccgcggaagaacgtaaaagattgactaacatagttacggaaaatgaaagtaccaatcttcgtatcaaagctttgttagccgaaatgatgaatgatagtgatgtggaaaatgttcgtcctttttcaccaatgcaacaggaaatccttaaaatttatgaggaaggagttttaaattctgaaattgaaattgaagatgagtatttaaagataagtaaaacagcacagccatcttcgtcagatttaaaaaggtataagctttggctcgagcaaaaatatcgttcgccctacactggagaaattattccattgaataaattatttacaacggaatatgaaattgagcatattatcccccaaagtcgttatttcgatgatagctttaacaataaaattatctgcgaatctgcagttaataaattaaaagataactatatcggactaggttttataaaacaatttcatggagttactgtagaatgtggctttggaaaaactgtgagggtatttgaagtggaagcttatgaagattttgtaaagaagcattatgctaaaaaccggagtaaaagaaccaagcttcttttagaggaaattcctgaaaaaatgattgagcgtcaattaaatgatacacgacatatcagtaaatatatttcaggcgtactttccaatattgttcgggtagaagatggaactgatgagagtgtaaattctaaaaatattattccaggaaatggaaagattacaacacaactgaaacaagattggggtttgaatgatatatggaacgaattaatacttcctcgttttgaaaggatgaatcaattgactaattccaataattttacagcgtggaatgaaagccaccagaaattcttacctactgttcctattgagctttcaaaaggtttctctaagaaaagaatagaccatcgtcatcatgccatggatgctttgataattgcatgtgcaaccaaagatcatattaatctccttaataaccaatcagctaaatctgatataaaaagatatgatttaaaaagaaagctgatgaagtttgaaaaagtaatttataatcatcctcaaactggcaaaaaaacggagaaagaagttcctaagcagttttggaaaccttgggataattttactgttgatgctaaaaataaattagaggccataattatcagttttaaacagaacttaagagtgattaataaagctactaattattacgaaaaatgggttgaaagagagggaagaaaaacaaaagaattaataaaacaggaaggaataaattgggcagtacgaaagcccatgcataaagaaactgtttcgggaaaggtatatttaccttgggttaaagttcccaaaggaaaaatattaacagcaacaagaaggagtttggatacttcatttgatgtgaaaacaatcaattcaattacagataccggaattcaaaagattctaaagaattatttagaatttaaagggagctctgaagtagcattctcgccggaaggaattgaagatctgaataagaacattgaaaaatttaatgatggcaaaccacatcagcccattaataaagttagggtttttgaattgggaagcaaatttcctgtaggccaaacaggaaataaaaaggctaaatacgtagaagcagccaaagggacaaatcttttttttgctgtatatacagatgatagaggaaaaagaagctatgaaaccatacctctgaatgaagtcattgaaaggcaaaagcaagggttggctcctgtttcatttaagaataaagaagattttttactttctccaaatgatttggtctatattccttcggaagatgagtttgaaaatatgcataatatcgattttaagaatttagtaaaagagaagcaaaagaacatttataaagtagtcagtttttcaggaagtcaaatattttttattagacaagatgttgccacatctattgctaacaagttagaattctcaactttaaataaaatggaacgtgcaatcgacggatcaatgattaaagagaattgtattaagctgagaatagatcgtcttggtaatatctcaaaacataataaatgattacccgtacaatctatataggaaatccggcatatctgaaactcaaagatgagcagatgaaaattctttgtcctgaaacgaaatcggagaaaggaagtgttcctgtagaagatttaggattattgatgttagatcattttcaaattacaatttcacataatctaattcagaaaatgatgggaaataatgttgtaataataagttgtgacgttcatcatttaccacacggaattatgttgccgctttatggacatacggaacattcagatcgggtaaaagatcaattggaagcaagtgagccacttaaaaaacagctttggaaacaaactattgaatgtaaaattgaaaatcagaaaaatgttttgctaaagttggggaattattacgaaccaatgattgattatcaaaataacgttaaaagtggtgatattaccaacatggaagggattgcagcacagcattactggaaatatcttattagtctggattttttaaggcagcgtttcggagattcaccaaatcagttttttaatttcggttatgcggtactcagaagtattgtagctagagccatcgttgaaacgggtttgctgcctgttcttgggatttttcataaaaataaatacaatccatattgtttggcagacgatctcatggaaccttatcgtccgtttgtagatttactggtagttcaatggttgaaaatgaatcctgaaacagaggaattgacaaaagagtttaaagctcatattcttcagatagccacaaaagatgtccatatcgatggtaaaaccaggcttttgttagttgctgttaagacaactgcatcatccctttacaaatgctacacaggagaaaaacgtctgatctcttatcctgaactgatatgaatgccgaaaggtttaatgcataccgaattatgtgggttttagtactatatgatctgccaactcagaccaaagctaatatgagggatgttaaccgtttccggaaagcgcttattgatgatggatttacattgtttcaattctcaatgtacgtgcgccattgtccaagtcgagaaaatgccgaggtccacattaaaagagtaaaatttgcacttcctaaagccggaaaagtagccattatgtgtattacagataaacaatttggtgacattgaaatcttttttgccagaaataaagaagagccaccagcaaccttccaacagcttgaattattttaattttcaaatcctaaataagaaataaacccactgaataacagtgggttgtgttttgaggctgtgactgatcactaagataataatttttgaaagcaattcacaaccaaagaagcgtatcaaagaattatggcgatgctgtgactgatcactaagataataatttttgaaagcaattcacaactgaattccagcacacccgaaaacaatcaatgctgtgactgatcactaagataataatttttgaaagcaattcacaacattcttcattttgcagctttttaacctcaagctgtgactgatcactaagataataatttttgaaagcaattcacaactaatattttgaccgttaatttttatgaaaagctgtgactgatcactaagataataatttttgaaagcaattcacaacacaattttacgtcacgaaatttaagcttcagctgtgactgatcactaagataataatttttgaaagcaattcacaacgtgaaagtatacctataaacagaagttcaagctgtgactgatcactaagataataatttttgaaagcaattcacaacatagaatgaatgctggtgcaaggtttgtgagctgtgactgatcactaagataataatttttgaaagcaattcacaactggaacgcatccgggaaccgaaaaagaagcgctgtgactgatcactaagataataatttttgaaagcaattcacaacagatttatatatttttcatatctgaaataagctgtgactgatcactaagataataatttttgaaagcaattcacaactccctttcggcatataaaccttcagccactgctgtgactgatcactaagataataatttttgaaagcaattcacaacacaaaattcatatacctattgatattcattgctgtgactgatcactaagataataatttttgaaagcaattcacaacaggcatcgctcatatttgtagaccacatcggctgtgactgatcactaagataataatttttgaaagcaattcacaacgctgtttccgggtatttatcagaaaattctgctgtgactgatcactaagataataatttttgaaagcaattcacaaccattttgataagcaagacaatacaagctatgctgtgactgatcactaagataataatttttgaaagcaattcacaacggtagtgtacttccaatgcgggttatttcggctgtgactgatcactaagataataatttttgaaagcaattcacaacacgcactcataccaatccgcaacgccatcagctgtgactgatcactaagataataatttttgaaagcaattcacaacgcaggaggattacgtagaagcgtacagggtgctgtgactgatcactaagataataatttttgaaagcaattcacaactggaacaagctcagacactcgctaatgtaagctgtgactgatcactaagataataatttttgaaagcaattcacaacacaccctttttaaatggttttgtgctgaaagctgtgactgatcactaagataataatttttgaaagcaattcacaacagcatggagagcgatatatctggacaggcagctgtgactgatcactaagataataatttttgaaagcaattcacaacaatttgcgacactgtagacgtgccaatattgctgtgactgatcactaagataataatttttgaaagcaattcacaacaatctttcccatgataaaataaaaaaccatgctgtgactgatcactaagataataatttttgaaagcaattcacaacaatatgatggtttggcataatgtcaacattgctgtgactgatcactaagataataatttttgaaagcaattcacaacccggggcgggcttatctactggcatttcaagctgtgactgatcactaagataataatttttgaaagcaattcacaactatctcgaagagcatctgacagtaatccaagctgtgactgatcactaagataataatttttgaaagcaattcacaactttcacgatatgttaatgggttatgggatggctgtgactgatcactaagataataatttttgaaagcaattcacaaccaatggacatcgctgaaaaacttaaaaaaagctgtgactgatcactaagataataatttttgaaagcaattcacaaccgtgtacggctgcaatccgaagaaattattgctgtgactgatcactaagataataatttttgaaagcaattcacaaccattttccgttccttctgatctgaatttctgctgtgactgatcactaagataataatttttgaaagcaattcacaacggcggttcgcttatcctgtgcgtcttccatgctgtgactgatcactaagataataatttttgaaagcaattcacaacgtcgaattgaagctgtgcttcttccttcgcgctgtgactgatcactaagataataatttttgaaagcaattcacaaccgatgtttatgggaaagcgagccgaagacggctgtgactgatcactaagataataatttttgaaagcaattcacaacgatactgattagtttgagcataatcgcatggctgtgactgatcactaagataataatttttgaaagcaattcacaactaattacgccgattgataactggacgaatggctgtgactgatcactaagataataatttttgaaagcaattcacaacatgcttaatgtaccattcaatcgtttccaagctgtgactgatcactaagataataatttttgaaagcaattcacaacacatcgaaagggcaaacaagcaaaaagaacgctgtgactgatcactaagataataatttttgaaagcaattcacaacataaattggcgttccacggtattcctattagctgtgactgatcactaagataataatttttgaaagcaattcacaactaatagaagttttggcagcttttttccttagctgtgactgatcactaagataataatttttgaaagcaattcacaactagagatacagatgaattagtagatctggagctgtgactgatcactaagataataatttttgaaagcaattcacaacaacatctactaaaacaactactgtaccattgctgtgactgatcactaagataataatttttgaaagcaattcacaacagtatcagaggagtacagcgatagattccagctgtgactgatcactaagataataatttttgaaagcaattcacaaccatcgtagcctgctaataagcagctcgaatgctgtgactgatcactaagataataatttttgaaagcaattcacaactagaaaacatactacctgaatgggaagtaagctgtgactgatcactaagataataatttttgaaagcaattcacaacaaggtgcaggagaggacgccgggggatcaggctgtgactgatcactaagataataatttttgaaagcaattcacaacagcaggagaaccggaatctaaatacattaagctgtgactgatcactaagataataatttttgaaagcaattcacaactaacgctgctatactccatgctacccataagctgtgactgatcactaagataataatttttgaaagcaattcacaacccaaagtagatacatacggcggaaagttaggctgtgactgatcactaagataataatttttgaaagcaattcacaacgtttggagatcctacccctcctggggatgtgctgtgactgatcactaagataataatttttgaaagcaattcacaacgtttcctgaaagcaatatttattctcaaaagctgtgactgatcactaagataataatttttgaaagcaattcacaactaaaggctttaccgtactgcagatgtatgggctgtgactgatcactaagataataatttttgaaagcaattcacaacacaaaagaacaagcattagaaaaattttaagctgtgactgatcactaagataataatttttgaaagcaattcacaacgacatgtgagaataccacaacttacattaagctgtgactgatcactaagataataatttttgaaagcaattcacaacaatgaaaccctataaatgggctttcattgtgctgtgactgatcactaagataataatttttgaaagcaattcacaactattggtggtaagacctggctcagtcgtcagctgtgactgatcactaagataataatttttgaaagcaattcacaacagtttccagtaatagggataattccagttcgctgtgactgatcactaagataataatttttgaaagcaattcacaacggaatgaaggtttccatgtttccctttgtggctgtgactgatcactaagataataatttttgaaagcaattcacaaccagatccgtccgcaagacgtgttttagaaagctgtgactgatcactaagataataatttttgaaagcaattcacaacgtaagtcctccacagatatatcccatgtaggctgtgactgatcactaagataataatttttgaaagcaattcacaacactcagaaatagagcttggcaacatgattagctgtgactgatcactaagataataatttttgaaagcaattcacaactctttgtcccccatagaattatatggcaaggctgtgactgatcactaagataataatttttgaaagcaattcacaacgttatggcaagattcaaacgccgaggccgtgctgtgactgatcactaagataataatttttgaaagcaattcacaaccccaatcttgccatataattctatgggggagctgtgactgatcactaagataataatttttgaaagcaattcacaacatgaagcgatgaaggaatatgaaactaaaagctgtgactgatcactaagataataatttttgaaagcaattcacaacccggaagattgcggtccgggtttccgctttgctgtgactgatcactaagataataatttttgaaagcaattcacaactctctggacggccagatgacaattaatcttgctgtgactgatcactaagataataatttttgaaagcaattcacaacactaatttgtctttgtactcaggaaaaacagctgtgactgatcactaagataataatttttgaaagcaattcacaacccatgttggcaattgagactaaaacaaagtgctgtgactgatcactaagataataatttttgaaagcaattcacaacacaatacagtaaacagtatagatgtaaatagctgtgactgatcactaagataataatttttgaaagcaattcacaacagaacgattaaaattccgaggagactattcgctgtgactgatcactaagataataatttttgaaagcaattcacaacctaagtcgccgatattaaatttcattttatgctgtgactgatcactaagataataatttttgaaagcaattcacaacagtcgtcatcttcatctaattttccggtttgctgtgactgatcactaagataataatttttgaaagcaattcacaacaaaactaattgacatatgtctattaataaagctgtgactgatcactaagataataatttttgaaagcaattcacaactaggagatttcacaactacacagttggttagctgtgactgatcactaagataataatttttgaaagcaattcacaactaattataacgtcacaaaacaaggtaaaaagctgtgactgatcactaagataataatttttgaaagcaattcacaaccacctcttttattcatctttccagctgatagctgtgactgatcactaagataataatttttgaaagcaattcacaacgccctatatagactgggattttaacgacacgctgtgactgatcactaagataataatttttgaaagcaattcacaacttaaatactcaacgaaatagctgtactgctgctgtgactgattactaagataataatttttgaaagcaattcacaacgccatgcactcgttacaggtggacagagcagttgtgattgatcactaagataataatctttgaaagcaattcaaaataatgcgtcaagttctgtcatctaatgttttgttgtgaccaagataagcaaattcttaaaaagactgtaatgtaaattttgaatttattaaaatcatctcaaaaataaacttattgactatgtgttgactagaaaaataaaaaagccttgaaaatcaaatgattaacaagacttttgtagacccatagggattcgaaccccagatgactgaaccaaaatcagtagtgttaccgctacaccatgggtctttgttatttcagtggggcaaatttacagcttttttctctagatacaagaactttttaaacttttttttaaatttacactggtttttattttacacaatcatgctgctagacttcaataatctcaatattaataatttatcttttcaaaccgattttgaatatagtatcaaaaattttttagaggaatggttttctaatggtgatcgggtaaaagtgcagacttcgggttctaccggcactccgaaaatttttgaaattgagaaaaagagaatgatcaattcagctgtgatgacctgtaattttctggggttaaaggaaggagataaagcattgctatgcctgccggtagaatatattgcgggaaaaatgatgattgtacgttccgcggaaagaaaattaaaattacagattacaaatccctctttgaaaccgcttgaacatttaaatgaggaaatagacttctgtgcgatgacgccccttcaggtggaacattcactggataaattacacttgattaaaaatcttatcatcgggggagcagcggtttccgaaagtctgaagcagaaaatgatcgataataaacaattgtccggcaccgcaaaccgtttttttgaaacatacggaatgtctgaaacactttcccacattgccctcaagaagctgatgccggaacctgaggaagtattcaccgtttttgaaaacgtttccattagtctggatgaaaggggatgcctgaaaatttatgctcccgatctgaatgctgaggttctgcagactaatgatttagttgaaattaaaaatgaaaaccagtttaaattcctggggcgcattgataatgtcattaattcaggaggcgtgaaaattttccctgaaagtctggaaaatttagtaaaaaaagaaattcccaatgaagccgtttttgtgggaataaaggatgaaagtttgggccagaaattgatactggttattgaaggtgaagagtccggggatatagcagaaagaatatcagccattccatttgagaaaaaatttcacaagccgaaagaaataattttcatcgagaaaattcccagaaccccaaacggaaaagtaagtaggatggaactccataaaataatagcccatggttcataattattacctaagttgtatcttggttcttgattcttgattctcaaataaaaaaacatgaaagatttttcaaaggaacttagtttcagaacttcccggagcagcggggcaggagggcagaatgtcaataaagtggaaacttctgttaccgtgctgtggcctgttgcagcatctgagtttttcaatgaacaccagaaggaattaattctgaataaattaaaaaacaggatcaatgctgaaggctacttatttctaacggtttcagagagcagaacccagctgatgaacaagaataaagccactgaaaagatactggaacttgtagacaaagctttaatcgttcccaagaaaagagtgcctaccaaaccttcaaaagggcaaaaacagaaacggctggataccaaaaagaaaatttctgagaagaaagagaacaggaagtttaggttttagggaagagatatgaggaattagggttaagaattagagaattatcaactatagctgcttcgtttggtaaaattatatttcttttttgatgattttaggtggataaaaataatcaaaatagagtttgttttctggttgtatttttttgatcaataaaaatcttatttttgggcgaaaatttcaaatgatgattaaaaaaacactaacattcgtattcttttctttctctgtaatgtcttttgcccagcaaaaattttcaattgtaccgtctgtaggctatgcctggagaacagcttctatgcctaaaggaatcagcagagaagaaagagagtatattaaggggctgaaaagtggagtgaacttcgatgttgcggcctactataatctgaaaaatattggaattggtttcagatattccaattacagtgcttcaagcgacggcatattaagggtgcagggacagaatggaaatacagtttcagctaatgtaagcacaaaagatcatattaccttttttgggccttcaataatgtattccaactacaatgaggatacaaggcataaattatttatggatttcgggctgggtgtcatttcttataagaccgttaccggatctgttaacggaaaaggatccagcttaggtttggaagccgatttcgggtatcagtatgctgtgacagacaatattctaattgggccgaaacttggatttacggccggaactttatccagcatgacattcaatggtacgaaagttgagtttccggaagatcaaaaagaaggtttacacagagtttctttaagtgcggctgtctcattccgtttttaagttttatc

SEQ ID NO: 1233 - DNA, 24302 bp, synthetic construct
  source 1..24302: mol_type = other DNA
  misc_feature 1..24302: note = Synthetic
ttaatcagtaagcagctgtaaatctttgttttataaatttagcattttctacttcatctgcaataacaaccgcaacatcttctacagataaaatactgtgtccatcggcatcaaaaacaggattatctgttcccaaacgatacgtaccttgacgcgttcccgaagtaccttggtgcatttctggagctggcgaaaacattgtccaatccaaatcattgtcttcttttaagatattataataatctctagccgccaatgcgcctggttttatttgctctggaaaatctggtgtatcaaccaattgcaaatcatctgtaacgtacaaactacctgcgccaccaattacaattaaacgtttaacacccgccaattttgttgcttcttctattgcttttgctccttttataaaatcttcgtacaaattaggattcgtccaacccgcattaaaagcgcttatcacaacatccgcacctttaagatcggttgccaaagcttgtacattatttacatctaacgccacagttgctacatttttacttgccggaactttttctacattacgcgcaaatgctttgattgactgattacgttctactaattcttttaatatttgtgagcctacaaaacctgttgctccaattaatgctactctcattttgtttaaatttatatgtttataatgtaattatttttgttacaattaaagataaaaaaagtttactgaaattgatcagaaaattgtcttaatgtttgattatttaacgttttaattaattgattttcggtattgctaaacaatgtttcaagattttgattcattgctttaccaattggacattcgggatttgtatgattcattttaccaaaaacattttcttgatttaccaatttatacacatcgcccaataaaatatcgtttgcatttttgattaaaaaacacccaccttcttttccttttttagaatcgataaaacctgcttctttcaaaaatttaatttcgcgacgaaccacaactggatttacattgatgcttcctgcaataaaatccgaagtaattatctcatttttaaacttatctgccaacaccaaaatatgcaatgcagttgcaaatcgtaaattattcatcataatctatttaatactgcaaatataaaaacaaattttaaatgtaacaatttttattacattattttttattcgataaaatctagtaaatttgtagatatacaaacctatgtatggaaaattataaaaaacatttattaaatattgttcatttaacggaagaacaatggaacaaaattgaaaacgttttggttgtaaaacaattcaaaaagaatgaatttattttagttcctggagaatattctgaagattatttttttgtagaatctggcgttattcgttcatatacaatagatgaaaatggaaaagaacatgttttacaatttggtacagaaaactggattgtaagcgacagaaatagtgctttttgtaaacaacaatctaaattttatatacaagcgatagaagattctacagttgttttattaaatgaaaaacttgtggatttgattgtaagtcttaatccagaatatttagttgctcaaaataaattagttcaaaatcatgttcgtagtttacaagatcgcattaatttgcttttaggcgctactgcaaaaacacgttatttagaatttatacgcctctaccctaaccaactttcgcgcataccacaatggatgattgcttcttatttaggaataacacccgaaagtttaagtcgagttagaaaagaaattgcacatggataaatacagttttgacgtttttgtcaaagaaaaaccgaaaaaaagcccgaaaaattttattaaattaattgtttcatttttggctgtttcgttaattagttttgtttttttagaatttaaaatctttaagaatgatacgttttattacatttttattggagttttagctacaattgttgcttatttgaatggatattttaaaaaacccgaaacaaaattagaaggtcattttgatggtaaattaactttttctaatcaaggaattgaggttaaaaatgatttttatccaatcgataatcttctttcaattaatattgacaacaatgattatgaaggtaaaaaagttaaagattttggtgaatttgaatctcaaaatggttcgcacggaattaacaatcaactaactttaaaaacgaaagataatcaatttattgaagttaattttaaacaaaaatcgttggatgagtttactaaaattcagccaattttaatctcatattacaaaaataatctacttacagaggacgatttgatttatattatgaaattagaatatgatattgataaaaacgaattaagaaaaaaacttcgaaaaataaattaaccaatcactaacatttaaaaccttaactcctattattatttagtgtatttttgtaacaattaaaacgaaatattatgcaaccaacagcagaatggttaaaaacttgggaagctaaaagagaattaactttggcgccaaacgatttagaaaaatattttacagataaagaaattggaggtgtagaaattgaccaagttaacatgggagatgtttctttaccatcaggaaaaatttttgttaatgatcctttaggagaatatcttgccgtagataaagatccttatttcttggaaacgccaaaaggtaattttcctgttaccgcaagtattgtaaaatacgaagatgatggtgaagtagaaaacctaattggttgtgtaagaattgctttttctgacgaaaaaccagttcgttacgaagaagcgatgaaaggtatcgagctaattgaggaattacaagaaggagaatattttggtttttctatcgaaagtggtttagctacaattgttgatgcggaagcaaaagatgattttgttaaatttattgacgaattcgaaaacaaaggaaatgatacaaatctttacgatgattattttaatgctttgtttatagaaaacgctaaaaataacccaaaatatcagtcagaagaaggagattggattaattggactgttcctggaactgagtttaaagcaccaatttttcaagctggttttggagaaggaatttatcctgcatatttcggatataatgataaaaatgaaatcgttgcattttacattcagtttattgatgctgaattagaagatgttgaagacgatgaagaatggttgtaaaatcattttaagataatataaaaatccctcaataacaatattgagggatttttattatttaataatataaataagctgtaaatgaactacttgtattattgaaataacttattgtaaatgttattagataattattggaatcaaaagtataatcttgtttatgattaaaatcttttagatattcatcataataattaatggttttaagatttcctttttttatgactttaaaataatcaaaaatagaaggaaatggatttactccaatatattgtatatttccaatttctttaccctcttgaaaaattgaaacaaaattgcaatcattgttttggagtataaattgtttcatttgttgataattgataacatacttacagaataaatattttttttcataatgtggttttaaaattttgtctaaaactacacgttgtctatattggtttttgttattaaaatgataattatttaacacttatggctaaataatttaagtataatcggttattgtatattgttttaagaaattttctaaaaattttaaattatacataaaatatgttaatgaatcaattcaaattttgtttcgggtgtgcatattttatcaaataattcattgcttcgtcacattcttttccttcgattacaaaacttaaaatatcttcggtcaattcatcaattatttgtggattaaactcaaattttttggctaaatcgatgcataattctctttcattttcatgtatatataaatcagaaaccatcaacaaaactaagtcatacaataatgctaatctatctgtaaatgtcttaggaagcgaaaagggaagttgagttttatcactcaaaatataatttatttcgttgatagaaagttgatgatgtttcgcgatttcagagattatctgaatctctttttcatttaaattaccgtcactttttcctaaaataaatagatttttgatgtgatttaatttatcaattaaagtcaaattattttgcatacttttttacttatagcgcttaatttataaaaataaacgaataatctaaatacttaaaatttatttaataaattaacattctcaaaagcttgcaatggaaaattttaaagataaaatagataatatttatgctaatcaaatcgaaaataggtcgttaatttctgcgttaacaattgaagaacgaaaagcgtatttgaggaaattaaaaacatcaattttaaatcaccgcgaagaaattgaacaagctttatttttagatttacgaaaatcaaaaatagaagcagattcgacagaaatttttcctgttttatcagaaattcggttgtttttgagaaaacttaataaatggtcaaaagtaaaaacggtacaaaataatttattattttttggatctacagctcaaattcagccagaacctttgggaaattgtttgattatttctccttggaattatccttttcaattgtccattatccatttaattgcgtgtattgcggcaggaaattctgcaattcttaaaccttcagaatttacgccaaatgttacagctgtattagaaaaaataatcagtgatgtttttcctacaaattatgttgcgttaattgacggaagtgtagaggaaacaacgtatttattgacgaaaaaatttaatcacattcattttacgggttctccaaaagttgggaaaatagtgatggaagctggcgcaaaatatttagcgtcggttacgttagagttgggaggaaaatcacctttgattattgacggtacacttccgatgcaagaagtggtagaaaaagcggtttggggaaaattaattaattttggacaaacatgtattgcaccagattatattttgattaaagaagaatttcaacaagaatttattgaaactttttcgaaacatatagagaaagtttttggaaatgatctttcaaaatcaaatgatttggctcgaattattaatctaacgaattttaaaagattaaaaaatttgattgatgatgcgatttcaaaaggtgcaaattgtccattcggaaatcaatatttagagaatgaattatacataaaaccaactcttttaacaaatgtttcatatgatgctttaattaatgaagaagaaatatttggtgcaatttttcctatttatgcatttaaagaaataaatgaagtaattgagtttattaatctgaaagaaaaacctttagcgttatatattttatccaataataaaaattttattactcaaatcaaaacaaaaacttcttctggcgcagttgtaattaatgaaactttggtacatattcttcatccaaatttaccttttggtggtgtaaataattcaggaattggagcttcaactggttatgaggggtttaaagatttttcacatttaaaaccaattcttaaagtgaatagattgttatctccatccaaatttttaaattttccctataaaccaataacacaaaaggttgtcgattttttaataaaatatttttaaatcatttcaaacgttttcgatttatatttgttttataggacttacaatgttatttttgtagttaaatcgatataaaattgttatctaaaaaaacgaaatacggattaaaagcaatggcacatttggccaggcaagaaaccaataaacctgttttgattggacaaatttctgagacagaagtaattccgaaaaaatttttggaagctattttgttggatttaaagaaacttggttttgtaaattcaaaacaaggaaaaggaggcggatattatttggcaaaagaaccaaaagatatcagtttagcttctttaattcgtgttctcgaaggtcctatcgcacttttaccttgcgtgagtaaaaattattacgaaaaatgtgatgattgtcctaacgaaggcgtttgctcgctgaatagagtgatgattgagttgcgagattcgacattagaaattctggaaaataaatctttagaaagtttaaaataattgaagcctgatttattcaggctttttatttttatagaaaattgtataaaacattcaaagaattatataaaatactttgaaaagtttagcgttaattgcacaataattcaatgaaaaataaatcactacaaattcaatttaacggaatactagaaaatcataattttgcaacgcatcgttatttattagcgataagtggtggagttgatagtatggttttgttagatttatttcgtcaaacttcggctaattttcaggttgcgcattgcaattttcagttaagagccgaagatgcaaatggcgacgaagaatttgttcgaaattattgtggtttatataatattccatttcattcggttcggtttgatgtggcggcatatcaaaaaaccggaaattattcggtagaaatggcttgtcgtaatttgcgttatgattggtttgcagaaattcagaaaattaatcagttagattttttagtgactgctcatcatttggacgataatctcgaaacttttttgattaatctgtctcgtggtacgggattgaaaggtttggttggtatgcagattgataatggtcgcatacttcgtcctttgttagaatttactaaaaataatcttttagaatatgctgaaaataacactttggcttggcgagaagattatacaaatgcaacagacgattataccagaaataaaattagacatcatatttcgcccgttctaaaagaaattcattcgcaatttgacgagaattttttggctactttaaatcatatcaatgataattatttgattgtacaacaacgagttgatgaaattacaagtggtttatttacaggaactaatccaataaaaatagagatttctgaattaagaaaacttaatccgttagcaacttatattcattatttatttgaaaaatacaattttaattcgcccaacgaaattataaaatttttagattcggaaacgggaagtgaaataaaatcaacaacttatagattaatcaaagatcgcgaatatttacttttaaaaagtattgaagagataaatgacaatgaaatcacgattttaaacgattttattgaaatcaattcgttaaatttgaagttcgtgaaatcgataaatccacacgaaaataccactgaaatagtagactttacatcaatttcgtttccgcttaaactgcgaaaagtgaaagaaggagattacttttatccgataggaatgaaaggtcaaaaaaaattgataagtaagtttatgaaagatttaaaactctctaaattagaaaaagagcaagtttggcttttatgtgatcaaaatgatgatataatttgggtggtaaattatcgtttggatgaacgttttaaaacaacaaaaacaagtaaaaactttttaaacatcacactatgttaaaaaaactttggatactttttttgtttccaattttagtaaatgcacaactatttagtcctgctaagtggtcgagttctgtaaaagaagttggacaaaatgagtttgagattgaggtaacaggaaaaatagataaaggttggcacctttattctgtaaaacatcctgatggaggaattggaattccggcgagtgcaacatttaaatctcctgcagatgccaaattagttggcggtgtacgcgaggttggaaatcgaattgataaatacagtaaaatctttgaacaagatgaaaagtattttgaaaatcaagtaaaatttgttcaaaaagtaaaagtttctggcgataaaccagtaaacgttagttatacaatcgagtttcagatgtgtgatgccgaacgttgtttgcctccagatgaaacaagtggaacggtaaaattaacgccaaaagcagttgtagaggataaaaaagaagaagctaaaacggaagataaattgttagcagattctgttcttgttcctgttgcaacagttgatagttctgtgtctacagtagattctacagcgtcaattgcatcaactaatgatacaatcaaaaaagttgatgattctttattggcagataatgagaagaaagataatggtttattaaaaatattttctttaggatttttaggaggtttagcagctttgttaatgccttgtattttcccgatgattccgttgacggtaagtatgtttaccaaacaaagtaaatcgaaaggagaaggtgtaggaaaagcttttatttacggtttatcaattattgtaatctacgttttattgggcttattagcgactgtattatttggtccatctgttctaaatgaaatgtctacaaatccttgggttaacttagcattttttgtcgtttttatcatattcgcagtgtcattttttggtgctttcgaattgactttaccaagtaaatgggtaaatgcagccgataaaggcgctgataaaggcggattaatcggaatatttttcatggcatttacattagccttggtttcgttttcgtgtacaggtccaattattggctcgttattagtacaggctacacaaggcggaaattactattcgttaatgattggtatgttcggattctcattagctttagccattccatttacattatttgcaatgttcccaggttggttaaactcaatgccaaaatctggaggatggttaaatacaatcaaagtttcattaggatttatagagttagcatttgcattaaaattcttatcaaatgcagatttagtatggcaaatgaattggttaccaagagaaatatttttatcattttggattgcaattttcttccttttaggattatatcttttaggtaaatttagattagaattagacgcaccaacacaaacaattggtgttccacgattattcttttcactattcgcatttgtattcgtagtgtacatgattcctggtttatggggagctccattaaaatatttaagtggattaacgccaccaatgacttattctgaatcgcctcgtggttttcatgaaggtgtaggaagcggacaaactgctgtaaaatttgaagatccaaatatggtagaaggaccatatggaattcctgctttcaaggattttgaattagctgctgcttatgcagaaaaagttggtaaaccaatgttgttagattttacaggacatgcatgtgcaaattgccgtaaagttgaagagcgtgtttggagcgatgaacgtgtaaagaaaatattagccgaagatgttgttttggtttctttatatgttgacgaagcaaaagaattgccagaagatcaaaaagtatattcgaaagcgttagaccgtaaattaaaaacggttggtaataaatggacagctttcgagatagagcattttaatgcaaatgcacaaccatattatattttagtagacaaagatttaaatcgtttttctaagccattagaagccgaacttgatatcgaagtttatctaaaatggttgaatgacgggcttgcaaagtataaagcaaaataagaaaatataaatctgaagattaatttagattttataaataaaaaaaagcagtacaattcgttgtgctgctttttttgatttgagaacaaaacatataaaaataaaaaaaggcgagttgccccaccttgaatgttttcacaacggaataatccttattgtgagttcctttcagttacaaatgtaaaataaaaatttaatctggaattacggtttcccgtatttctgtaatttattttatagctatattgtgttttgtataattaattgaatcatagatgaaaaatatattaggtttagatttgggaaccaactctattggttgggcgttaataaaacaaaactttgataataaagaaggtgaaatccttggaatgggaagtcgaattattccaatgtcgcaagatattttgggagaattcgggcgaggaaattctatttcacaaactgccgaacgtacaggttatagaggtgttcggcgacttcgtgaaagacatttattaagacgagaacgtttgcatcgtgtacttcatttattaaattttcttcctaaacattatagtaatcaaatagattttaccaaacgttttgggcaatttatttctggaactgaacctaagttagcttatgataaagcatttctttttcagaattcatttaatgagatgttggaagattttaagcaaaatcaaccgcagtttttaattaatagaaaaggtgaagaagctttaattcctcacgattggaccatttattatttgagaaaaaaagctttaattcagaaaattgagaaagaagaattggcgtggattattctcaattttaatcaaaaacgtggttattatcaattgagaggagaagattttgatgaagaaaaagataagcaatttattcaattgaaagttgataaagtaattgattctggagataagattaaggataaaatcttgtatgatgtatattttgaaaacggatggaaatatgataggcaaatagtaaaaactgaggattggatcggtcgtactaaagaatttattgtaagtgaatcattgcttaagacgggagatattaaaaggacatttaaagctgttgattctgaaaaagattggatagcaattaaaactaaaacggaacaagaaatcgacaattctcataaaactgttggaacttatatttacgaaaatctgttattagatccgaaacaaaagataaagggaaagttagttcgaactattgaacgtaagttttacaaagacgaacttaaacaaatattaaataaacaagcggaatttcattcagaatttaaagatgaaaatttgttgatggattgtgtgcgtgaattgtataaaaacaacgaacaacatcagcaaatgctttatgggaaagacttggtgcatttaataatggaagacattttgttttatcagcgtccgttgaaaagtcagaaatcaaccattagcaattgtcctttggaatctcgaatttataaagataaagatggcaatgaaattattcaacccttaaaaaccacttcaaaatccaatccatattatcaggaatttaggttgttgcaatggttacaaaatttggttatttatagaaatgacgatgatgcaaatgtaacggcggattttatttcgagcattgaagataaagaagttttatttgattttttgaataatagaaaggaaattgagcaaaaacaattgatagaatttttgttgaagcataaaaatgaaggtaaaaaactcgcaaaaggcgaaactgaaaaataccgttggaattatgtacaagacaaaaaatatccttgcaatgaaaccagaggtttaataaaatctcgtttggataaagttgaaaatgcaccttcggatttcttaaattctgaaaatgaaatggctttgtggcacattatctattcggtaaatgataaaattgaatacgaaaaagctttacataagtttgccgaaaaacatcaattaaatgtaattgaatttgtagattcgtttaagaaatttccgccttttaaaagtgattacgggagtttttctgaaaaagcaattaagaaattattgcctttgatgcgttttggaaaagattggaattacgatgctattcaaactacttctaaagatagaattgataaaattattacaggcgaatatgacgagaaaattaaagatcgtgttcgtgaaaaagcacaacatttagccacagaaacagattttcagaatttgccactttggttggctcaatatgttgtttacggtcgtcattccgaagcttcggttgctgggaaatggtcgtctgtaaaagatttagaagattttttgcaagagtttaaacaacattctttgcgaaatccgattgtagaacaagtgattacggaaacgttgcgtgtggtaaaagacatttggcaacaatacggaaacggtgcaaaagatttctttgatgaaattcatatcgaactgggtcgagaaatgaaaaataccgcagatgatcgcaaaagtatgaccaatcaagtgactgaaaacgagaatacaaatctgcgtttgaaagctttattggcagaaatggcaacggataattcggttgaaaatgtacgttcatattcgccaagtcaattggatattttgaaaatttatgaagaaggcgtattgaacgctgaaacagaaatcgatgaagaaatcttaaaaattagtaaaacggcacaaccttcaagctcggatttgaaacgttacaaactttggttagagcagcgttatcgttcgccttatactggtcaaatgattccgttgaataaattatttacacacgaatacgagattgaacatatcattccacaaagtcgatattttgatgatagtatgagtaataaagtgatttgcgaatcggctgtaaataaattaaaagacaaccaaattggtttggctttcattaaaaatcatcacggagaagttgttgattgtggacacggtagaaaagtaaaaatattagaagttccagattacgaagattttgttaagcaaaattatagtaaaaatagaggaaaacgtaataagttaatgttggaagaaattccagaaaaaatgattgaacgtcaattgaatgacacacgttacatcagcaaatatatcagtcaattgctttctaatattgttcgagatgataaagcaggaagcaatgatgatggtgtaaactctaaaaatatattaccaggaaacggaaaaataaccactcgtttaaaacaagattggggattgaatgatgtttggaatgatttggttttaccacgttttgaacgaatgaatactttaaccaattctacagatttcacaacttggaatgaaaatcatcaaaagtttttaccaaccgttccgattgaattatcgaaaggtttttctaaaaaacgtatcgaccatcgccatcatgctatggatgctttggtaattgcttgtgcaacgagagatcatattaacttactaaataatgaatctgcaaaatcggatacaaaaagatttgatcttaatcgtaaactccgcaaatacgaaaaaatagcttatgatgatactaaaactggcaaaagaatagagcgtgaagttccaaaagatttctttaaaccttgggaaagtttcactgttgatgcaaaaaataagttagatggaattgtggtaagtttcaagcaaaatacgcgtgtcattaacaaagcaaccaattattacgagagttacaaagaagaaaacggaaatttaagaattggaaaagatggaaaacctgtaaaaggattaatttctcaacaaggaacaaattgggcgattagaaaaccgttgcacaaagaaaccgtttcgggtaaagtacatctagatagaattaaagttgcaaaagggaaaatattaaccgcaacacgtaaatctttagacagttcatttactgaaaaatcgattgaatctattactgatactggaattcaaaaaatattattgaattatttaaaagcaaaagagaataagccagaaatagctttttcgcctgaaggaattgaagaattgaatcaaaatattagtcaatataatgatgggaaaaatcatcaacctattttaaaagtcagagttttcgaacaaggaagtaagtttgctttgggagaaacgggtaataaaacagataaatttgttgaagcagcgaaaggaaccaatcttttcttcggggtttatgcagacaaagacggaaaacgcagttatgaaaccattccattaaacgtagtggttgaaagacaaaaacaaggattaacatctgttccagaaacgaatgaaaaaggacataatttattgtttacattatctccaaacgatttggtttgtattccgaatgaaaatgatgatataaataataaacaggtttataaagttgtgagtttttcaacctatcaattgttttttattcgtcaagatatttccgtttcaatagttaacaaagttgaattttctgcattaaataaaatggaaaggtctattgaaggaattatgattaaagatatttgtatcaaactaaaagtagaccgtttaggaaatatttcaaaaatgtaacattatgctaaaacgtaccatttacatcggcaatcccagttatttgaaactaaaagacaatcagctaaaaattgaagatgcagaaactaaagctctcaaaggatccattcccgttgaagacttgggttttttagtattagatcattatcaaataacgattagtcatcaattaattgtgtttttacagcaacataatgtagcggttattagttgtgacgaatcgcatttaccacatggattaatgttgccgatggctggtcacgtagagcattccgaacgtttaaagcatcaaataaatttatccgaacctttgcgaaaacaattgtggaaacaaacggttgaggctaaaatttatcagcaaaaagctttactttcaaaatttgggcatgtttcagaacctatgcaaacttatttaaccaatgtgaaatctggtgatacgactaatatggaaggaattgcagcacaacattattggaaacaattgtttgataattttacaagagagcgagatggcgatgcacccaataattacctcaattttgggtatgcaattcttagaagtatggttgcgcgagcgcttgtaagctcaggtcttaatcctacaattggtatttttcatcgcaataaatataatgcgtattgtttagcagatgatattatggagccttatcgaccttatgtggacgaattggtgatagagtggatgaacaaaccgtttcgaccaacagaaatgagccgagaagcaaaaacacatttgctaaatattgcgacaaaagatgtaaaaatggatggtttaacacgaccattattggttgcattaagttcgacaaccagctctttgtataagtgtatgacaggagaacatcgcgtaattcggtatccagaattggtatgagtttttcgcgatacaatgcatatcgaattatgtgggtattagtattatttgatttaccaaccgaaacaaaaaaacaaaggagccaagcttctcgttttcgaaaagatttaatagatgatggatttacaatgtttcagttttccatttatttacgtcattgtccaagtaaagaaaatgcagaagtacatattcgacgtgctaaaaattttttgcccgaatttggaaaagtaggaattatttgcattaccgataaacaatttggtcaaatggaaatatttttttctaaaaaacaaaccgatttacctgctggtccacaacaattagaacttttttaatagaaatgaaaaaaatcctatgtttttataattacataggattttttattgtttttttaattctattcaacctctgtaatccactcctagagcggagaaattaaattgaggttgaaagaacttcggtaaaaataccaaattgaaaggaattcacaacggtaaatttagatatattttttataatatcgttgaaagaacttcggtaaaaataccaaattgaaaggaattcacaacgcccaaacgccgtttttaaatattgttcttgttgaaagaacttcggtaaaaataccaaattgaaaggaattcacaacagtattcattaaaagcatacggattatgaagttgaaagaacttcggtaaaaataccaaattgaaaggaattcacaacattcctacattaccactccatccgctacctgttgaaagaacttcggtaaaaataccaaattgaaaggaattcacaacaccaactttttttacttcgtgttggttgtagttgaaagaacttcggtaaaaataccaaattgaaaggaattcacaactgattgatctagcaaaagtggacgaaatctgttgaaagaacttcggtaaaaataccaaattgaaaggaattcacaaccgaaatagcgtgtgaaaaagaagtttggaagttgaaagaacttcggtaaaaataccaaattgaaaggaattcacaaccagaagcatacgctggaggaaatccaaaaagttgaaagaacttcggtaaaaataccaaattgaaaggaattcacaacatgaaactgcagctaaaacaatgcgagaaggttgaaagaacttcggtaaaaataccaaattgaaaggaattcacaaccagaagcatacgctggaggaaatccaaaaagttgaaagaacttcggtaaaaataccaaattgaaaggaattcacaacaaaggctcatcaaccttattcatacgcaaggttgaaagaacttcggtaaaaataccaaattgaaaggaattcacaaccgattgttgtaacttctaaatcacttgttggttgaaagaacttcggtaaaaataccaaattgaaaggaattcacaacgcacattggtttagctttggcgtcggagttgttgaaagaacttcggtaaaaataccaaattgaaaggaattcacaacttagatcaagacgtttattctgcttctgttgttgaaagaacttcggtaaaaataccaaattgaaaggaattcacaacgcattagggttagaaggtgctaaaataacagttgaaagaacttcggtaaaaataccaaattgaaaggaattcacaacgcaataccagccgttatacttccttgacctgttgaaagaacttcggtaaaaataccaaattgaaaggaattcacaacaatggacaactcctcaagaaaatcaaatacgttgaaagaacttcggtaaaaataccaaattgaaaggaattcacaactaagggttttatgttatttaaatggaaaaggttgaaagaacttcggtaaaaataccaaattgaaaggaattcacaacgaaatattatcgtcattacttccatagtgcgttgaaagaacttcggtaaaaataccaaattgaaaggaattcacaacattaaatcgttataaaaatcaacaattggtgttgaaagaacttcggtaaaaataccaaattgaaaggaattcacaacaggatatggagtgccgagaaattagaattagttgaaagaacttcggtaaaaataccaaattgaaaggaattcacaactatatgatattcctaaagaattatttgatagttgaaagaacttcggtaaaaataccaaattgaaaggaattcacaacaaccaagcgaatcatttgaaaatgaagcaagttgaaagaacttcggtaaaaataccaaattgaaaggaattcacaacaacacgttaactgctcttccttagacaatagttgaaagaacttcggtaaaaataccaaattgaaaggaattcacaacataaattactcactaaattaccaaccatacgttgaaagaacttcggtaaaaataccaaattgaaaggaattcacaacaccaattgaaacagataaggaaaccattgagttgaaagaacttcggtaaaaataccaaattgaaaggaattcacaacaatttaatctaatttaaatttataatttaagttgaaagaacttcggtaaaaataccaaattgaaaggaattcacaactagaattaaaatacattaaacgtcttgaaggttgaaagaacttcggtaaaaataccaaattgaaaggaattcacaacgtaatggataaaattatacaaaccgcttatgttgaaagaacttcggtaaaaataccaaattgaaaggaattcacaactcgtaaatatattgtgttaagtatgcttgagttgaaagaacttcggtaaaaataccaaattgaaaggaattcacaactgtatatagcctccgaccagcttaattgcagttgaaagaacttcggtaaaaataccaaattgaaaggaattcacaacaactgcaaaacgtttaagttgtgacataaagttgaaagaacttcggtaaaaataccaaattgaaaggaattcacaacaaacacaagtacctacaggtattacttttcgttgaaagaacttcggtaaaaataccaaattgaaaggaattcacaacacggggttatggataataacgttgaagatggttgaaagaacttcggtaaaaataccaaattgaaaggaattcacaacaatgttatagtacaattatttttttctcctgttgaaagaacttcggtaaaaataccaaattgaaaggaattcacaaccagccagatggagctatattccaagcgtgggttgaaagaacttcggtaaaaataccaaattgaaaggaattcacaactacttataattaatatccgtagctaattgtgttgaaagaacttcggtaaaaataccaaattgaaaggaattcacaacactgcgatttgatctgctgtatcatcttttgttgaaagaacttcggtaaaaataccaaattgaaaggaattcacaactgggagcaacccgaaaatgaatgtgcgaatgttgaaagaacttcggtaaaaataccaaattgaaaggaattcacaactatttgctttttcgtaagtgtcttttttaggttgaaagaacttcggtaaaaataccaaattgaaaggaattcacaactatttttaagctggtccattaagtaattatgttgaaagaacttcggtaaaaataccaaattgaaaggaattcacaactaaagatgcttctataattatgctttggaagttgaaagaacttcggtaaaaataccaaattgaaaggaattcacaacgaggaataacaattgtaggaataccacctagttgaaagaacttcggtaaaaataccaaattgaaaggaattcacaaccaggattgctagtaaaagctatctcgtcaagttgaaagaacttcggtaaaaataccaaattgaaaggaattcacaactaagattaacgtaactgctgtgtcacctatgttgaaagaacttcggtaaaaataccaaattgaaaggaattcacaaccggaggttttgaaagatgtagagtgattgagttgaaagaacttcggtaaaaataccaaattgaaaggaattcacaacggctctgagaacgcttattttagatatcgtgttgaaagaacttcggtaaaaataccaaattgaaaggaattcacaactcaacttgtcgagaatataaaatagattcagttgaaagaacttcggtaaaaataccaaattgaaaggaattcacaacaataaatcgtgttctttgtcagcatatagtgttgaaagaacttcggtaaaaataccaaattgaaaggaattcacaacacccgaatactgcttataagcttgcattaagttgaaagaacttcggtaaaaataccaaattgaaaggaattcacaactagtgttgttttctttaattaacctatcaagttgaaagaacttcggtaaaaataccaaattgaaaggaattcacaacaaccaataatcatgttctttttttgaagctgttgaaagaacttcggtaaaaataccaaattgaaaggaattcacaactgcgtgatgtatctgattactataagcctagttgaaagaacttcggtaaaaataccaaattgaaaggaattcacaaccacattgaaaggtgaaagaaaaatcattcagttgaaagaacttcggtaaaaataccaaattgaaaggaattcacaacccatttacatagttaaatgaatatattattgttgaaagaacttcggtaaaaataccaaattgaaaggaattcacaactatttacccattggattagaggctctataggttgaaagaacttcggtaaaaataccaaattgaaaggaattcacaacactattcagcaaaaagattattacaagtctgttgaaagaacttcggtaaaaataccaaattgaaaggaattcacaactgtaaatagcttctccagttaaaggagttggttgaaagaacttcggtaaaattgtaccaaaccaagttctttcaaatccaattgcatttgactttaatcaatttgacaatgatgatgttgctattcaaaatttgaagatttgaaatttgtaattaaaattaagaaaatagtatatactgacgaatctatttttagagtaaataatatttttaaaatttagtctaaaaaaattagtacaaaaagaaccctcaattaagtaaattgagggttttattttaccaactgataaatcgtcaaaagtgaaacaacacttgtaactccgccaataacataattaatattttttaaaataaatgaattgtctttagatttattgttaaaaaaacgtaagtacaaataaaacataataagcgagccaataacaacgcctaaagtgaaaatagagctgttaggatttccgaatacaataacgttataagaaaccaatgttgcgcttaaaaatacataaaacggaatcggaaaaatattaatcgcggctaaaaataaaccataaataaatttatttttcttttttacttcgttgttttcaagttttttttcttgctttttacggtcaattttttctgcaaaaaagagaaaataaatcgttaaaactataaatacaaaaagtccgatttctctaaataataaggttactttttcattaaaattgataaattcagcaaaaaaaatagccaaataaacctgaattgcaattacaacacttacaccgcttataaaagtataggcacttttatatccttcattcttaccaatttttaccacagtcatattcaataaacctggtaaagaagtaccaagtaaagctgtaaaaattccgataagtaaaagctctatatattgcattttgattgttaaaacgtgtctaataaaaggattcaaatttaggaataaactttcggacgactcatttattaaagatgacttttgttcataaaacaaaaaaccacttcaaaattgaagtggtttttctatctaaaatttgattaaatcctattataaagctgctaattgctcttcgatttgagaaatcatttctaaagcatctgcttcttttttacgctcgtttgcgataacttgttctggcgcaccagcaacaaatttttcgttagataattttttacgaaccgaatttaagaaacctttattgtattctaattctttttgcaatttctcgcgctctgcctctacatcaatgttatcagacatcggaatcataaactctaacgtaccaacacgaaaagcaaaacctttttcgggtttatctcctgtattgaaattagaaacgtttcctaattttgtaaatacatctacaaaaatttcgttacccgcatttgtatcagcaaaaacttctaatgcttcttttggcgacattcctttttctgaacgtaaaccacgaattgcagtagttgcttcttttgtattttcgaaatgttgaattaatacttcatcaaaggcttttacttctggataatccgaaataataattgcttctgcatctgtacgatcagcaattaaatgccaaatttcttctgttaagaatggcataaatggatgaagaacttttaatacattttctaaatatccaattgttgcatcaaatgtttgacgatctattggctctccaaaagtaggtttaatcgcttctaaataccatgcacagaaatcgtcccaaaccaatttgtaaattgccattaacgaatctgataaacgatatttctcgtaatttgcttcgatatcagctaattgtgcattaaatttatgttcaaaccattcaactgcttttgtttgtgcagtagaaggttgtaagttttcgtcaatttcccaacctttgattaatcggaaagcattccaaattttattagcgaaattacgtccttgtaaacataaatctacatcaaaaggcaaatcgttaccagcgggcgccgttaacaacatacccatacgcgttgcatcagcaccgtattcgttcattaattcaattggatctggcgaattccctaaagatttagacattttacgtccttgtttatcacgaacaattcctgtaaaatatacattctcgaaaggtaattcgtttctatattcgtatccagcaacaatcatacgagcaacccagaagaaaataatatctggaccagttactaaatcttgagttggataataataattgatttcttcgttttctggctcattaataccattaaaaactgatattggccataaccaagatgaaaaccatgtatctaatgcatcttcgtcttgacgtaaatctgtgatagttaatgccgcatttccagttttttcttgtgctaatggtaacgcttcttctttgttcatagcaacaacaaaatcttcgtttccatcaccgtagaaaaatgcaggaatttggtgtccccaccataattgacgagaaatgttccaatctgttacattttccatccaattacgatacgtgtttttaaatttcgcaggatgaaatttaatcgtatcattcattacattatctaaagcaggtttagctaaatctgtcatttttaagaaccattgatttgagattttaggctcaatcacagctccagttctttcagaagttcctactttattgttatagttttctactttctcaagtaaacctttttcttctaattctttctcgatttctttacgcgctttgaaacgatctaatccagcatagtttaaaccttgctcattaagtttcgcatcatccgtaaaaatatcaatgaaatctaaattatgtttcttacctaattcgtaatcgttaacatcgtgcgcaggcgtaacttttaaacaacctgtaccaaattcgatatcaacatattcgtcttcgataatattaattttacgaccaacaataggcacaataacttgtttaccttttaaccattcgtaacgctcatcgtttggattgatacaaaccgcagaatctccaaaaatagtttcaggacgagttgtcgcaactacaatatatttatcagttccttctacttggtaacgtaaatgatataattttccgtttttatctacgtgaattacttcttcgtcagaaatattagtttttgcttctggatcccaatttaccatacgatatccgcggtaaattaaccctttgttgtaaagatcgataaaaacgcgttgtacagattctgataaatctgcatccatcgtaaattttgtacgatcccaatcacaagaagcacctaatttttttaattgatctaaaataattccaccatgtttgtgtgtccactcccatgcatgacctaagaattcttcgcgaccaatatcaaatttagaaacaccttcttcttttaatttcgcaacaacttttgcttcagtagcaattgaagcatggtctgtaccaggaacccaacatgcattgtaaccacgcatacgagcacgacgaattaaaacgtcttgaatcgtattatttaacatgtgtcccatgtgtaaaacacctgtgacattaggtggaggaattacaattgtatatgctttgcgttcgtctggtgttgatttaaaatactgattgtccatccagtatttgtaccatttgtcttcaacctcttgaggcgtatatttagatgcgatttccattctctatttcttaaaaataaatttgtgcaaatttaaacaatctgcacaactaaaccttatttattggtacagatttcccaaattaagtcaatattataaaattaatgtgaatgatttctgaactaaaaaataaattgtgaattattataattagaattaatttttaatggaatgaatattgcttttatcctaaaaattatatctttaaataaaattagagaattataattttttaaaaaattaacgtcaaaacagtaaaatgttttgtagatttgaattagtaattatttattgttatgaaaaaaataatgtttgtaggtgcttttgtaatgggattaacaagtctttttgctcaagaacttaaattagaaaaagaagaaattgctttcggaaatttaaagttaaatacagaagtaacttctaaaatgaaagtaacaaatacaggagataagccattaatcttaaaaagtgtggttggttcttgtggttgtactgtaccagaatatccaacaacgccaatagaagctggtaaatctgcagatattg

SEQ ID NO: 1234 - DNA, 24299 bp, synthetic construct
  source 1..24299: mol_type = other DNA
  misc_feature 1..24299: note = Synthetic
aatttaggagagatcaatattccagttaaatttggaggaattacttttattccagaggactatatctatgcagatggcgatggaatattggtaagcaaaaataatttattaaaataaaataaaaatcaaatgaaagctagaaaattactgatgattcctggtcctatagaatttgaaccagaagttttgcaagcaatgggaatacctacgacaagtcatgtagctccagattttattgaaattttcggaaagagccttgagctaatgagagaagtttggatgtctccaaagggacaaccctttattgttgcaggaactggtacactggctatggatatggctgccgccaatctcatcgaacgaggagataatgtattggtaatttcttcaggttattttggtaaacgatttaaagatattttagattgctatggtgcaaatacaacgcttttagaggcgccattaggtgaaattgttcctcttgaagtcatagaaaacgaactaaaaaacaaacaatataaagcgctgactattacgcatgtagatacttctacggggataatagtagatccgaaacctatagtccaattagctaaaaaatataatacattaagtattttagatggtgtgtgctcggttgcgggtgaagagttaaatcaggacgaatgggagcttgatgttgtcttaacagcatctcaaaaagcaattggtgtaccgccaggacttgcgctattgatggtttcagaaaaagcgatgcaagcttgggaaaatagaaaaacgcctgtgcctaattattatgcagattggagcaattggttacccataatgaaagcttatgaagaaagaagaccttcgtatttcgggacaccagcagttaatttaattgtagctctagaaactagtttgaaaattatatgtaaagaaggtatcgaaaaaagggtgaagaggcatcaaagtttagcaaaagcatttagagccgcaatagcttccttgaacctaactatattacctaaaactactgaaatagctgccaataccttaacagcagtatattatcctcaaggtatagacggagccgcattaagttctaaaatggtggatagtaatgtaattatagcagggggattactaccagaaataaaaaccacttattttagaataggtcatatgggttcggtttctccaaatgatcttttagctgtattaggagccttggagcgtgctttatcagaattagggcattcattagaagttggaaagagtttgcagacttttcaaaatgaactcttaaaatcaaattaattaggcatttaaaacttattttttaatatttatctggtcgataaaatttctttaagaagaagttgcgtaatgaattattaatagtgcgattaaaatagtaacaaattaatttttaataacatattggagttgtttagcccctttctgcctaatgaaaaatcctctctgtttcgacagttaggatttttttattgtagaatagcaaaaactgattattccgtttctgtattccattaaataagacttatttttgtactgtttaaaataattataaaatttcactatgtctgatacaatcgaaaaaataaaatgccttattataggttctggtcctgcaggatatactgctgcaatctatgctgcaagagcaaatatgaatccagttttataccaaggaatgcagcccggaggtcaattaactacaactaatgaagtggaaaattggcctggaaatcctgaagggataactggtccagaaatgatggtgggtttacaagctcaagcacagcgttttggtactgatgtacgtgacggttgggcaactaaagttgatttttcgggagatgttcataaagtttggattaatggaactaaagaattgcattgtgaaactgtaattatttctaccggagcatccgctaaatacataggcttaccttctgagcagcactatttgaaaatgggtggtggtgtttctgcttgtgcagtttgcgacggttttttctatagaaatcaagaagtagttattgtaggagctggagattcagcttgcgaggaagcgcattatttgtctaaactttgtaaaaaagtaacgatgttagttcgaagtgaaaaatttagagcgtcaaaaataatggaagctcgtgttcgtaaaacagaaaacattacgattctgatgaatcacgataccgttgaagttttaggagacgaacaagtagttaccggtgtaaaagcgttgaacaaaactacaaatgaagaatttgagattccagcaactggtttcttcgtagcgattggacataaaccaaatactgatatttttaaagattttatttctcttgacgaaactggttatatcattaatactccgggatcttcaaaaacaaatgttgaaggtgtttttgtatctggagacgcagcagatcatgtgtatcgtcaggccattacggctgcagggacaggttgtatggcagcactagatgcagaaagatatttagcttctaaggactaaattcgaaagaacaattactattcgaaagaacaagttttcaataaaaaaaggccccatttacttatgtaatggggcctttttatttctctttcggactgtaatatccccacgcgatgcctcgttttattttattggaattttaatgcctcgtgggctctgcacgaggtgttttattttacctttttaagtaacttggcttcgtcagcaaattttcgtatttcaatttttgggttgccatatagttgaatttcagatttctctccagcacttatgcttatagatgtttgtgcgtttacactagctttagagtaactctcagcaattaattctaattctttaacagtcaatttatctcctttaaaatcagaattgttatccagacgaatgacgccaatcgtagcgctaccttctatgtttgctttagatttttgatataaatcacatgttagtttagtagtagtaattaaggattttaaatcagcatttttactcaatacaatttttaccttttcagattttacattcagttccatttttgatttatcatccgcttgtaaaacgaaattctttgtattgatattcaaaaacagtttagaataatcgatgcttttaaaagtaatagagtccaattgcacttcttgtatagcgtttacaacagcatcgttttttgaagagacactttttaattcattagtataagtaacctttactatcagttttctatattttgtcgcttccttagaagtgtaaattcgaagggttttatctcttaaatccattgagattatatcatgaagattatcatctgcttcaatctttattcctggtttctctcctttttcaagatagacttcaaggttatcctctagttcaagggagtcgaaatttccagtttctcttaattcagtcgtaacggtttttgaaccttttattttttcttttttttgtgcagaaatcagagtggttgacagtacaagtagcgtgatgactatatattttttcattttattttttgttatgattattacaaatataaaaaaatcatccatttttgatggatgattcagttattaattgacaaataaaaagttaaattttgtctacacttgctccagaactcgctcttttttcgattgattttggggtagtgttatagtcaacattgctaccactcgaagctttggctgttaaacttacaataggatgaacgctaatagttgctccacttgatgctgttgcatttacctcgttagcaagtaggtcttttgcatcaatatcacttccgctggaagcagtagtctcgagacttagtgccattccttcaatatttatggaactcccgctactggacttacaacttatattgtctgatttcacctttaggttcattgacgcagcacttgaagtcctaagaataatattttcactctttagtgtgtttgtactgtttatcgaagaagcactagacgctttcaaagcttcaataacaggcattttaacagttactttttttgactcgatatttataaaagaattataatcacaagcaacgataagtactccattttcgactgtagtagtgatgcttctttgtaaattatcatcagcttcaacggtaatctccgttttgtctgattgctcaattattagatcaataccattgctaacttctatacttttaaaatctccttgaaccgtcctgttctcagtagtaacatgaccacttcctatgatggattttatgtttatcgaatggttacaggatgcaaataataatgcagttaatgctaccagaatgaatttagttattattgtgatgagttttaacatgattatcttgtttttataattataccatctttgtttattttcaactctttaatattgctattggatacgttgacactatcatctgtaatagaaacaccattttcagtaatcttaattgatttgttctcgttatcttcatcatagtactcactttcatcatcagtacagtttaagcatcttaccttattgtcttctactctgtagatttcattgctagaatttggattccataaaaagtaatcctcatctgtacgatcatagtttttcatagaatcgtctggtcttaataatgtcccttttggtaagtataaagtaatctctatttcttgatcacgaaatttattttttaaatcggtaattaaatagttgtctaaaattaattgatttccttcaattttatagctgtattttatttgttctgctctttttcttgcttcagatagagactttcctttagcctctttttcaatttgaatataaggtaatttttcatctgttttttctattctaaatctaacgtcattggaatagattacatctgctcctgtaacatcttgtgcgattttgaaatcatcacgatcatcaacattcttagcataataatcattgtgcttgaatttaatgtaaagcgtatctgatggttttaggataatattttctttttgaactactcttccgtcagctgcaaatgcagctgcttgttttacacctatagaaatagctaatgcaactgaaatcaaccatagtgctaacaaagtatatttagcaatatttccaatagatttcatatttggagccaatagtttgaatcctaatattgtcaagaaaaagaacggaataccaactgcaaagaacatcaaaagtccaaaagcccatatagggtagtcagtgaagtttcctgcttctataaaaccttgccaaggaaagtcgataaaagacgaagatcctaaagtaaacattcctataaataaggccattaatgtggctaagccagtcataattaagatgaccccaagaaatttagcgaaaattttaaaaaccgtcataataaaatcaccaaaagaacttcctattttttcggctccactttttatttggttgccatatttgtcgtaatcaacatttttaaatttgtcggaaacattttcaaattcttcccttacttttttttcgatattcgaaatattaacgggttctccagtcatttccagtttctctgacgttgtcactgcagcaggaacaacgatccacaagataatgtaagcaagaactcctgttcccgctccccatactaagagaataaagatgattctaacccatacagcatcaattccaaaataatgtcctagtccagcagaaactccgcttaccatccctttttcagtatctcggtatagtttttttgttcttcttgttgtagtactgttatagttttgtgaagcgtggttatcctcttctatcatatagtcttctggttgccccataacggcaattacttgatctacatcttttagacctacaacgtgcttgtctgttttttgattttcggtcagtagttccgaaacgcgcatttcaatatcttttataatttcttcttgtccagatgatttagataacgatcgctttatggcgtcaaaatatcgtgttagttttaggtatgcatcttcgtctatatggaagaacattccgcctaggtttatatttacagtcttgttcatggctattatttttggtttgtgattaggtttacagcatcagacaattcagtccaagtagtggtaagttcgtttaaaaatgtttgtcctatttcagtaagaccatagtattttctaggtggtcccgaagttgattcttcccaacggtagcttaacagtccgtcattttttaatctggtaagcagcgggtaaatggttccctctaccactagtaattttgcgttttttaaagtgtctaatatttccgatgtgtaggcatctttttctttcaatacagataagatgcaaaactcgagaacacctttgcgcatctgggcttttgtgttttcaatattcataattcgtttttttgattttttcgttgattaaactattcattttttgattgatgatttgtcattgcgaggaacgaagcaatctcatattacctagtactcttttcttctggagctatttgcttcgccaattcgcttcgctcgtgtcccgctgtccgctatatcttttttgtcttgaaacaagttaaagacaaaaaaggatgccgcttccatccgggctaatgactccctatttgataaaaggaatcgtaattgggtatttgtatttctcaccattagatgtttttatagaagcataaatgattagaaagaactcggctatttttaaacaaataaaaacaaatacagttgttaaccccagtgttattaatgctacgttgttttcaaaattgatatgattgattacaaaactttcctcgtgaatcatggcattcaaagagacattattaaagatggttataatcaaaataggaattgcgataagtgcgagtgctatggtgtatagtaacacactcaattggaaatttagtatttgtttcccactgtaatctacaaattccgacttgtctttttttgaagtccaaagtacgattggaaaaatataattcccaaaaggaataaagtattgtgttaatgcgctcaggtgcgtaaaagtggcgatgtttttttcagtagttgcttccattttttttgatttttgattttttggttgatgattgaaactttcagttagtgttgaacagtagtgcctagtaatttcttatgcaaatatatatctaaaagacagtatcttgtatcgcatagtagtaaaagttaacatatttttaacaaaataatattatatgtacgcatagtatttttttgtacattagcaaaaaaaccagtgataatgaaacttacagcgtctaaactaaataaatttttatttttcaaattgccttccgcatttatctgtggagttcgtgtaaaaaaaattgatgaaacagattgtgttgtgacagtaaagcaccgctggattaaccaaaacccgtttaattcgatgtattttgcagttcaagccatggctgcagaactttcgacaggagctttggtgatgtatcaaatacaaaaaagtggaaaaaaaatatcgatgttggtcgcgaataataaaggaaattttacaaaaaaagctacagggagaataacatttgtttgtaaagacggtcatttaatagagcgtgctattcaagaatctatagcaacaggcgaggggcagaccttctggatgaaatctataggaactgacgaaaaaggagttcaagtatctgagatggatttcgaatggagtgttcgaataaaaaaatagatcagtttgaaccttatattaatataaaaatgtctccagatggagacattttttaatatataaaaagtaaattatgcttttttagtacaacactttttttcttctgttcctgccatagtagcatcacatttttttccttcagctttgcattttgctttacattttgcaacttcagcagtagtcattgcttttgaaccacattttttatcggccattgcaacatcacatttttttccttccgctttgcatttgatttggcattttgcaatttcatctgcggtcattgtttttgcagatttttttttcgcgcagcaactttctttttttgctacttctttagcaacagttttcttttcttgtgcgctagcactaatagttagcaagactattgccaaaagggtaagtatttttttcattttttagggtattatgtttggaaaaacatatattaagtggccaaatataaaaatattaatttggttaaaattgattcgcaaagttaatatttacctaagtgcttattttttttgattactgcttgaaagacgttcttacttcaaaattatttatatacctaaaactgtatgttaagtaagtgttctatttaaaattgtgccgagatgtctaaggaataatcatttgtttagtgaaatattctgatgctttagattttcacctaatatgcagaaagaagaattggctggtcttaacgtcaataaaattattttgagggtaagtatttgagggtttttggtaaagaaaggtactatgcattcctctaatttaacattcaaaaacctcaattttttattcacatattgcaatgagaatgaattattgtattcgcagagatagcagggtctattttagaatctacgaagaatccttggctgcggttactattgcaaggatgttttacttactaaattagtagtgtttactgttaaataagaatcaaaaaattttaggcagctaaggttaatagttattttgtcaatactaagcaattactcttttagttacgtgattcactccttataataggaatattggagaatgtagtggcacgatacgtttagtcctcgaaaaaaaaggccaaaaaatcgaaaaataattcctaaatgatttaaagcagcctgttaaaattaaaattccttgcacaaattcctcattttttaaaaatcagtgttgttatttagattttatcaaaaattaaaaaaaccttaaacaattgctgtttaaggtttttttctgtagcgagtacgagatttgaacttgtgacctcagggttatgaaaattgctatattttttatatccactcttactttgtcattttataggactttaccgaattttgaatgtttcgagatttgttttttttttgaatattcctcactctttttcctcactcttttttgtctcaaaatttaccgaatattacttttggtagttttataaatcagaggtcaatctttgaaaaatataatgaatttctggaaggtaattatagaattacttgtattaaacatcatttttaaaataaattaatctaaatttctcgatttgagattgtgattttaacatcttgttttcacaatttactagtatgaaataatggcttcgccgaaaatttatttatagaagttcattaaaatatgaaattattgattttaaattaaaattggttcgaatccgattatggttataatacttccaataaacatgtaataattgtttttgtcaaagtggaaaataatgagattcaatgaaactttttacaggaagggatgaatgttgtaggggaagaattttaacaaccttaaatagtagcggaaagatagaatttggacggccgaaactttgagaactcaaattttggttttgaaagatataataaatatgtacttcagttcgaattcgaattaaaaacattcaaggagcaaatggaaatgagtaaaaaaaagctatcgaacaacaaaaaaaaaggatattgaaaaagttaaagatattggtgaccgtttggttagacttttagaatgattcttgattttcaggaagctatcgaaaataaaaaagccccgaagatagtcgaggcactaaatgttttcacaacggaataatccttattgtgaattcctttcaagacaaatatacaaagttatttgtaaataatatagttgattcataatatttttttttaaattttattcgtatatttctgaataaataatgttgaaaattatgagtaaaaatatattaggtttagatttagggacaaatagtattgggtgggcgttggtaaaacaagattttaaaaataaagaaggcgagattcttggaatgggatctagaattattccgatgtcgcaagatattattggagactttggaaaaggaaattctatttctcaaacagcagatagaactgcgtacagaggagttagaagattacgtgaacgccatttattgagacgtgaacgcttgcatagagttttgcatattctaaattttttacctaaacattatgaccaacaaatagattttattcaacgcttaggaaaatttaaaagggactttgaacctaaaatcgcttatttcgaaaatgagtttttatttaaagagtcatttaatgaaatgctagaagattttaaggttcatcaaccaggattcttactaaataaaaaaggagaaaacagtttagttccttatgattggacaatttattatttgagaaaaaaagcgctaactcaaaaaatagagaaagaagaactttcgtggataattttaaacttcaatcagaaaagaggttattatcagctaaggggtgaagaagaagaggaaagcccaaataaattagttgaatttcactctttaagaattgttgatgtagtcgctgatgagcaaaaaaacaataagggtgaattttggtactccttacaattggagaatggctgggtgtacagaagatccagtaaaattccgttagatgattggaaaaataaagttcgtgattttatagtttcaacagatttgaatgatgatggaaccgaaaagataggcaaagatggtaatgttaaacgaagttttcgtgctccgagtccggacgattggacgttaatgaaaaagaaaactgagcaagaaattaaagaatctgataaaacggttggaacatttatttatgaccacttgttagcgcacccaaaacaaaagataaaaggacaactcgttcgcaccattgagagaaagttttataaagaagagttacataaaattcttagtaaacaagctgaatttcacaatgaattcaaagactcttcagttctaaatgattgtgcttgcgaattatatcgaagtaatcatctgcatcaaaaaatgatagcttcaaaagatttactgtacttgtttataaatgatattatattttatcaaagacctttaaggagtcagaaatcaaatatcggcacctgtagtctagagtttagagtttcaaaagatgagaaggggcaagaaattgtcagacctttaaaagttatcgcaaaatcgaatccttattatcaagaatttagattgagacaatggattcaaaatctttctatttataggaaaaatgatgatgtgaacgttactagagatttttgggatagtattgaagatttagaaaagctatttgaatttttaaatcaaagaaaagagattgaacaaaaatttttaataaagtttcttttagaaaatcaagattttaagggtaaagcattaactgcggaaatagaaaaatatcgctggaactatgtgcaagataaaaaatacccttgcaacgaaactcgacatatgattcaatcacgattggataaagtgagaagtacttcggatggttttttaacttttgagaaagagatggctttatggcatctaatttattctgtaactgataaaatagaatatgaaaaagctttgaaaacattttcaaaaaagaatggattggagatggaaacttttgtagatgccttcaaaaaaattccaccttttaatagtgattatggtagttattctgagaaagcaattaaaaacctacttcctcttttgcgttttggaaaaacttggtcatgggaatcgataaatactgatgcgcaaagtagaattgataagattattactggagagtttgatgaaaatatcaaaactcaaattagagaaaaagcagaaaagtataaattaaacaaggagaaagactttcagaatttacctctctggttggcacaatatattatgtatggcagacattcagaagcggcgttggctggtaagtggacttctgttaaagatttagaagattttataaaagattttaaacaacattccttgcgaaatccgattgtcgaacaaataattacagaaacacttcgtgtagtacaggatatttggaagaagtatggaaaaggagctgctaatttctttgatgaaatccacgtagagttaggacgagacatgaagaatactgctgatgaaagaaaaagcattaccaatattgttacagataacgaaaatacaaacttacgcatcaagcttttgttagcagaaatgtcttctgatattgctgtagataacgtacgtgcctattctccaatgcaagctgaaatcctgaaaatttatgaagatggtattttgaagtctgatatagaaattgaagaagatattttgaaaattagtaagactgcacagccctctagttcagaattaagacgatataaactatggttagaacaaaagtataaatcaccatatacaggacagattatacctttgaataaattattcacttccgaatatgagattgagcacatcattccgcaaagtcgctattttgatgatagttttagcaataaaattatctgcgaatctgcggtaaataaattaaaggacaatcaaattggattagaatttattaagaattttcatggttataaaatgcctaatggtacaaaaatctttgaaatagatgaatatgaaaattttgtaaagctccattataacaaaaataggagtaaacgaaataagttactcatggatgacattcctgaaaagatgatagaaaggcaattaaatgacaccagatatattagtaaatatatttctaatttattgtcgaacattgtccgatctgatgtgaatgatgatgggtataattcaaaaaacattcttcctggaaacggaaaaataacaaaccgtctaaagcaagattggggattaaacgatgtttggaatgatttagttctgccaagattcgaacgaatgaatcaaataaccaattcgtctgattttacttcttataatgagaaccatcaaaagtttctcccaactgttccgctcgaactatcgaaaggcttttcaaaaaaacgaattgatcacagacatcatgcaatggatgctttagtaattgcttgtgcaactagagatcatattaacttattaaataatgaatcagcaaaatcggattcaaagagatatgatctgaatcgtaagctccgcaagtttgagaaagttgcttataatgattctagaattggagaaagaatcgaacgtgaagttgctaaagattttttaaaaccttggggtacttttactaatgatgctaaaaaagaactaggaaatattgtcattagttttaagcaaaatctccgagtgataaataaagcgacaaattattatgaaaaatgggttgataaaaatggagaactgacaaaagaaaatgtaaaacaggaaggtgtaaattgggcaattcgaaaaccgttgcataaagagactgtttcaggaaagataaaattggacagaataaaagtagcaaagggcaaaattttgacagcaacgcgaaaaatgcttgatacttcttttaatgaaaaagtaatagctacaatcacagacacaggaattcagaaaattttactcaattatttgcgacataaagaaggcaattctgagatagcattttctcctgaaggagtggaagaaatgaaccttaatatcagtcattttaatgatggaaaagatcatcaacctattctaaaggttagggtttttgagcagggaagcaagttcattttgggggagacaggtaataaaactgacaaatatgttgaagcagcaaagggcactaacttattttttgctgtttatgctgataataatgggaaaagaaactttcagacgattcctttaaatttggtagtagaaagacaaaaacaaggtttaaactcagttccggaagaaaatgacaagggtgagaagctgctttttactttatcgccgaatgatttggtttgtttgtcagaaatagaaagcttcaaagaacaagatctatacaaagttgttagttttagtggaagccaactattttttattaaacataatatggctgtctctattgttaacaaaatagaattttccgcactgaataaaatggaaagatctgttgatggtattatgattaaagatatatgcgtaaaattagaggtggaccgacttggtaacatttcaaaagcctaataatatgcttaaacgcaccatatacataggcaatccaacatatttgaagttaaagaacaatcaacttaaaattgaggatgcagaaaccaaagaacttaagggatctgttgctatagaagatatcggttttctagtgcttgatcatccacaaattacgatttcgcatccagtaattttggctttacagcagcaaaatgtggctattatcagttgcgacgaatcgcatttgccattgggattaatgctgcctatgagtggtcacgttgaacattcggagcgattaaggcatcagataaatgttagtgaacctttgcggaagcaattgtggaaacaaaccgtcgagtcaaaaatatttcagcaaaaggaagtacttaggaaatttaatctacaacatgattctatgctccaatatatgaatgatgtaaaatcgggtgatattaccaatatggagggaattgcagcgcaatattattggagaagattgtttgacgattttataagagagcgaaaaggagatgcgcccaataactttcttaatttcggttatgcagttttgcgtagtatggtagctcgtgctttggtaagtagtggattgcatccaactatcggtatctttcaccggaataaatataatgcttattgtttggcggatgacattatggaaccataccggccgtatgtcgatgatttggtagttcaatggatgcaaatgccccaagcttctcatgagttggacaaagctgcaaaagcgcatctattacagttggcaactcgcgatgtctatataaacggattgcaacgtcccttgttgacagcaattagtatcacaacaagttcgttgtgcaaatgttttatgggtgaaagtcgagtaatccattacccattgtttaaatgagttttagtagatataatgcatacagaattatgtgggtactggtattttttgatttgccgacagaaacgaagaagcagcgaagtgttgctactagatttcgtaaatccctattagacgatggttttgcgatgtttcaattctctatatatctgagacattgtcccagtaaagaaaatgctgaggtacatatcaaacgaactaaaaagaatctgccgccagaaggaaaagtaggaattttatgtgttactgataagcaatttggtcagatggaattattttttgctaaaaaggaaaccgaattgccaaatattcctcagcaattggagttgttttaagtcatttatttctataaaagcccacttaggcacagaggaaatctgttgttttaggtcagattacatcggactctagtaaaatgagagaccatcaaaataaaattacggccgtagtacaattgaaaaatgcctgggaacaattgttctatcaggcattttttagtttttttacttttgtagatttccttctcaatcctctattttattgagaaattctgaggttggaaccatattttataaatctacaaaaatttgaaaggaattcacaacataaatctgttggtggtattacttttctttgttggaaccatattttataaatctacaaaaatttgaaaggaattcacaacggtataatatccttgtattgatttaaagtagttggaaccatattttataaatctacaaaaatttgaaaggaattcacaaccgaaggggtgtccattaaagagaatttcgagttggaaccatattttataaatctacaaaaatttgaaaggaattcacaactatcctaagattcatgttataaggtggtgagttggaaccatattttataaatctacaaaaatttgaaaggaattcacaacataaaatcgttggcacttattaaacgatcagttggaaccatattttataaatctacaaaaatttgaaaggaattcacaacagatgttgctgtgaagcaagaaactgcattgttggaaccatattttataaatctacaaaaatttgaaaggaattcacaaccatttgacgcttttatattttcaaacctaagttggaaccatattttataaatctacaaaaatttgaaaggaattcacaaccatcgcaataacattcagccattccttatcgttggaaccatattttataaatctacaaaaatttgaaaggaattcacaacgggtatgagtagagttaccacaatagacatgttggaaccatattttataaatctacaaaaatttgaaaggaattcacaacaacataggaatgtttccagaaactagaccagttggaaccatattttataaatctacaaaaatttgaaaggaattcacaacataaaatgaatgatatttgcaaaaatcttagttggaaccatattttataaatctacaaaaatttgaaaggaattcacaacaagcaattaattttggaaagtgagggcgacgttggaaccatattttataaatctacaaaaatttgaaaggaattcacaacaaggttttagaaatagctagtaaatcaacggttggaaccatattttataaatctacaaaaatttgaaaggaattcacaacgaaactggcaacttaaattcagttgctaatgttggaaccatattttataaatctacaaaaatttgaaaggaattcacaacgaccaaacggtcggaaatccacgcgccatagttggaaccatattttataaatctacaaaaatttgaaaggaattcacaacagagcgatttgctaactctgaatttttattgttggaaccatattttataaatctacaaaaatttgaaaggaattcacaacataaagcaaagtgcaaataaagagcaccatgttggaaccatattttataaatctacaaaaatttgaaaggaattcacaacccaagatacaatctacaataaccataattcgttggaaccatattttataaatctacaaaaatttgaaaggaattcacaacagtgaataggtttataaacttcgcatccacgttggaaccatattttataaatctacaaaaatttgaaaggaattcacaacgaacgctcataacttccttttttaccttgcgttggaaccatattttataaatctacaaaaatttgaaaggaattcacaacatcaagttgaacgtttagtttttaaaagtcgttggaaccatattttataaatctacaaaaatttgaaaggaattcacaactatataggaggtgttgacgcaaagaacaatgttggaaccatattttataaatctacaaaaatttgaaaggaattcacaactgaatggataagggtaaatgcttacgatacgttggaaccatattttataaatctacaaaaatttgaaaggaattcacaacagtaaataggtttataaacttcgcatccacgttggaaccatattttataaatctacaaaaatttgaaaggaattcacaacaggaaagcattttcattgtttgttatttttgttggaaccatattttataaatctacaaaaatttgaaaggaattcacaacggagataaaaagcaaaatttcacatttgctgttggaaccatattttataaatctacaaaaatttgaaaggaattcacaacttactcgtaagtgatagtatcttacaaaaagttggaaccatattttataaatctacaaaaatttgaaaggaattcacaacaacaacttatcagatacattagcagtcattgttggaaccatattttataaatctacaaaaatttgaaaggaattcacaacagtaatttcgatgaacggattaatcaaactgttggaaccatattttataaatctacaaaaatttgaaaggaattcacaactcatcgcatcagctttaatagaatcggcaagttggaaccatattttataaatctacaaaaatttgaaaggaattcacaactagaaagggtacattatctacaacaatggtgttggaaccatattttataaatctacaaaaatttgaaaggaattcataacggtatatgtatagtgaaatgttttacattaagtgaaattatcatttaattcatttatttcgaatttattttaaaatatatttatgtgaacttattctattaatcccttttcataaaggtaaattggattaagtaatttaactgttatttgtaacaaattttttctatatttgttacaaataatactgtttttaatggctcaaagtgttgataaaaatataagaactaagattttaaaaataaaacgagggagtttgttgtttccagaagattttagcaaattagggtcttcagaagcagtacgtttggtattgcatcgtcttgaaaaagaaaaaataattactagaatagcacaaggtatttacgtgaggccaaaaataagtcagtatattggcgaggtattaccttcagcggaagaggtagctttaggcattgcaaaaagagatcgagttaaaattgtccctacaggtgtttacgcattaaacgcacttggtttaagcacgcaagtgcctatgaacttagtatatctcacagatggtgctccaagagtaattaaaataggtaaacgaactattaagtttaaaaaaacaactcctaaaaatttattggcaaaaggagaaattagtagtctagttttacaagctttaagagaaattggtatagataaaattaccattgatgaagaaaaaatgataatagaattacttaaaaaagagaaaaagagcaacttaatacatgatattacattagctcccgtttggatacaaaaaatcatgaaaaaagcagaccaatgacaaaaataagttttcataaccttcccgaaattgaaaaaataaatataatacagcaagtcagtaatattcaagggctagctccttttgcggtagaaaaagattggtgggttgtacaaacattagctgttatttttgaaatgcaagttggagagcatttggttttcaaaggtggaacttcattaagtaaagcttggaatctaatagatcgtttttcggaagatgttgatttggctatcgataggaaatttttaggttttgaaggtagactttcaaaaaagcaaattacggctttaaggaagtcggcgaataattatatttctgaaattttttatattgaattacaatcggaattcataaagaaaggatttctaggtttgaggtgggaaatcataaaaacaattgaatctgatcaagatcctgttataattaatctctattatcctcatagtattgatatgccaggatatatattaccgagagttcaaatagaaatagggtgtcggtcacttagagagccttttagcaaacaaaaaattacttctttaataactgctcaatttcctgatgctgtattttctgaaggactgtgtagtattccaacggtaaatccggagcgaacatttttggagaaaatatttttacttcacgaagaattcagtaagcctaaaggcaaaataagatttgaaagattgagtaggcatctttatgatgtatgtcaattgtcaaggacagattttgcaggaacagcattacacaacaaagagctatatgaaacaatcgtacagcatcgtcttaagtttacgaaaataggggatgttgattataatttgcaccaacctcagactatcaatattattccttctgattcaattattgagtattggaaagcagattatgaaactatgcaagaacaaatgatttatggagattctccttcattcgaaaccattattttagaattattagaactccaaaacaaaattaatagtcttgattggaggattgacatagtaaaataaaaataatttattataatgtctactagattttatgattttcaagagagtgactgtgcttatatcattagttcgaaatcttataatatcaaaaggtgttttagaaattgtatgctattttcaattatctgacagcccctttctttttttctttcttcttctatttttcagttggtttggcaaataatctgtagcatattctgcttgaatgagcatatccaatactttcaccaaatcaggaatagtgagtgaatctttttgctgttgaaggtgatgaaataatgattccttagagggaagtttttcatgactctgatttcttttttcgtcaccagttatttttaatccgcaacgttcttgaatcgccttcgcactgtattctttccctaaactactaccattaaaaacacttttagtcttgtggtcaacataggtaataccataaagtaggccttctgcactttttcgaaacacagtataaattccttctttttccaaatattttgccagttggtttgttgacattgttcgctcctttagtagtgcaatatcaattgcgttttttagccgtattttgtccggtattcttctaacttcattatgcttaaatttttcttctagaaattttaaagttggtttactataaaaatcacttgctttaattggaactccaattggtttgccttgttcatccagaattcggtataccaatccatttgttaaaaatatttttgaattctcgctgcctcgatcagccattacattatactgttttagaactgtatttagttcaggaatacttgcgtacttgtattggttgagaacggcattcaaaacgttcgatatggccttctttgtttccatgcgaccatactgaatcttacctacagcaataggctgcaatataaattcctctttcttttttcttccttccgctttaacgagtccaaagagttcttcaatttctttacgggcaggttcggatttccgtattcccaaatggtgtaaatcaatccgcttaccatccctctcaatatttatggttacaacatgtaggtgagggtgtcctgcatcgcgatgttggtatactaaatatggttgttttccaaaaccgattttctccatataagtattggcaatagctattagcttttctttggaatgattttctgatggatcaaaatttagggaaatatgcacactattccgttttgcattttcgtttaattctatttgttttataaaacggtttagctttaaagcatcactcattttgtcaacatcgacaggatagtttcctgccgagatacactcagctacaccaactttaactttgttctcattgtagttaaaaatactgcggattgaatggctagtttttatgattgtaaccatctgtccgaaattttttgaatgtgttttttgatttcttctactttgttgaaaaggatttttttatccagatcaaagctaattatccagttcctgaattcaggaatctgctgcaaagtgtgtagtttttttacagcttgattaatattggttccaatggcgttcagctcattgtggagtactatagtttcttccataaaatcgtccagcgattggttgcgataggtagttacaattgacttatcgaaaaggtgcttacggacgtagtcacttaattttcggcacgtactggctttccatttgcgttcaatttttgcatattcttcgggagttaggcgcagccctattatgcgcgtcctgtttgaattctcggcttccatcatctatcattttcattgttttcaaactctttttatcctttcagtgtcactgcccacgagttccgagtgtggggcagcaagatccggttgtttaacaaccgttcatcttgccaattgcaggaacgttgcaatttcttagctttttaaaggattgaggctaatttaaagcgaatactcgaaataaacaatcatagctatatttcggctaggatagcacttcgataaatgaaaggagatagcagtacttgaatcagtcagactgcccgtaaatttttcaaaagaaaaagaaaaaaaagaaagcagtaaaaaattggatatacatcaatcgtagtgctataagtcccgaagggtggcacagcgaagaatgagtggtgacattatgggcacgtagttgatgaatgtccaataccttggttgacctttttatgattttttatcgagatgtttttaacgtctttaaggtatattaaagctgtaggaatatttattttaggggtctttgaaagtgtacgctcccttgtgccaatatagaagaaaatgttcctaaataattattagatcttgaataatggagcgtactttttcaaaagaatatattttaattaatgttcaaaattctgactgttttcaggaaggtttctgaacatgatttgaaaaaaattaccgcaatcaaaaatcatttattcttttgcttgaattaaggaaatggtgtcggcaagatcatgttctgtaatatagtctaaaataaaaatttcaacctcttttgtattgtcgggagaagtggaaaatgagttgagataatacgctgtattttcatctgcaatatgaataatctcagtgtaacctttcgaaattaaagtgccttttaatttcaaaactttaagctcacttttattatcaatttcttttttaactcttagcttaatagttttatccatggggttattctttattgatgcgcaatcttaaaatattgcgcagtttttttagatttactgtctgttatacaaacaaaaaagagacttatgacggtctcttcttggaattaattatatcttttataaaatatttatttagccttcaataatttttccaaatactcgaccttatctttttcggcttgaaccaaacgttcgtaaagttttttattttcgtcatatgcttcaatcaatttgtcaataggattaaaagtgcagttgaagtttaatgatgaagcgttatcgtggtatgtattgcctataatattaaataccgtttcatcactataatttttaatcgcctcggcagaaactccgagaacttcagcaatggcctgtaatttttcatcgtctattgtttcgcttgcttctatattagaaactgactgttggcttatgccaattgcaatagccaatgcttcttgtttcattcctcgaagctctctaattcggctaatatttctgcctatatgtttcggttttgttgctgtgctcatagtccaaagatatttaaaattctgtcaaaaaaaaaatattggtaaaacacaagattgctttggtaagatacaattcccattagttcggtacggtacaatctatggcttacttgctgtgtattaaacaaaaatacaatttttcggactagtattaactaaaaaattaaaattatgaaagcagttgacaacgcaggattaaagacagttaagaacattattattgaaagtatcagtacaagtggtgtttactgttttggagagagaaagaaaagccaatcggttttaaatcctttttcagaaaatagttctaaaaaggaaagaaatacccatttttatttattggttttaactgatcaatatataattaaaactgtatctgatatttgtgatgttataaaaaacagaacaaaaggtcgctatacggtaactatgttgcttcataaagggaaatcgggtaattacctcacaccgcatcaaacatttttttatcatgaggttttaaccaaaggatataaagtgtacgagcgtgaaaacatgcctccgaatattgtctttaatgaggttccaaaacgtaatgttgattatatccgatcctattggaaaaatagaaatataattgctgataattttataaatagtcagaatcaaattgacttattggaaagcgcagtggttcacgaagcaatgattcataccgctgtagaacaaatctgtctcggactaatcaacgtatttttaggatatcatcccaatcatttttcactagcttatttgtttgaaatctgtgaaatattcacgccacttgtatctgaaatatttccacaaactactggtgaagataaaagactctttgatttattaaaaacaaatccaggttcacttcgatggtttaaattgaaaaattcaagtagaatagatactgagcttctagcgaaaagatgcaagctattccatgaacgagcttg

SEQ ID NO: 1235 - DNA, 24296 bp, synthetic construct
  misc_feature 1..24296: note = Synthetic
  source 1..24296: mol_type = other DNA
tctttgtctaccggagcaggagtccattgcagcagggtatcaatatgttcgtctgttatactgaaaccatcgtaattcctcaggacattttccagaagaatacgaatactgaaaggaaggtgatctactcctttttccgaaagatttttcaaagaactgtaatggtagtttttaccgtttacagataactcctgtaccgatttggatttttgggtattcataaagatgcgattttatgtgaacacctaatttaccgctaaaaaagaaaagacgggtcaatattatgatagattaacatgaatattaacattaagattgactatttggagaagagggataattaatttgaaaatttgaaaaagagggaatttggaagatgtattaatatgtcaatgggtgaatgtgtgaatttgtgcaatcgtaaattcgtttatagggttataggattatacgattaaacagttttacaaagattaattaatgtgtgaatgagtgaatttgtgcaatcgtaaattcgttaatttgattacatggttaaacaattttacaattatattatgtcaatgggggcaataagtaaattcgttaatttgattatgcgattaaatagttaaacgactataccattttacagttgcacaattacacagttaactaataacttacaaccaataactcattgcttattttttagtatagtaatcataagctgctcttccgatatcagaaataatcttttcagaatcatcaaagctctcataggtattgtggacaaaaacagcaatgtaaattttctttttaccgggtaattctatgattccgtaatcattaatcgctccggtcattccttctttattggtaaatgaagttccggttctgtgggcaatttttactcctgccggaaggttgcctttcagtcgttttttgccggtgacattgttcagcatagcattgtataaccattgtgtatgagctttgtttagtattttaccattactgaactcttgtagtaacagagtggcgtaattaggtgtaattttattgatgaattgggaatcccaatctttgtgcattccttcctcatcatttttgatgataaagctgctgctgtctatgaattcctgaacagtttcagggccaccaattaaccttaaaaggatatcagtaaggttattatcactataagaaaccgtccatttcagggcttcttctaaagttattgtaatattgccttgcgggtatttttctttaaacggactccaggtatcttctaatagttcttcttttttgatgaatagtttctgatccatggaaagcttccctttttccacttcatgaagaacagtaagagctaagggaaattttacggtactcagcataggcaacatctgatctccatttatccgggtaacttcttttgtgtcgggacccataatagatattccaacagtggctctctttccggaaataatagattctaaagttttcttaagtacagtattctcatgaacctgtgagaaaaaagggagtgacatcaataatgccataatgcccaaaatagcttttttagccataaaaatgtgttatgttaatttagtttttcgggttctaaaatagttataaaaaactcaaaccagaaatataatcacagaaaagtgatataggagaggggaatttgtgaattcgtgtaatcgttaatttgcttatacagttttacagttacacgattgtgcggttaagcaattatactatatcaatgagtcaatgagtcaatgagtcaatgagtcaatgagtcaataggtgaatatgtgaattcgtgtaatcgttaatttgcttatacagttttacaattacacgattctgcggttaagcaattataccatatcaatgggtcaatgggtgaatttgtgaatatgtgaattcgtgtaatcgttaatttgcttatacagttttacaattacacggttctgtggttaagcaattatactatatcaatgggtcggtcaataggtgaatttgtgaatttgtgaatatgtgaattcgtgtaatcgttaatttgcttatacagttttacaattacacgattctgcggttaagcaattatactatatcaatgggtcaatgggtgaatttgtgaatatgtaaattcgtaaaattgtgaatttgtttgtaagactagttaatttcacggttacatgattaaacaattccacaaattaacaacctataaaatactcaataaatcgtctttggagagactgctgaagaatgaagtctcagtagtaataagatcctgagccagttttttctttttcttttgcaggttcatcattttttcttcgatggtaccagaacatatcattcgtacggctactacatttttggtctggccaatgcggtagctacggtctatagcctgattttctactgcaggattccaccagggatctacaagatatacataatcggcttcggtaagattaagacctgtaccaccagctttcagactgataaggaaaacccgtacttcttcattattctgaaagtgctgtactttgtcaccacgattccgggtttgtccggtaaggtattcatagcggatgtttttctcatccagcttacctttaattagatccagcatttcaacaaattgtgagaataccagtattttgtgttccctggatttgttttctatctgttccgtcagaatttcaatctttacggcatgatctccggaatgaccatcttttagcaaaacaggagagttgcatatctgcctaagtctggtaagccctgttaatacatgcatgcttttattatggatctcgtcttcgtcagtagctgatataaaatcccggacctccttttcatagaggtcgtaaatcctgcgttgctctgtattcatttcacaatagatcagcatctctgttttctccggcaattctgtagcaacctgcttttttgttcttctcaggataaaaggttttattttcttttgaagctctgtagcccgtttgctgtactcaaacttgtcgatagggatggcgtatatatctttgaagtattgtttgcttcccaatagcccggggcaggcaaaagatagctgtccgtataaatcgaaagtattattttccactggggttccggttagtgcaatcctgttacgggattgtagcaggcgtgctgccttatacctttccgagtttggatttttaatggtttgtgattcgtccagaaatatataattgaatctgaatttcttcaggaatgtaatatccgaaagcaacatgccataagtggttagtacaacttcgtatttttgaaaatctgctgtacttttttgtctgtctgcgccataatgggttagtacttttacagtaggtgcaaatttagccaattcctcctgccagttgaaaagcagggaagtaggcagtaccacgaggttggttgtatgaccatacttttctctttgcgagaggataaaagcaataatctgtattgtcttacccagtcccatatcgtcggcaaggcagcctccgaaattatgactgtccaggaagtttagccagttcagaccttcctgctggtaagttcttagttcagcattcaaggctgcaggcactgcaacttcgggaatttctgcatttacagaaaaattgtgtgtataggaagctatttctgcctgtacttcgttacttagaacttctttctcaaataaatcctgtatttcggtatagctgattttcggaatcttcaagagctcttcgtcgatatcgccggcctgaaagtaacgtgcaattttatgaatccattcttccggcaatattccaagagtaccatcatccagttgtacaaatttacttttgtttcggatggtcttgtgtacttgctttagagtagcttttttatgtccaaaacttactttcagctgcgcattaaaccagtcgattccgctcgtaacctctatagtaattttagcacggtgcgcattaagtttgttatttttgatattgttgaaacccagaatgttgatatcttcgtttcgccatgtctcaaaggcattcaaaaaccattcatcatccaaaaacttatctttgtgcaggtaaaagtattcctgttcttctatttgttctctgaaatccgggtgttgttccattaccactctggttagtcggatttcagcattatgatcacgctcaattttaaattcatttccgttctggtcagtatccagcagttgcttgcgggagtacaccggaatttccatattgccgtatttcattaccggtataatggatatataattgccttcctgatgcaggtaaataagcttttcggtggtgtaatctttatcggcaatttccgtaggtgttgcttgacggatatagctataattaatttgtacccgttgctccagctgagtcagtatactctgcatgaagacttcgtatctggagctgtggacgagtaatatttcgttgttggatttaaagaactgtatcacccgcagcatatcaggatctgtaatcagataataggtattccggtagtaaacaaaatattcgtttcggataactatctgactgaagggaagtgttgtatctctgaataataaatctccggttatttcataaaaaggctctttccggaagacatgaagttggatttcagcctgcagtgtattcagattcacaggaactaatgactttgccgatatgctttctgctatagctctgtcgtggaaatagacttccagattcagtgggttttgcacaatatgcttcagagcttcagtttctgcaggatcggtttctccgtactgattgttgaagcttgtaatagcggtatagaacttaatctctgaagcctgttctgctttccacagcagcttcattacatcgatattgtttaccggatttttaagctttccggtctgggtcgtatcggcttccatgagttggaaattcagctgattgtaatagcggtgtttaccaataaccagtatctgctttttgttggtgtcccgtgttgctagttcttttattatggatgtacgacgggggagcaaatctcttttcagaatatgctcgtctacctgcagtaattcttttattttagggcttacctgaagccggccattaagataatccagccgaaaatatacatccagattgtcttcttcttccagtccatagcttttagcgtaagggagcagagttttatgccgcagataagcatcaaagaaaatacggtagtctctttcttcaagcaggcaatgaataatctctgcctgatgtatacacagcttatcttcagtagaattacaggagcacgacgttaccagattggcaccgacctgactaacagcgactctggggaagtccgacaaagaagaacttttcgtaaacacaccagcatttagttccagtgccacagggtagatatcctggaattccttcacagctataaaatctgcatttgctgtatgctttagcagatcgtatatatgcagtgttcttatattaaagtccggtaagatatattccttaggcagttccatgcgctgaattagtgaagaacaaaagtaaggattttagtgaagctttacttctgtataagtacatctgaatctgaaaaaataagcgctattgttacagcagtattttatctccggtaatacctgctttataccatttgttattttcatataaagcggcctgatgatctcctttgtgctgatttacatctacgcccagtacttttttattataataaaatccaatattcgtttttacaatagtgtgacctacaataattctttttacctggaataaggatagtgtttggtctacaactttctcatctactacaggttctttaaagtatccgcggtaccagaaaatgccatctgtgctattgaatattttcagaatggtagcgtcggtaacggtatttttaaggtttttccagccaatataaggtctggctatttcatttagtttttctatggtcaggcccagactgttaacatccggagaaataccaccatgcatacacagattatcaccgattttttcaatcagatttttacttctcagccaccgacccagttctgttttttcactgtataaatctgcataggaaaggtttagcttttccgcattcaggaaatatttctggtctacatatttaaagttgcctgccagattcataatgtcgtgattgcccaaaatagtatgaacgtagccacctttcagtttagcttcttcttccagtttataaagcaaccacattgtagcaggtacttcggttcctctgtcaaacagatctccgcaaatcaccagatgcccgtctccataaatccattcgtattttttattaataactttgttcgccagtaatagctctcttagtgcatcgaattcaccttcaatatccgagagtaccagcattttcttaggctgtgccgttacggagggctcattcgaaatattttgctttagttttacctcgaagtttttctcgggtgcatccgaaaagctgatgcgcagttttatagctttcttatttttctgaaggtagtgttcttttttctggttgcctgcctcaatttgttgcacaagaatactgtcgcctttataagtgacgtatggaccatcggatgaattgacaggtcttttttcctgtccctgaacggagcataaactgagagaaaataataatagtagtacagattttataggagaaaacatcatgatatagtattaatctgaacaaatataagggataatggggacttgggaatgggttatcggttgctagttgttagttaagtacgaagttagaagttagaagttagaaattggaaaaaagaaattagagatctgccttaagtgatttcatctggctaatcaaaagctcccgactatatcggtttttataattaattacccggatattttatagcttccgaaagttctataggattgttgttttttcttattgtaaactgtttttgtttcgtaagctcattgaaattaggtgtaactggtttaccagattcatcaacaaatttcatttttactttaccggttttggcttctttataaagatcttccattttattagccagtcgataacaagatctgttgttgattcggcatcttttgagataattaaaatcattcagtacatttaaaattatccattaaaaactgagctccatttttacttattttatctgaaattgttaatgtaacatcattctttttatcacattgcaatgtttttgtataatatccttttgggtacgttttttttcttcctactgaaagatctataaatgttttgaaatgcattggattatcgtgataagttgtaaaagcgtacaataattttttgtgtgtagggaaacgcaacatacctgccagttctttactgtgtagtattttcttgtatttattcttgtcgtgtgcatgtacataagctccaaaaattagcattgtcatacgaagggagtcattggtgtatttataataattaccattaaagttacttccttcgtatttaaaatactgatcaccctgatataggactgtttctttcggaatagaattgtataatgcatatttgctgtatgaagtacaactaacagcaaatagtaaaaagtatgttaaggatacgttcatatatatccttaacatcccttttgtcataagaaaacctaataccatggacatgtgtttaccggtgggtttcctgttagatcttccggtttatctccgtcattgtcatcgtcaacttcagttccgccagaaattgattgtggctttggtacagtaataactacttcaggtatcgtcatagttctgtttccaccaatgattttagaaccaaatgttttggtgaatcctcccaactgcaattttttccgaaggttttcaattgatttttcttttttaataaataaaatatttaaaattatatgtcattattgacattttaaatttggtgatatttatttgtacaaaaaaaatattaacatagtttaacttttgtaaggtattgatttatagtttattgagttttttttattttgagaataatactttatgaatgcgatttttatttctaagcttcttatttgcaaattttcaaatggctgtctcttcaatttgaaataattttatcttatttttgcccgaacattcactaatacggacattcatggaattaaattataagctagaggaacaggattatttacaattgtatatgtatgctgcttctaaaaatcaggttataaagcagcagcgacaaagggttttatggcttctgattataatctacatcgtttgttcattgcttatgtttagtatgagtatggtttctttgtttgtttttatagcagctgctattactgttacgcttatttatatatattactatgaacgtaagcgctatgaaaagttttacttaaagaacataagaactaatcttaaaaacaggataggggttaactataaaactgtatttggccctcacgatattattctgacagagcctaatgctgaagcaaagtttaaatatgccaatatagaacttgtagaggaaattaatacctattatttttttaaaatgaaaaccggtgaaagattcattgtgcctaaaagtgctattcagaactctcaggaatttaatcagataatcagtagactgtctaaagattataatattcagttgtatcaggaactcaactggaagtggagataggaggttggttattggttgttagttgttagttgttaaatcgtgtaatcgtttaactgtttaattgtgtaaccgtgaaattttataatcagattaacgtatttacaagttagaaaattcattcatttatatactgctgaattttatgacagtattaatgaatttataaattgatatttatattttttcacttatttttgaattataatagattacattaaccagagatatggaattgaattataaagtaagtgaacaggattatttacaagtatatatgtatgctgctacaagaaatccaattataaaaaaacagcgtaaaaatgggctgataagaatgattgtttttagtataattggcttatgcttaatgtatagtactagtttaatttctttacttgtttattttctattcgtagtctttatattttgtttttattttttttattatgaacgtaagtactacgagacgttttatctgaaaaatataagaacaaatctaaaaaacaagatagggcttaatagtaaggttgtatttgggcttcatgatattattcttacagaaccaaatactgaatcaaaatttaattattccaatatagaacttattgaagaaataaaggattattattacttgaaaatgataacaggagagcgatttattttgcctaaaaacgcaatccaaaaccctaaagagtttaatgaggtcatcagcagactgactaaagataaccatattcctttgcagcaagaactcaattggaaatggagataggagattagttgttagttgttaaatcgtgtaatcgtttaactgtttaattgtgtaaccgtgaaattttataatcagattaacaaatttacaagttagcaaattaagaatactgcaaaactgccagatgtgtataagggcaaggaggtacatacctgggctttcctgaacaacgagaaaagtcctttacctcggcaaaattatattaacctaaacaaaagaccacccgaaagggtggttttgttttatatgtaaagaagttttgagaaaaataaaatcaaaacgttcaattagagacataaaaaagacgagttgccccgtcttgaatgttttcacaacggaataatccttattgtgaattgctttcatttacaaagctatgtaaataaaattaattttaaatacggaaaaccgtaaaaatgaataaaaaagtctttttatatttagtgtgtatttgaaatgaagacaattatggttaaaaatatacttggattagacttgggtaccaactcaattggttgggcgttgataaaacaagattttgaaaataatcagggcgatattctagggatgggaagccgtattattccaatgtcacaagatgttctaggggattttggaaaaggtaattctatttctcaaactgctgaacgtaccaaatacagaagtgtaaggagattgcgtgagcgttttttgttgcgaagggaaaggcttcatagggttctgaatgttttagattttttgcctgaacattatgcttcacaaattgattttaataaacgcttcggaaaattcaaagaggaaactgaacctaaattagtttataacaatgatggctttattttcaaaaaatcttttgaagaaatgattttggattttaaaactcatcagccacagctattagaaaataacaaaaaagttccatacgattggacaatttattatctgcgcaaaaaagctctttctcataaaatagaaaaagaagaattagcctggattcttttgaattttaatcaaaaacgtggatattatcaattgcgtggtgaagaagaggaagagaatccgaataaactcatagaattttattctttaaaaattgtagatgttttggcagacgagcctcaaaagggaaaatcagatatttggtattctttggttttagaaaatgactggatttacagacgctcgagcaaaatatcattactggattggaaaaataaaacaagagattttattgtaacgacagatttaaatgatgatggaagtattaaaaaggataaacatggtaatgaaaagcggagtttccgtgctccggatgaaaatgactggactttggttaaaaagaaaaccgaacaggaaatagatagctcgcataaaacagtcggtacctatatctacgaaactcttcttcaaaatccaaaacaaaaaatcaaaggaaagttggttcgtaccattgagcggaaattttataaagtggagttgaaacaaattctggaaaaacaaaaagagtttcatccggagctgagacaagatgatttatacagcgattgcgtccgcgaactctataaaaataatgaagcccatcaactgacattgagtaaaaaagattttgtacatctttttatggaggacattattttttatcagagaccattaaggagccagaaatcatccatttccaactgtactctggagtttagaaaatataaagatgaaaatggaacagaacatacacaatacctgaaagctattccaaaatccaatccatattatcaggaattccgtatctggcaatggatgtacaacctgaatatttacaaaaaggacgatgatacgaatgttacaaaggagtttttgaatagcaaagcagagtttgaaagtctgtttgagtttttaaacaatagaaaagaagttgaccaaaaagctttgctgaagcattttaagatcaatgataaaacgcatcgctggaagtatgtagaagataaaaaatatccttgcaacgaaaccaaaacgatgatttcagaaaggttaaaaaaagtagaaaatatttctgatgatttcctgacaagagaaatggagcagaaaatctggcatatcatctattctgtaaatgataaagttgaatatgaaaaggcattgaaatcttttgctgagaaaaataatctggatgaaagttctttctttgaagttttcaaaaagtttccaccttttaaaagtgaatacggtgctttttcagaaaaagccataaagaaattgttgcctttaatgcgattggggaaatactgggattatgctgatatagataagtgttcaaaagacagaatacaaaaaatcattaccggagaatacgatgaaaatattaaagacagagtaagagaaaaggctgttcatctcaccaaagaaaccgattttcagggtttacagttgtggttagcacaatatattgtttatggaaggcattcagaagcagcaatgttgggcaaatggaactccgctgacgatctggaagagtttctaaaagaatttaaacaacattcacttcgcaacccaattgtagaacaggtaattacagaaacacttcgtgtggtaaaagatatctgggtgaaatatggaaacggagctaaagatttctttaatgaaattcatattgaactgggtagagaaatgaaacttcctgctgaggatcggaagaaaatcaccagccagatttctgaaaacgagaatacaaatctccgcatcaaggcgttattagccgaaatgatggctgatagttctgttgaaaacgttcgtcctttttcgcctatgcagcaagagattttgaaaatctatgaagatggtgttttaaattctgatatcgaaatcgaagatgatattctaaaaatcagtaaaactgcacaaccttctccatctgatttaaaacgatacaaactctggctggaacagaaatacaaatcgccttacaccgggcagattataccattaaataagttatttacaccggaatatgagattgaacacattattccgcaaagccgttattttgatgatagctatagtaataaagtgatttgtgaatcggcagttaataaactgaaagataattatattgggcttgggtttattaagcaatttggaggaacaattgtagagtgcggaaacggaaaatcggtaacggttttaaaagaagatcaatatgaagattttgtaaagaaacattatgctaacaaccgaagtaaaagaaataaactgcttttggaagatatccctgaaaagatgattgatcggcagatgaatgatacacgttatatcagtaagtacatttcgggtgttctgtccaatattgtgagggtagaggatggttcggatgaaggaatcaattctaaaaatatagtgccggggaacggaaaaattacgacaaagcttaaacatgactgggggctgaatgatgtttggaatgatttgattttacctcgttttgaacgaatgaatcaactgactgattctacagattttactgcctggaatgaaaaccatcagaaatttttaccaacagttccggtagaattttcaaaaggattttcaaagaaaaggatagatcacagacatcatgccttagatgctttggtaatcgcttgtgctacgaaagatcacgttaatttacttaataatcaatcggctaaatcagatatgaaacgatatgatttgaaaaagaaattgatgaagtttgaaaaagtagcatataatcatccccaaaccggtgaaagaatagagcgcgaagttccgaaacagtttttgaaaccttgggaaacctttacgattaatgttaaaaatagtctggaaacaatcattgtaagctttaaacaaaaccttcgtgtgattaataaagctactaattattatgaaaaatatgtagaggccgatagtattaagaagaaagaaaaagtagagcagactggaacaaactgggcgataagaaaaccgatgcataaggagactgtttcagggaaaattgatttgccacgaataaaagttccgaaaggaaaaatattaacagctaccagaaaaagccttgatacctcttttaacctaaagacgatagaaagcattacagatacagggattcagaaaattctgaaaaaatatcttgaatacaaagataacaaccctgaattggcattttctcctgaaggaattgaggacatgaataaaaatattgaaaaatttaatgatggaaaagctcatcagcccattaccaaagttaggatttttgaattgggaagtaagtttgctttaggacaatccggaaacaaaaaggataaatatgtagaagcagctaaaggaaccaatttattttttgcggtttatgaagataaaaacggaaaaagaagttatgaaactattactttgaatgaagttattgaaagacaaaagcagggattgtctgttgtcgatttgaaagatgttaatgatttttatctctctcctaatgatttggtatatattccatcagaagatgaattagagaatatttcaatgatagattataataagctttccaatgaaagagtatataaagtggtaagttttacaggtaatcagattttctttgtgagacataatgttgctatttctatagttaataaggccgaattttcaactttaaacaagatggaacgagcaattggaggtactatgattaaggaaacatgtgttaaaataaaaactgaccgtttaggaaatatttcaaaagtatagtttttatgatcacccgttccatttacattggtaaccctgcttatcttaaactcaaagacgagcagatgtatattctatgtcctgaaaccaaagaactaaaaggtaaagttccggtagaagatttagggttgctgatgctagatcattttcagattacgatttctcatcaacttattcagaaaatgatgggaaacaatgtagtagtggtcagttgtgatggtcatcatttaccacacggaatgatgcttccattatatggacatactgaacattcagatcgggtaaaagaccagttggaagtcagtgaaccccttaaaaaacaactttggaaacaaaccgtggaatgtaaaattgaaaatcaaaaagaagtgttgagacgttcaggaaactattatgaaccaatgacagattatcaaaataatgtaaaaagcggtgatattaccaatatggaaggtattgcagctcaacattactggaaatatcttattggtaatggttttttacgggaaagatttggagactctcctaatcagtttttcaattttggctattcggttttgcgtagtatggttgccagggctattgttgaaaccggcttattgcctgttttgggtattttccataaaaataagtacaatccatactgtcttgcagatgatttaatggaaccgtatcggccgtttgtggatgtattggtaatgcaatggctaaaggtcaacccggaagcagaagagctgaccaaagaatttaaagcatatcttctgcaaatcgctactaaagatgtaaagattgatggaaagaccagacctttgctggtggctgtaaaaacaacagcatcatcactatataaatgttatacaggagagaaacgtttgattgcttatcctgagctgatatgaaagctgaaaggtttaatgcttaccggattatgtgggttttagtactttatgatttaccaaccgagacaaaggaaaatatgcgggatgctaatttgtttcgtaaacgtctgttagatgatggcttttcactttttcagttttcaatgtatattcgccattgccccagtagagaaaacgcagaggtccacataaaaagggtaaaagtcatgctgcctaaagctggcaaagttgccatcatgtgcattaccgacaaacagtttggtgatattgaaattttcttcgccagaaataaagaagaaccaccgccgacatttcaacagttggaattattctgatttttaaattctaaaaaatgataaaatccgttgattttcaacggattaaattttgaggttgtgttatatcacaaagatattcaaaattgaaagcaattcacaacggaaatcattaaagtgtaaaaatgagtcttgttgtgttatatcacaaagatattcaaaattgaaagcaattcacaacatcattttgtctatatctccattgaaatatgttgtgttatatcacaaagatattcaaaattgaaagcaattcacaacagtaggtaagcgtaaatattcatatggttggttgtgttatatcacaaagatattcaaaattgaaagcaattcacaactggaacagagtttatattaaaatcttcagggttgtgttatatcacaaagatattcaaaattgaaagcaattcacaacgtagcttaaagggttcgttattctgtttaagttgtgttatatcacaaagatattcaaaattgaaagcaattcacaactacaacaaaaagaaagatatatgaaaacttgttgtgttatatcacaaagatattcaaaattgaaagcttacaataaattaaggtgttttttgattgtaaattagatttacataatgagccttttgtagttaaccctgtttaatcgataaagatcattataaaaaacaaaacctttcagtactcctgaaaggttttttgtatggtttaggtttttcattttaatcatgcatttcactttcgacatagccttcatcttcgatctggaaggtagtatggctaattttgaaattgctggtggcctgatcggtgagtatccgaagcatttgattgtgcggaatgctctgatcagagacaacatgggcactcatagcgttgataccagaggttagcgaccatacatggagatcgtgcaggcttttaacacccggaactttttccatggtactgcgtaattcattaatatctacatctttgggagtaccttccaataatacatgaatagcttccatcagaagtcgccatgttcttgggaagatcagtaaaccaatacctgctgagattagcggatctgcatagtaccagcccgtggtcagcataaccacaccggcaatcattaccccgacagaggtcagcatatccgataatacttcaaagtaggcacccttcatattcaggctgtctccggagctttttctaagaatcatcatcccggcaatattcactaaaagtccgattccggctacgataagcatggctttgctctgtacctccggcgggttcaggaagcgctgataagcttcgtaaagcacataaacggaaattcctaaaaggacaacagcattgattactgcggctaatatctcggtacggtaatagccaaaagttttggaagatgtcgcttttcgttcaccaattcggatggcaatataagccagtaagagtcctacaacatcagtaagcatgtgtgctgcatcggctaacagggccaaactattggtgataattccaccaatgacttcagcgatcaggtaaagaccactgaaggaaagtacaatcagtaagttttttttgtgcttactggaggctgaggctgtttgtatattcgtttcactcatggtattggggattacatttcgtagtataacggatttctctttttctgaggcacattttgctctccagtcatttccctcaggttgatttctatggtctgtgccagtgaagtcattggggtatctacaggagtattttcaaacggatcctgcatgataatagctgttttttcaatagcgataaagagggtagggatcaggatagtgattccaatttctatgattaacaaagaaagctgagaatcgtcgaacccaaatggcagaatggtagcgaatacatagataaggctatgtaccaaaatactgtaagaacgtggaaataccgtgtttttgattctttcacattttcccatgctgtcgcataaacgtgctaatgtttcattcaactgtataagtctgaactcgctaattagtcctttgtctgccaattgctttagctgcaaagaatgttcatccagtaatgcattgggaatattagcagcttctattctgtgatccataagataatcctgaacacgatccgagaaagggagctttctgagggattcaccaagagcatagttccagataatctgacgctgtgcaaattcccggataatagcttcacttcctgagggaagtgcctgggtaatctgacgtataaatgtgcgggaatcgttgacaatagcgccccatactgttcgggcttcccaccatctttcgtaggattgtgaaatccggaaggccagcaagagagatacagctgtaccaaccaatgcaggaatggtaagaggaagtgaaattttctgaaaagctggaagcaaatctaaaataccaatagcgactgcaaacatggagatcagtaataactgggatttaattaaattaatgaaataccagatggatattttcttttttagtagcatagtgtatttgtaattgtttgtgatgtataaaataaaaaggtgttttttttatgaaaaatgtcagtccgggattttaatggaaatgacgataaatgataattatagcgtaataattaataatactaaacaatataaaattaaacttctgaaaccatattcaattataaaaatgattcaaagtattacacctctggtttaccccggactgacgtgtttacattagcgtgtgtgtttttgggttaatgtaaatttattttaatgttcgtgctcgccaacattggtaagcttagcattgacaaagaaggctccttttactacaactttagcatcaggagcaagttgtcctacaggcgttattgccgtatagcccatgtcggatgttccttttataacctctactttttcgaagttgatggttcttgcatgtgacttttcagcaggagtagtttcttttttatcttttgattctgcttcctcatgagcttccggttttttgtctgtttgtataaagacatagaatttaccatcagcttctacaattgcttcggttggaatagcaggtgtagtgctgtgatccagacttaccactccggtaatattcatcccgtcgataagcccggtcttgttaccgattacagtacagtgtaccgcaattgttttgctttcgttctcaaaggaagatccaatgctgtataccttagcatcatattctgtttcaggattattagtaagtttgaagtgtacaatctgaccaatacgcattcttggcaggtctttttcaaatacctgtaaatccaggtgaagcgaagtgttgtctataatttcggctacgggagcggatacatctacatagctgccaatctgtgctctgatattgctaattgtcccgctgattggagcggtaatagccaaacctgttctcatacttgcattggtaacagaagccggattaatacccatcatttgtagttgtcgggctaaagaagctttttgggtagacaatgttctgagttcggaagaagaactctgcaggttctttttggttcccgcatcgtttttatacaactcgttctgtcttttaaattcctgttcggcaaaagcaattctgctgatggtggtaaggtactgctcctgtacgcggatgtattccggattggtaatggtggcaataacctgacctttgcgaacatagtcaccctcaagaatattaagtgtttttacaaccccgctgaaaagagcagctacagttgctttattgttattgggaacacgaagcagaccattggcttttacagtagccgttagttccttcatttctattggacctgtagtaacgccgactgactgtatctggtcttcggtaagactggcaatagtaggtgctgcctcttcatggtccttagctttagccgtctgttcggttttagcctcgggagcggcttcttttttgccacagctggtgaagattaaagaagcggttatcaggtagattatggtttgtttcagtttcattttattgattaattatagaattaataataaccacagattggtttacttgctgtatggattccagatatttcagctggatattggttgatgtctgcagagcgaaaaggtattctacataagaaatatctccggtgcggtaaccgagttgtgcggctttagcaattttttcggcattaggaatggcctgttgcacataataattgtactgatccacatcctgtcggtattgccgcatagcagtgtcgaactgtgtagtcagctgttgctgttgcagcttggcgttgttttctgcagcctgcctttggtattccagtgattgtattctggctttggtagcgccaaaggtaagtggaatgcttacaccaacgtttaccgaattaaaacggttccagccattgtagtatttttcaccaccattattggttgggtgcatacccgtaagggactggctggtaacgcctaatgtgaattccggtaagccctgagctttttctatttttttgtttttctcagcaatttccatttcctgataaaaagctcttaccgatggattattggcaattacactactgtccagtacatagtctatttttaaagggagatactcctctttaggagctacttctatagattctgaagtgtttagtaaggttttcagattcttgtaagcattgtccagatagacctggttttgtttaagtaataggttaatttctcccttttgagtctctgcagtactgatttcaattttcttgatatcgccggcattataccttacagtagcaatacggatgaaatcctgatagaggttatccagactctccagtttggttttgttaaactgaagatattcaatctggtaataataagatctcacctgtctcaataattcatttatagagacttctttctcaatctctctgcttttgatgttggattctatcagctcctttcttgccttgaagattgtagggaagggtacagtctgagagatcgcaaatgaattatcgaatttcggactattgtagctgccaagctgtgcagatacacttagctgtggaagctctttggctgtaggtcttagtgctttggaggtcataatattcaggtccttagacttcatcaacaggttgttttcaacagccatttgtgtggcttgctgaatatcgatggttctggtctgggctttcagaccttgtcctgccaatcctgataacataatgaatagtacaactacagtagtcttagttttcatctttagaatacgaccctttactttttcactgaaaataatatataacatagggagtacaaatagggtaaggaaggttgctgtaatcagtccgccgataactacagtggccagtggtttttgtacttcagcacctgccccggtagatatagccattggtaaaaaaccgatagaagccacggtagcggtcatcagaaccggacgcagtctggttttggttccttcaataactcttttcagaacatcggtttcaccttcttttttcagctggttaaaggtgcctataagaacaataccattaagcactgcaacaccaaacaaggcaataaatccgattccggcactgatgctgaaaggcattccccgaaccagaagggcaaatacaccaccaatagcactcatcgggatcgctgtaaatattaaagcagcctgtttgaaagagtggaaggtgaagtacaataacatgaaaattaaaagtaatgagataggtacagctatcatcagtctgtcgctggcttctttaaggttctcgaactgacctccatacgtgaagtaataaccggatggcagttttatttctttatccagtttttgctgaatatcttttaccacgctggcaacgtctcgaccgctgacattaaatccgattacaattcttcgttttccgtcttcacggcttatctgtgctgcacctaatttgtaatcgatgttggccacctgtgaaagcggaatttgcaaaccggattttgtagagatcatcaggttgttgacatcgtctatattagtacggcgaaggctgtccaaacgtacaacaagatcgaatcgtctctcgttttcgtagacctgtccggcagctttaccggcaaaggcggtactcaggacatcgttgacatcctgaatgctgagtccgtagttggccatacgtgtacgatcgtattgtacattgatctgtggcaggccgcttactctttcgatctgaggagcggtagctccgggaactgtttgaataactttgcctactttatcggcatatacagcaagggaatccaggttttcaccaaatatcttgaccgctacatcctggcggatacctgtcatgagttcgttgaagcgcatttggataggctggttcttttcaaagaatacacccggaatattttccagtttctcactgatctcatcagccagttcatcataagattttttagttttccattcgctttgtggtttcagaaccacaatcatatctgtggcctcaggcggcatggggtcagtagggacttcggcagcaccggtttttccgactaccatttttacttcatcgaagcttttgatgattcgcgatgcctgcatagaggtttcgatactctggctgagtgaacttccctgcggaagaatacagtggtaagcaaagtcaccttcctgcagctgaggtataaactcgccacccatatttttaaagatgataagtgtaccaaagaatataaaagctgtacctgctaccagccagtattttattttaattgctttcaatagtaaaggctgataaatactttgtagtttattcatcatcttatcagagaaagtttctttgtgggaaatcttcttagacaggaacaaagcactcatcatcgggatatatgtcaaagagaggattagtgcacccagaatagcaaaacctactgttttagccattggtgtaaacattttaccttccacacctgcaagggtaagaattgggatatatacgataaggataataatctcgccaaaggcagcactgcttctgatcttggaagccgaaaggaatacctcttcgtccatttctttttgggtaagcctgttgacagattttctgagaccgaggtggtggagtgtagcctctacaataataacggcaccatctacaataaggccgaagtctatcgctccaaggctcatcaggttggcactaacgccaaaaacattcatcattcctaatgcaaacaacagagacaacggaatagcagaagctacaataagtccggctctgaggtttccaaggaatacaaccagtacgaaaattacaataagagctccttcaataagattcttctccacagtgcctattgctctttctaccagatctgtacgatccaggaatggttctataacaacgtcatccggaagagacttctgaatggtcgggattttagcttttacattgtttacgacttcgttactgttagcgcctttcagcatcataacaataccacctacagcatctacttttccgttgtaggttaaagcaccataacgtacagcgctgccaaagcgtacatcggcaacgtcctttataaagatgggtacactgccggtttcgtcttttacggctatatttttaacatcatccagtgatgtaacaagaccaataccacggatgaaataggcattaggttttttgtcgatataagcacctccggtattctggttgttcttttccagtgcattgaagatgtcggtaacactaatgcccattgcccgcaaacggttagggtctatggctacttcatattgctttagttcaccaccaaagctgttgatttctgctacgccgggtgttccgtttagttgtctgcggacaatccagtcctgcatggtacgaaggtccttggcgctgtattttttctcgcttcctttttttgggtgcagaatatactggtatatttcccccagtcctgtacttacaggagccagttcgggagttcccactcctttcggaatttcttcggaagctgtttttagtctttcgcttataagctgtcgggcgaaatagatgtctacattttcgttaaatacaacagtaataacagacagtccaaagcgtgaaatacttcttgtttcgtgtatgcccggtacattggcaatactttgttctatagggaaggttacaagttgttctacttcctgacctgcaagagtaggacttacagtaataatctgtacctgattattggtgatatccggtacggcatctatcggaagctttgtagcgctccataccccccagatcaccagtaagagtgtcataataccaataacaattttgttattgatactaaatttgatgattttatctaacacggattataatttaatttttaatgatttaacgtccgcagtatcagtttcaaacctgagtatgaaagttgactgatggtactgcaaagattcaacagaatgaccgtgcaacactattgcaaagtttctgtagcaattcctgatggccacaaaatggccattaaatgattaaaaattaaattttgggaggttgccagattccgtaggtgatatcgaatgctgacataacaggtgaactaacgattttgtcgtaatataccggtgaaacggtactgatgctgagagcagcaaagttggttgctgtaatgtgcataccgcagcatgaacatgtacaaaacggtgaacataaatcgctatggtgatcgtcctgagaatg

SEQ ID NO: 1236 - DNA, 24290 bp, synthetic construct
  source 1..24290: mol_type = other DNA
  misc_feature 1..24290: note = Synthetic
acatgaatatgaaaaagaccatatcaataattacatttctaatgattgcttggtttcaggcacagaatttaacaataactgaaaattatgtctataacaggacatatcttgaagccgtaacatcagaacaacccggtgctaaacagttacaaagtattcaatattttgacggtttaggaaggccaaaacaaaataccgccattaaagcttctccttcgggaaaagatattgttatcccttcggtttttgataatgatgggaaacaaacgaaattgtatttacccttacctacagattctcaaaacggagctttccttaccgcagctacagaaaatgctgtgaatacctactatggtgttagtaatgcattctctgaggtgaaagttgaaaaatcaccattagcaagaattgaaaaatcagcatcttcgggtccagactggcaaatagggggaaaccacacccgaaaaacagaataccttctaaatactgtaaatgaagtaaaaagatttagatcggtttctacatggaatacttcaacacaaattaatgatgtgtctgttaccattgcttctgacgatacatatacctccaatgggtattataatgctaacatattgttcaagtttgttacaaaagatgaagatgataatgaaacgcatacgtatacgaacgataaaaatcaaaatatactagtaagaaaaatcaataagaaatcggacggaagtatagaaaactttgatacttactatgtgtatgacgagtatgggaacatttcattaattattcctcctaaagctgcaatttcccctttaacatcaattttagcagatcaattatgctatcagtataaatatgataaatacaataggctggtggaagttaaactgcctggaaaagactgggaatatatggtctatgacaaccagaacagattggttgccactcaagatgggaatctaagagcaaaaggtcagtgggtatattcgaaatatgatcaattcgggagaattgctttttctggaatagcgacaggttcttcaagaactactgagcaatcagctgctaattcctttggaataaataatgttaaaaggaccgattttgtatctttcaacatgcaaggtttggatgtgtactatgaccataatggtacctatcctggaaatatcggggttaccttattgtctgttaattattatgatacttatcctggtgggtctcccattcaaccgacacagattcaaaatcaaactaccttatcttcctcgcctgcaactattgcttcaaatggctttgcatctatcaggagcaccaaagcatttccaactgttagttatatcaaaaatattgagaacgataactggtcttcttctgttatttggtacgatactttgggaagacccataggtacttatggaaaaaaccatttgggtggttttactaaaactgaaagcgtacttgactttgcaggaaacgcaactgaagtcaatacttatcattccaaaaatacctccgcaactgaggttacggtaaaggacaggtttgtttacacgcaacagaattatttatcaaaacattatcagcagatcaattccaatgccgaagaactgcttgctgagtatacttataacgatcttggacagcttatcaatagaaaaacgggtaataatcttcaaagcgtagactatgtttacaatatcaagggttggctgaccaaagtcaatgatccggcgaacctgaatgggaaacttttcggatatgaactaaaatataccaatcctatttatcccggctattcctcaccaagatataacggtaatattgcacaggtagattgggcgactggaaatgatggtgtgttaagaagatattcttatcagtatgatgctttaaacagattagtggatgctaattactcagaaacgactagtactgttccaataaatgagttttttagtgaatctgtggcatatgattttaatgggaatattactaatttctatcgtaactcgaaaggtttaaatggaacggcagaacaaattgacaggcttgaatatagttatgatggaaacaggttgaaattcgtaaaagatgcaagtcacaatatttctggttatccagatgggggaaactttatctcttacgatgctaatggtaatatgaccaatcatgttgataaaggttatactgggatcatttataatttcctgaatcttccttcaaaattcactcataccaataaagctcttgctactaattatatctatgctgccgatggaactaaaatgcagatgagcaatggagcggcggtgagtgattacttggggaattttcaatatacaagtacatccggagcaattacctcgtctgttttatctaatgaagaaggttatttcgattttatcaacaacaggtacgtatatcaatacaaagatcacttaggaaatatcagaatttcttacacaaaaggtagtgatggcaagcctgttatattggaagagaataattattatgctttcggcttaaaacactcaggatataatacaggagatacaactaacaataattttaaatatctttataacggaaaagaattgcaaaccaatggtaatttagattacggttggaggcagtatatgccggatttagggagatggaatgggattgaccagctttctgaaaaattccattttaccagcccatacgcctatgttagtaacaacccgatttctaacatagaccctgacggaaggaatatatataagacagcctctggatgggaagttactggtagcgatatttcatcggttagtgcttattttgataatggaggcacactaaaggatttggatacagcattcaattcatggttagatggtggaggctcattattaggtaacactggtggattttggaatgattttgatgagactattccgcttcctgaagttatcattaaagcaaaagggaacaagcataactggaatttaggagaaaattacctggttaatatgcttgccatgaggatggcattcaatcaagctattgctgggtggaactattcaaatggcgcgacgacttttgatccgatgacgtgggtaagaaatgatgggcctattaggtatattgggggtgcaggtgatccttggggaatttgggaagtagcgggaattgctgcctcatcttcggacaaatcagaaatgaatttggcagctataccattattggtgctgacaagaaatggcgatgatgcactgaagatattagctgcagagaaaggctctttaaaaatgccctatagcaaaagtaggccatcatatgctaaagggcaagtagatgaggtttgggaagcggcaaaacagaaaaatggtaaagtttacgatccaaatacaggggaagaacttatatgggataaaacagtaaaacctagatcatgggatatgggacatttaccaggacatgaatacagaacattgcatgaaaaatacatgagtggaaaaataacaaaagcagagtttttaaaagaatatagagaccctaaaaattatcaaccagaatcaaaatcagcaaatagaagtcataaatatgaacaaaaatagtataaatgaagtttttcatatggtcgatcttaataatttggaagacttaagaaaaattgtagatgagagtaatgtcaatctttttgtaaatgagtttgaacaaaatcttttacatatggcgattacaagaaactctaccgaggtatttgattaccttttatattgtgatatagatgtaaacaaattggataaagacggcaaaactccattacattatagtacagcttatagtaactatgattttacaaaaaaattattagaatctacaggtattgaaaaagatataagagatcaatatggtaataatcccatgtgggttgcagtttttaattctcgcggatcctatgatgtagttaaattattaatggagcacaaagctgatgcaaaatctaaaaataatagtggtagatctgctttagattttgcaaaacaaattgaagatgaggaattaatagaaattcttgagtcctaatgattaacaattaaaacttaagaaggtatccttttgagataccttcttttagaagctttctccaaaaagcatatacaatttaaataatatggtatcctatgaaggaattgaaataaatgtaaatgataacatttatctggaaactaaagggataaattcttatttagataaggaaattagggtttctattggtaaccaacaccaagatgattatatagatgttattaaatatataatagattacattattgaaaacaaacctattatttctgaaaatcagaatataggatattattcatggcttttgcaatttcgattagaaaataaaaactattttgatctttatgaagtaaattccgatgggaatgattttaataaaggctgtgatatagcaatttcaatcactagaagtcaatctgaattatgttcacattatggcctgcctgctcaatttcctaattttaatcagatgattgttatttctgatggagtttatgagggaaaagatattgaaggaatcagatatgagtcgcctgaacatatgtcaggatggtggttaattactgatgattatgataataatattgaatctttaaagacagttcattttcaccatgtagtttttacccgaccggatattttaaaatatttgtctttgccatttggttatagatttttaatgcaaaacggaaatgttgaagtatataaaaatgacgaataatagttagaagattatatctatctttcaaaaaaagaaaaaatctgattcacaaacaattatagaacctccactagtttggaggtttttttataaccatttcaattttaaaggctttactacagtattgctaaaatattttttatacgacatcctttgtcgcattagcttattaatttagtgtctgctaactaagtcactattttaaaatgaaatacaatggaaggtacaaaatatcaaaaagaagttgaagaattaaaaatggaattatttggatataaagtattatcctatgaagttgatttggttggagggttggaaaaatctatgaacatggttttccaaaaacttaataaagcttttgagtttaatagccctattgcggaggatgaaatattacagttaggaaatgatattcagcgtagagccgttgagatattttcactttcttcacaagaaatgaaggtatttgaaacttttaaatatgcattaaacccggaagataaaacgatttactttcaaagtaaatgcatattggaggtactttcaaactatttattatccattgaatccaaattggattttgatgataatgacccaatttttgaccttttacattacctgtataattccaatattgaagatgataaagaagaggctttaaatatcctgattgaatttaatctaaaattatatggttttatcatatacagggattatttaaaaatcatagggtttctaaacaatgattttttaatttcccctcatgacaaccatatcccgatcaggattgcgatgttggattccctcaaccttatcagtgagcttaataacagcgttcccaacaaagaaaatatttacaggattattcatgctattgtaggaggaaatgaagacaacgtaaaaaaatattgtctgtcattaattggtaaaaatagtttgtcacaaaagcagatcaccaaaaagcacaaagagtttgcacaaaaatatattaatgaaaagaagatataataaagactaggtattatttatcatcatctattatgatttatttttatcttgtattaagatttaaattattgaaaaatggatgtaacaattgataaaaaaatattggatgatttggaaaaaggtttttttataaatacaatattgtcttatgagccatatcttattcataatttggaaacaagtattaatgtacaatttgaagatttttacaatatttttgaaagtcaagtcccccttataagtgaaggcgatgattttgatgttatagaaaaccaacaattttatttaaatacattttctctgaatgattatttagatgtctttaataactttgaatatgcgataaatactaaaaataaaaaaatatactttgcaagcagtgatattttagaaattttctcaaaatttttagtaaaggttaaaggtgagttaacatttacagaaaacgatcctgtatttgattttgcatattataattttcatcctgacgcagaagaatacagacaggcaactgttaaaataattatagattttggattgaaattaaatggctttttactttaccgagattttgaaattatttttaaacagataaataaagagttgataattcagcccaatgataaccatatcccaattagaattgccatattggattccttaaaccttatcaatgaccttaataataatgtccccaataaagaaaatatctacaggattattcatgctattgttggaggaaatgaagacaatgtgaaaaaatattgtttgtcattaattggtaaaaatagtttgtcacaaaagcagatcaccaaaaagcacaaagaatttgcacaaaaatatattaatgaaaagaaattctgatttaattaaaatagaccccaactgtaccctaagcatacccctaaagagtaaaatacggtaagcatattttaaacctttgtattgtgaaacaaacaaaaatcacaatacaatggaatctattaattttatcggggttgagcctgaaaacctcatcaatgaaatcgtaagtaaggtaaaagaatccttgcttacagacttagaaaaaactttcaaggaaaaagagccgaaacgctatctttccgcagatgacatctgcgaacgcttcggagtatcaaaacccaccatccatgagtggcgtaaacgcggaattctgaaatcctataaactcggttccagggtttattacagattggatgagatagaaaatgcaatgattgttaacgattaaattttctatcatgccaatctctaacaacaattaccgaactattatatacaagttagatgaggtcaaaaagacctttcgacagtataaaatacaggatgacatacaaccaactatagaaagccattttctgcctgaattgcttcgtgttgaaaagaataacgggtacaatacctttagcgggtttaacaaccttttacagctccgtgatgtctccaattggtctttatgcacaagacaaggtttaaaacctaccggaatcaatcatttctatagcacagacttatttatagaaaatgacagactgttatgtattctctactatccaaaagaaggtcaaatcattgaattaaatgttttccgggaattttacccatgtaagaaatcaggaattccggaaagagtaagagaaattactcaaagtatagcccataaaaaagagatataaaacttatatccctttcgttgttcaaacttgacaaagatgagaatcttttgtctttacaaagacaagaaaatatgccgaccgactttgtaaaatttcaatatatggataagaattatgagcttcccacggataagaccgattttattatttccgtgaataatgagacaggagagaccgatgataaaaaagagggtaaatattttggtatgcagatcattaaatattcctcaggtcgtgtgatgattaagggaagcattcacaaattttttaaccgtaccgattttaacggaaacgattttgatatgcaaaacctttccattgcactcaaagaccttgaaacagaaataggcttaaaacctgaatactgcaaactggaaaatatcgaaataggagtgaatatacaattaccattcaatcccaataagatattacaaaacttactctttcaccgatccgtagaatttaataaaaccatttccggagctttttattaccaatcggcaaagagagactatattgttaaaatatacaataaaacagcacagtatgaaaagaaactaaagaagtattccgagaatcaaagctttatgaaacctgacgaaaagaagcagtttacgttattcaaaaagacagtaaacgaacatttacaacccaataccttacgatttgagttgaagtttttaaaaatgaatgtgttgaatgatctgggtattgtatatctatcagaccttataaaacctgaaatggtggatacattcaaaaacctattattaaaagaatttgaggaagtctatttctatgactacactaccgatgaaaccaacatgaaaaaaacagaaataaacaagctcaaagattaccggaatcctaattactgggtcaacctcaacaaaaaagataaatattaccacaagagaaagtttcaggaaatgacattgaaatattctcaaaatataaaagcaaaagttttggaactgataaaacagaaaatagaaaagatgagagaaaaaagtttagacttttcgaccgacaattttacagaaaatggaaaacggaaatttagacttttcgaccgttcagatatagggtcaaaaagtccaaaattaaccacttaaaactaagagagatgaaaaagatagtttcaacgaaaaataaggctcaaaatgcagatattgagaattgtgatttattaaaaaataggcaggaaaatgaaaaagatagtaaaggaggcaacagagaaaaaaaacaggaagaacaggaatttgaagtaaagatgttggaaattgattttgtagaattagatatgagttttttggatatattagatattgaagttgacttatatgaattggaaataacagagttgattttagaaatgccggaaatagatttagattttcccgaatttgaaatactggattttgacctgtttactgatgaatagagaggttttaaaagtaaacataccgtatttaacagatgtcgtttctggatatattttaaaacgcttgtaagtgctataaacaaagggtttgcaatgaaaacaagctaaagtaggtgtaaagttccttaataatttaggttattaatttgaattgaaaaagaaaacgcaaaattaagcagaacaaatataaatactaatagaaactaacatttaaaagttaaaattatgggaagatggagcaattgccctgatgaagtcgaaagcttgaaaaatattacaattaatgatttaaaaaaattgtgttacttgcaacctaatgtgtacctcaacagaaatattttctggacgaaccagataggagagagaacaagttctattaccattgtaatagatacttccgataccgatggttacattacttttgattatacttacaaccaatcacaaaagatcaattataaagttcgcttaattacccgtccttccaatttaggaaatggtttgttatggttttttgtttgtcccagtacacaaaaagtttgcaggaaattacatcttaacagcggatactttctacaccggacagcatttaatggtgtctattatgaaaaacagttacagtctaagaaatggagagaatgggaaaggatgtttggttctttcttagatgataagatctatgaagaaatgaataaaaagcattttaagaaatattataaaggtaagccaacaaaaaaatatctacaactcatgaagaaaattaattccagaaaagtcgtcaattttgaagatattgagaaagctttattgttgtaagatttgttttatagcagtttatcagatttggttgtataggaatgtaaggaatttaaagaaaaatgccccgaagatagtcgaggcgctaaatgttttcacaacggaataatccttattgtgaattgctttcaaaaatttataattcaaatataacgaaatccattttacatatcaataaggaaaaccgtaatttaaatattttttttctgcttatttttatgtgtttacaaaactacaattgctatgattaaaaatatacttggattagacttaggtacaaattcaatcggttgggcactagttcggcaggattttgaaaataaattaggtgaaattcttggaatgggaagcaggattattcctatgtctcaggatattttgggagaatttggaaaaggtaattctgtttctcaaaccgcagaacgtacaggctacagaagtgtaagaaggttgcgtgaaagatttttattacgtagagaaagacttcacagggttttgaatgtcttaggctttttgccagaacattacgctttacagattgattttgaaaatagatttggtaagtttagagccgaaacagagcctaaattggtttatgatgatgagggatttatttttaaaaattcctttgaagaaatgctctcagatttcaaaaaacatcaacctaggcttttagaaaataacaggaaaattccttatgattggacaatttattatctccgaaaaaaggcacttactcaaaaaattgagaaagaagaactagtctggattcttttgaactttaatcagaagcgtggttattaccagttgagaggtgaagaggaagaagagaaccctaataaattagtggaattttattctttaaaaattatagatgttttagccgatgaacctcaaagaggaaaaccggatatttggtattcactgattttagaaaacggatggatttacagacgatcgagtaaaattcctttatttgattggaaagataagataaaagattttattgtaactattgatttaagtgatgatggaagcattaaaaaggatagagaaggaaatgagaaaaggagttttcgagcaccaagtgaaaatgattggacacttgtaaaaaagaaaacagagcaggaaatcgaccaatcgcataaaactgttggaacatatatttatgaaactttgcttcaaaatcccaagcaaaaaattaaaggaaaactagttcgtacaattgaaagaaaattctatagaactgaactcaaacaaattctggaaaaacagaaagagtttcatccggaattacaaaatgatgatttatataatgattgcgtgagagaattataccgcaataatgaaactcatcaactgacattgagcaaaaaagattttgttcacttatttttgaatgatattattttttaccaaagacctttaaaaagtcagaaatcttctatttccaactgtactcttgaattcagaaaatataaagatgaaaataaagtagatcagacacaatatttgaaaactattccaaaatcaaatccatattatcaggaatttcgtatttggcagtgggtgtttaatttgaatatttacaaaaaagatgatgatacgaatgtaactaaagaatttttaagaaatattcaagactatgaaactctgtttggcttcttaaataacaggaaagaggtggatcaaaaagcattgttaaaacactttaaattaaatgaaaaaacacatcgttggaattatgtagaagacaaaaagtacccctgtaatgaaaccaaaacaatgattttgacgaggttggaaaaagttgaaaattgtttggttaatttcctgacaagagaaatggaacaaagtatatggcacattatctattccgtcaatgataaaacagaatatgaaaaagcattaaaatcatttgccagaagaaataatttagatgaaagttcattttttgaagcctttagaaaattcccgccattcaaaagtgaatatggttctttttcagaaaaagcgattaagaaattgctgccaataatgcgtttgggaaaatattggaattgggaaaatattgatgaaaaatctcaagaaagaattggaaaaattatcacaggagaatttgatgagaatatcaaagataaagtcagggaaaaagtattacatcttacgaatgaaaaacattttcagggtttgccattatggttgactcaatatatagtttacggacgtcattcggaagcttcagttttaggaaaatggaattctgcagatgatttagaagagttcctaaaagaatttaaacaacattcgcttcgtaatccaattgtagagcaagtgattaccgaaaccttacgcgttgtaaaagatatttggttgaaatatgggaacggagcaaaagatttctttaatgaaattcatattgagttaggaagagaaatgaagcttcccgctgaggaaagagaaaaactaactcgacaaatttctgaaaatgaaaataccagtcttcgaattaaagctttattagctgaaatgatgaatgataatgaagtcgaaaatgttcgtcctttttctccgatgcaacaggaaattcttaaaatttatgaagagggggttttaaattctgatattgaaattgaagatgaatatttaaaaatcagtaaaacagcacagccttcttcatccgatttaaagcgttataagctttggctcgagcagaaataccgctcaccctatacaggagaaattattccgttaaacaaattatttactcctgaatacgagattgagcatattatccctcaaagccgttattttgatgatagtttcagtaataaaattatatgtgaatcagcagttaataaattgaaagataatcacattggtcttggttttattaaacagtttcacggaacaactgtagaatgcggtttgggaaggaatgtaagaatttttgaagtagaagcctatgaagattttgtaaagaaacactacgctaaaaaccgtagtaagagaacaaaacttcttttagaggaaattcctgaaaaaatgattgaacgccagttgaatgatacaagatacatcagcaaatatatttcaggagtactttctaatattgttagaatagaagacggaacagatgaaggagtaaattctaaaaatattgttccgggaaatggaaaaatcacaacacaattgaaacaagattggggattgagtgatgtctggaatgaattaatacttccacgttttgaaagaatgaaccaattgaccaattcaagtgattttacagtatggagtaaaaatcatcagaaattcttacctacagttccagttgaattttcaaaaggattctctaaaaaaaggatagatcaccgacatcatgcaatggatgctttggtaattgcatgtgcaacaaaagatcatattaaccttctaaataatcaatcagcaaaatcagataccaaaagatacgatttaaagagaaagctgatgaaatttgaaaaggtagtttataatcatcctcaaaccgacgaaaaagttgaaaaagatgttcctaaacaatttttgaaaccttggaataacttttctgttgatgcgaaaaacaaattggaaacaattattgtaagctttaagcaaaatttgcgtgttattaataaagctactaataattatgaaaaatggattgaaaaaaatggcgttaaaacaaaagaactggtaaagcaaaaagggataaattgggcgatacgaaaaccaatgcataaagaaactgtttcaggaaaagttgatttatcatgggttaaagttccgaaaggcaaaatattaacggcgacaagaaaaagtgtagattcttcatttgacctgaaaacaattgcttcaattaccgatacagggattcagaagattctgaaaaattatttggagtttaaaggcagtcctgaattagcattttctccggaaggaattgaggatatgaacagaaatatcgaaaaatttaatgaaggtaaaccacatcaacctattaataaagtcagaatttttgagcttggaagtaaatttcccgtaggacaaacagggaataaaaaaaataaatatgtagaggctgccaaaggaacaaatctgttttttgctgtatatgaaaataaaaacgggaaaagaagttatgaaacaattccattaaatgaagtaattgaaagacaaaaacaaggtttggattctgttctatttaaaagtaaagaagacttcttactatgcccaaatgatttagtttatattccttcaggcgatgaggttgaaaatgtgtataatatagattttgagaattttacgaagcaaaaaatggcaaatatttataaagtggttagcttttctggaagtcagatattttttattcagcagaatgtttctgtatcaattgtaaataaaaccgaattttccactttaaataaaatggaaaggtcgattgatggattaatgattaaagataattgtgttaagttgaaaatagatcgtttaggtaatattttaaaaacataatattaagatgatcacccgttcaatttacattggcaatccagcatatctgaaattaaaagacgaacagatgaaaatcctttgcccggaaacaaaagtggaaaagggaagtgttcctgttgaagatctgggattattaatgttggatcattttcagattactatatcacataatctgattcagaaaatgatgggaaataacgttgttgtaattagttgtgacaaccatcatttgccacatggaataatgttgccgctttacggacatacagaacattccgagcgggtgaaagatcaactagaagcaagcgaacctttgaaaaaacaactctggaaacaaaccatagaatgtaagattgaaaaccagaaaaatgttttagtaaaactgggaaactatcacgaaccattgattgaatatcaaaaaaatgtaaagtccggcgatattactaatatggaaggaattgcagcacaacattattggaaatatttgattagtctggattttttaagagaacgttttggtgattatcccaatctgttttttaattttggatattcggttttgagaagtattgtagcaagagcaatagtggagactggtttattgcctgttcttgggatttttcataaaaataaatataatccttattgtcttgccgatgatttaatggaaccttatcgtccttttgttgatttattggttatgcaatggcttgaaaaaaatcctgcgactgaagaattaaataaagaatttaaagctcatattctgcagattgcaacaaaagatgtaaaaattggtggtaaaatcagaccattactgattgcagtaaaaacaaccgcaacgtcactttataaatgttatacaggtgaaaagcgattaatatcttatcctgaactaagatgaatgccgaaaggtttaatgcttaccgaattatgtgggttttagtattatatgatcttccaaccgaaactaaagctaatatgcaggatgcgaatcgttttcgaaaatcgcttattgacgatggttttacattatttcagttctcaatgtatgttcgtcactgtccgagccgggaaaatgctgaagttcacatcaaaagagtaaagtttatacttcctaaagccggaaaagttgctattatgtgtattacagacaaacaatttggggacatcgaaattttctttgccagaaataaggaagaaccacctccgaccttccaacaactagaattattctaaattttaaattctaaaaataaaaacaatctgctgaaaatcaatagattgttttttgaggttgtgactaatcacgaagataataatttttgaaagcaattcacaactaattttacaggatgaacatctatagggttgttgtgactaatcacgaagataataatttttgaaagcaattcacaacagtaacacatccggtagcggtgtcccactcgttgtgactaatcacgaagataataatttttgaaagcaattcacaactatagtctcaaggacctgttttgatgaaatgttgtgactaatcacgaagataataatttttgaaagcaattcacaacaaatgctgaagcggggatcttttctaaatcgttgtgactaatcacgaagataataatttttgaaagcaattcacaacgtcttcctgatgcgtctactgggattagtggttgtgactaatcacgaagataataatttttgaaagcaattcacaacggtatgattatgatgataaaggttctgttagttgtgactaatcacgaagataataatttttgaaagcaattcacaacttagaggtatgccaactttagcccctatatgttgtgactaatcacgaagataataatttttgaaagcaattcacaactaaaattattacaagtcgtaaagttactcagttgtgactaatcacgaagataataatttttgaaagcaattcacaactaaggatcagatcgcctttttcattcttaagttgtgactaatcacgaagataataatttttgaaagcaattcacaactgctgatacctccatcactgtttccagcccgttgtgactaatcactaagataataatttttgaaagcaattcacaacggaagttgagttcacgaaaactggtatcaagttgtgactaatcacgaagataataatttttgaaagcaattcacaacagcttcggtaattaaccgcgcggtgttattgttgtgactaatcacgaagataataatttttgaaagcaattcacaacgcttttgttcggcatctgtatagatatattgttgtgactaatcacgaagataataatttttgaaagcaattcacaaccgcttactcggattggaactcaacttttgagttgtgactaatcacgaagataataatttttgaaagcaattcacaacacgaaccaatgatgattgatcagacttactgttgtgactaatcacgaagataataatttttgaaagcaattcacaacagcaatgcagccgcatctttatagtcttgtgttgtgactaatcacgaagataataatttttgaaagcaattcacaactggcaagcatgttggaaattgcatccggatgttgtgactaatcacgaagataataattttttgaaaacaactcacacttattagcatttcataaataagtgaggtcaattatgaaaataagaataaacttattgactaatggttgactaaaaaaataaaaaccacttgattatcaagtggtttaatttcagattgtagacccacagggatcaatgtttataaattatattaaatcattattaattgaaatgctttattaaaagctaaaacgatttattatcaatctttaataatcttattcaagctataaaaagtgtgtataaaactgtgtataaaatcttattttttattgaacttattcatttcggatttttttaaatcatctacaattgcaatgtaaggtttcattgattgataatccttatgtccagtccatttcattattacttcagctggaatacccaaatatagactatttactatgaaggttttacggccaatatgagaactcatcatttcataaaatggatagacttcatcaaatcttttttctccaataaaatatacgtaattaactggttcatcaaattctaaaatacttcctattatttttatctgttcattaatttccttttcactttttactggaagagattttacgccttgaaggctactatattttgataagatttctttagtataatcgttcaaatcgattttaattgcatccgttgttttctgtgttgtaacataaaagaaatcatcccggatctgagttttttttaaagcaaatacatctgaatatcttaatgaactaaaacaacaaaatgcaataatatcccttgtttcttccaagtgtttttctgatggtttaaatttgtgattataaaatttcattaacctttcccaattcataaaaattggctcgttcagatcaaaatttgcacccttaaactttggatagaaagtttcatgtaaatctccatcataaaagccttttttctttgcccattttaggacggttctaacatccttaatagttctggacacggttgtatttttgtgtggagcaccaggtttacccgttttaatgttaataggttcggtttggaaatatttcacaaatttcactaaatctttttccgtaacattctttatgattaggttgctattataaaaattcaagtgattttccagttttttaaatctgtcataatttgattttgtccaggaatccctttctcctgtttcgtttgcatactctaaagctgattgagcaaaagtaggattaataattttttttttagattcagatctgccatttttctcactaaatttcaattggagttcttcggaggaggggaatctattttctaaaatttcaaactcatcaaaaattttttttatggtttcttcaattttatccagatctttattccttgaatctttacgattaacaattctttggtgttctttatcccattcggatgctttaacagtaattccagtgtataactcgggacgatttgaattgaaggaaacgaatgccctaacaggactgtcaaggtctttttttgatttatttatatagaaatttactttatgtttgagcatttaatcaatcattgttttttaaaggtcctttcccggttacaagccaatgcgctgaaaaattatatttttctaccattaacgttaataagttaagtgggaattgtcgatgcggttccttagtaagtctggccatattgctagtatttaaattattaataacacaaaaagtatgaaatcctcttaagttttcggttgctataacgtggtaaacagctgtaaaaaaacgtctaacaatagggaaatcgttagagattctttcgatattctcttcgtattttgttttggttttcataaatgtttttattttaccaatctttatttccttcatattttgtgttcatagattctttcagtccatcaatgagtttattgacttttattgaaatttgttctttaatgtttttccatgctactttatttggttgtcctcttgatggccttggaacctcattagattctgtaatcattccgtagctaattgctggattacccatcacggttgtgccggaatgccggaatgcataaaatttatatttatacctaccatttttaacgaaaatgcttattttaaaatcaacatcaccttgtactgcggaagatccaaaaaataatttactaggattgtaaaacatttttccattccctgaaagttcaccattatttctgtcttctgttgcgattacatacttttcatcattaaagcttttgcctatccagtttctggctcggttaaataactcgtcctttgtaattgtagagtctactttaataacttcttcaaattcgaaatattgggaagaaataatacctgaaataaaaaaacaagtaaggattaaaatttttttcataatatattagatttttaataaacatcagaaaaagaactttctactttcatgacataataaagcattttaacagtgtttaaagaaacgtgaacattatgggcatattctgagctagggttccaggaatcaactgttattgtagctgtgtttacgttatgatctattatttccttcagggttggtcgtccgaaatctgtggaggctattacccataagggaaatttattatattttaatttatctttccagtgaatacgttgtaattctcgcccccaaacaatactcccgtcaggaacgtatctgtttacttctgttccctccatagatcctccttttattctaaaagctgaatattttcctttaagcggactttttactactgtcacatgttgttcaatgtctacataatctggatgccttgtatctccttcattatccaacaggcttgcggcaacatcccattcaaataaaggcatatacattagatactcgccattgggtaatttttcaaatctatttccaaaagaattttctattacttcattttctgcttcatcttcattcatttctatgtaatctactgtgtcaacttctttatttggttcaatttgtctattttttatagcattgctgtattgtagcatttcgccatcaccagttaatagccaatctatatttaaatcggtataaatatttttgattaatgttagtttatcaggctgaatagattttcttatagcatttacatacccagaagacacatttatagattcagcgaactttccttgtgaaatttttttgtttttcaagtaaaatttaagtctctcttttacagtcatttagttattttttaattaaaatacatagcaaagctattgtttattatatagcaatgttatatatttgcttcatagttaacgtaaacatttacgcaaatatagaaaagttatgaacattagcaagatggtttaccagaaaattaaagatgatttatcattccgacttggtttagcccaagcaatgggaatctcagaaagacaagttcaaaacttggttaaatcagctgaaagaggagtttcggtaagattgagagactttgttgctgtagaatattatagatcaaaaggtctttcagatgatgaaatttttgaaaaggaaatatcaacacaaaaaaaagaaataaatgaaaaagtttaacgtattaagggctttcagtagagcaaaagtttttccaaaaaatcaaaagtatctgggaaaaattttcataaagtccataaaggaaagtgacaatgcagatgcagcaaatgagattttactcgctgcttacatgctaaagcttccaaattacttcgaaatagaagatgagtttcacaaaaaattcccaattaaattttcaaaaacttagaaacatgttacctccagaaatattaaacaaacctcttatttctatgactggaagcgaaatattagaattattcggagaaattatttctaagaatgataaaccacaagttaacgatttcaccggcaaaaacttggtttatggaattaaaggtttagctgatttgctcaaatgtggtaagtcaaaggcacaagaaattaaaagctctggaattattgatgaagctataatccagactggaaagaaaataataattgattctgaaaaagcaatcgatttattaaagaaaaattccccggctgcaaccgaggatgatgaatagtttaaccattaaagtcaaacatatatgttaagtacaaatgtaggaattatttctcctatggaacaaataaaacttcaaaaattagaagcttttgtttcaacagatgagaaaaaatactttgaaacagattatacactttgcgaagatgataaaataagcattgatgtatcattagaaattgatttggatttccatccggatctaggaaaatctcctaaaaaattaaaggttcatgtattaggcggatatgatgcaagagaaaatgaagacttagcttttagtaagtccgacctaaaggaattagagtcctatatagcaaaaaaattaatcctttatatcaactaaccatgaaatggattgttattaattatgacagaataatgctcatattctatctgctattagctttatcaagtgtttgtgtattggttcatcaatactttaaaggacattctatctgggttccagtgattttattcttgatcgctttccaggggtttaatattcattctaaaaacattttaaatgaaaggtaatgaaacaattaataagtctatggtcatggttttttgttcagtacagatactttcttcagtacctaatgaaaatatagtagcaaaaagaaatatccataagagaagactttggaaagtgtgggtctacgaaaacaaaaagaacacattggatcaacaacgtaggaattttgatttaaataaccattaaataaaataaaatgagttcactatataaaaagcttcaccaaatacaaaccaaaattaatggtcttggtaaagataaagccagcgggcaatatggttatgtttccggggccaaagtattcgaatttattcggcctcttatgaatgatcttggtttgattttaaaacaagaaattctatcaattgataatgaccgccaagattataaaacaggaatcggtactcagtatgaaaaaccaaagtctgagattctttcgaaagttatgatgcgattcacttggattgacatcgaaactggagaaaaggatgaaaacttatttggagctaacggacagaatgattgggaaaaaggattaggttctgcattaacctatgctgaaagatatttcttccttaagttctttcatattcctactgacgaggatgatatagataatgagttgaggaaaaaggttgatgatgaaaaacatcaaaatagcgcagcaacacaggcatctgaaaataagcctgccaatactacgactactcaaactcctctgccgttcttgaatgaaaatgatgagaattggaagaaagttgaggaatctattaagaagggagaaaagataaaactgtcaagcctgcaaaagagatttaaaatgagcaaagcaacagttgacttacttaaaaccaaatttcaaattcaataatcatgggagcaatgaaaaacacagctatcgaagcacaagaacaagaagcgataaatattccaccaattgaacaaccggatgagagatcaaaacgtgagattttaattgataggctaataaagaaagatattcatatgtcctactcgaaattaaagaatcttactagccctatcaatttcatgaatgcattgcttcagccaaaaaagaaaaatgctggaatgaactttggaagcatggttgattgtcttgttttggaagaggataagttcgaggacaagtttgttattatttcaaaaggtccttcaaaaggaaatcaagaagacatggtggatgaaattatgaaatctcaccctcttgatgatttcgacaaagtttttgaacaagcatttaaaaacaactacaaagctgggaaaatagaatctgtagaacatttaagagcttattgtaaagctttattaaatggtaaagattgcgtttctcaaagcgattatgatttagctgtaaaaattgcagatcatcttaaaaacgctccagatgtagctgatgagctttgtatttgtgaggaatttcaaaaaatgatcagatttgaatttatgggatggcagttcgttgcaattcttgatacctgggcaccttctattttccatgacatgaaatttgtttcccaattaaaccctgataaattcaaatgggaaattgaaaagtacgattatgaaatgcaaattggggtttatgcaaaagggttagagattctgggattatctatcaatccaaaattcaaatacattctttatgatgatgactttaattattcggttccggaaattgaggttggttatatcgatttctgtaaaagaaaattcgaatactatgtaatgcgccttaataagatggtggaagaaaaagcctttgacagatcctatgattatttcaaaagcaaaaatgtgatctataagccacagtgggctcctggatttgattatacaatctttcaaaataacgaataatggaattacaaggaacagtgaaatttattggagccattcaaacttatcaaagtggtttccagaagcgagaaatagttattctaacagaagaacaatacccacagccaataagtattgaatttttatctgataaaatatccttgctggataatgtgcaatcaggtgaaagtgtaaagattggaataaatatccgggggcgagagtggaccaacccacaaggtgaaactaaatacttcaattccataaatgggtggagattggaaaaagtaaataaagccggttcacagcctcaaaacacacaaaccaattcggctcctgtatataataacgaaaatccatttgctggagacgatgatgatgatcttcctttttaattattgaaaattatgaaagcaattgaaatcgaaacaatcatccgtgagggcaaattcaggcaaaatcttgatttaataaaacaggcagcccaaaagtatgaaggtaaagagatcattgtgattttcaaaagaaaatataagaagagatccaattaccaaaacagtttttattggggtgtttggattcctatacttcaaagagcaatacatgaaacctggggcgagataagatcagctgaagatgttcatgatattataaagatgaattgcaattatgaagaaaagatcaatgaagaaaccggatcatttataagggttcctcaatcctcaacaaagctcaatacctatgaatgggaaaatgaattcaaacaaaaaattagacaattcgcgctagacttttttaatgtggttcttccggaacctaatgaacaattaaaaatagacatgtgaaaa

SEQ ID NO: 1237 - DNA, 24290 bp, synthetic construct
  misc_feature 1..24290: note = Synthetic
  source 1..24290: mol_type = other DNA
aatgataagaagttaggttagaaatatttgcttcatttctaataaaccgcaaacctgacctattaaaaacagaaacccaaatgggtgcaggttttctattttctaatgaataccaaggtgttctacttgcagtaagaaaccgtttatttatctcttcgctttcacctttttggatatatgaacttatatttttatccgttgaattttgagcattgaaaagaaaaacagatttatcacttttctttaattcttcaaaatcttgtttagtgaaaaatgatgttttagcatcttttgcactacaaatacaaggcaataaatattgttcgtcaatattaaattctttggcttttgatagattaaaagtaaaatattcatttgaacctgttgctataccacgaactacttttgcgtaagtcgaaaatggcacaagatttttaaacttaatgctattttgtttttgatagtaagccttccatttaatttctggatttaaatcagaaaaattataggtctgttcggtttctaaaaagttaggatatttatttattatttcatctattttgcttaaatcttgcaatgattggatattgttaaactgaactttatctgttatattatcatttgcacaaagaataattgatgcggttgttaaagcatcatcaaatacattttcttcaaagtcaattacaataatgtgccgtaatgttttactttttattaaataagttttcactaattttccgtaatcagaattcaaaaattcggaaggaattatatatgcacaacgtccattttgacttaactgatgaattgattttagtaaaaataaagtataaagatttgtaaagccattcagcttgcatttaagattagtttcaatttcttttaaaatatttttattgtcataatcgtgaaacttaaagtagggcggattgcaaataattccatcatatttgtttttccaatcattgtacatataatcttgcaaaagtatatttacattttcaaaatcatcaaaatattcttttgcgttttcaaatatcgtttcatctacttcaaaaccttttatattgatttctttctgttggcttaaaatcgctcttgaaaaaacgccaagaccgaaagcaggttcaagaacggtttttaattgtttgttgcctaaaatccatttagccattgcataagcaatggggaaaggcgtaaaaaattgtgcgaattttttacgatgttctaatgaaattgattttgagtaatctctttcaatggaattattgacaatatgttccgttgtttttatcattaaaattcagcttcttctattcctaaaatagttcgtaaattatctaaatcaagatatgcagttccacctttgaaagttacataaaataataatcgacctctgtccatttctttcctgatgctttcgtgagttggttcatcaacctttgaagcaattggataaccagtttttgagttgatttttatcgttgttttattttgattttgtacatctttttcaacggaaaaaattacaccatcattatcagaatttgaaattatagttagaatttgttcaaatgaaattccatacactttgtcgaaaaacacttgaaagtaaaaatgtggaacattgaatgtttcaatccatttgtaaaccacttttatgtcttcaacttttggtgttattgaaagataatctctcttttgaatttcttttattgcaacctttagtcttttgaataaattatttacttctataagtctttcattagacctccaacctggaactttaaagtcaaaaattgaaatagtttcaagggttaaagtatttaataaagtgatgtacttacttctacttggatggtctaaaacatctaaaaattcggctaatattttatctcttgtttgaaatgcaatttcagtaaacctttgagttcttacttgcattgcttcttcgtacttgtcaatcaaaaaagcacttgagcgaacttcaattcctgcaattgctttttttacataatcagtgatttgatgatgtggaatttgactaacatcaaaacctaaagtagtatcaaaatctgtctttttaaagattaacaagtcggggcgttttcctatggtgtcaagttcagtttgaaaatcttgataaaaagtatcaaagccattttctcctgcaactaaattgtcagatttcccatattttacagctacaaaatttttagaattttcattaattgcccttgtaacaaggtcttcagcccaatcaccttgctctttatttgtaataaaatttgaagatgcttgtgttggtgttcttgccaagtctcttggttgttcaaaatcaaccaattctacaggaacattttttgttaattctctaattctgtcgtaataatccatcttcttttattatgaaactttattctacaaagttaaactttttttgtcggtttttattgtgggttagtatttgtgcgattgctcatagcattgggcataacggaaaaaggctttgcgaagtgcgggaattcgaagaaccaaaagttcaagaattcagaaacgtagcaaatggctttttcagattgttaaattaataaaaaaaatcaagatgaaaagccaatttgcggataaatatctaaaatagttcaacttagacttatccccgcattttgcaaaacctatgttgaactaaaccttcggtagctttctcagcgccatatttagttactttgtaaaactaattaaaaatcagtaaaatggcaacaaaaaaaagagcgtagaagagcttagagaaaacaaaatcatcaatcaggcaaagcgcgaagttccgggatttgcggagcttttgcaaaggtttgaacgtacggtttcggtgttgggaagaagccaaagtacctttcaaaattactccagacacgtcgctgcggtgtcgctacatttcgggaaaattcctacaaaattggatcccgagcaaattcacgattaccttttttaccttcagaaaaaatctaaatctccatcacaatcgtactttaaacacaccgtttacgggcttcgatttctgcttaaatcggaaggtttgagctatgattatttgagtcttccggaaattaaaagagagaaaaaactgcctgtagtgcttagtaaacaggaggtttggcagatgctttcggggtgtaagcttttaaagcataaaattttgatcggcattctttacggctgcggattgcgctgtatggaggttagaaatctccgtttatgcgacttagattttgacagaaaacagttgaaagtggttcagggaaaaggcaaaaaagaccgctatttacccctttccgagcatttgattcggggactcaaaaagtatatcgaagcggaaaaaccagaaaattatctctttggaatgccacgagaaggaagagcgggcggagagtttgattcccgctactcacaacgaggcgttcagtgggcggtaaaacaggcatcaagagcagcaaaaatcttgaaagaagtgagtgtccatacgcttcggcacagttttgcgactcatcttctggaagatgggatggatattttgagcatcaaaaatctcctcggtcacgaaagtattgacacgacgctggtttatcttcaaattgcacaactttccacacaaaaactcttctctccgctcgatacccttttttcagaatttgggaaaaaatgagcggtttaaaaacctcaaaaaaacagtcagttcaacctcaatctcaacctcaatatgaagtcgcctatgttttaaatattttaggttcaaaattggaaaatttagaacttaattcttggcagttaagaactttatttgccttaaaaaagtgcagaacttcggctttgggcggtcatatcgatgcttgtgatgaatgcggagttttaagcatcagttacaactcctgccgaaaccgtcattgtccaaaatgtcagagcaaaaaccgagagcaatggattgaaaatcgggaaaccgaactgcttccggtaccttattttactcattttttattattcgttttaattgtattcgtgatacgcttcgcttaattcacgtagtttttacgcttcctgatgtattgaacaaaaccgcacttcacgagcccaagatgttgtatgatatattgtttgaatctgcctgggaaacgcttcaagcatttggaaataaccgtggtttaaagatgggaatgattgctgttttgcacacttggggacagaatctgagtcttcatccgcatttgcactgcattgttccgggcggtggtgtggatgaaagcggaacttggaaaaatctacgttcagatgggaaatttctctttccggtaaaggctttgagcaaagttttcagggctaaattttgtgagaaactaaaagataaaaatcttgaagaatatcccaaaatcaggcaaaatctgtgggaaaaaccttgggtggtttacgccaaaaagccatttggaagcccaaaatcggtggtggaatatttgggtcgttattcccacaaaatcgcagtcagcaaccagagaatcagaaaaattgattcggagacggtcactttttcttacaaagattaccgccaaaaaggcatcaaaaagcagatggttttgagccacgaggagtttatccgaagatttgcgatgcatattttaccgaaaagatttgtaaaaatccgtcattatggttttttgagcagcacctggaaacgaattaagcttaaaaaactgcaacaaaaattaggcatccagcccaaagaaaaacctttgccaaagccgtttcaaccgaaatgcagttgttgtaaaacagggaatttagtcaccattgcaatgtttgatttgaggggaccgccacaatggtttttggagatgagccaaagccagccaacgcctaaaaaatagatttttgggtaagggaaattatgccccaacgtgaaggaaaacacgataaaaccgacaaagttcgccaaaaacgaatgcctaaaaaaaagagactcttctcaaagtctcctgtatctctaaaaatcttttgtcgataaccccataatgtctgaaaaaaaactgtcaaaagcttccgaagctccagttcaacagggttttcatctcgtgtccttcggacaagacgaaaacttagttattagcagaaggtttttggatgatgtgatgctttgatttttaatgttttttggatcaaatcaattcctttaaaggttttgttcaaaaataactaaagtcatagctataagaatttccatatgaatcacttaatttaaatgtttgtggaaagtttttactattgtaagttagttcaaaagttctaaaatagttttctattaaaggtgttccgtttacgtttccttctcttgaagatgtaatttttgttatattatttgtttgaggataaaaatcagaagaaatatcaaaagcaattaaagaatatccttctatatttttaaatgggttattttttgaatcattttctacaatttcaactttatctattgtataataatttggataataagtatggttggttgatttaattacatttccattgctgaaataaaaatcggttctgttaattgcatttgcaggcatgtatttgtcatctacaaaatatacatgattatcattaacccaagtataaaaaatattagtttctgaaagtccaattttataattcgttttagaaagtttattatttttatactcgtaattaaattctgaaataactgttcctgatgaatcataacttacattttttgtaatcaaattattcgtataagaaataatactttttgtaccattacttgatataatgcttttgagtttgtttccatcgtattgatattctgatacaatatttccagaagatgatttatatgtaatggttttgggcaaagtcgaagagttttcattcttaattgtatcttcatttctgttggaacaacttacaagaaaactaagaataaaaaagtaataaaataaatttttcatttgtagtgttttggataaactttctgctaacactcaaatatacgcaattatctcctaatctcaacaatataaatattaatataaaacattgcatatcaaaatattatattattagtaaccgtttgtaagcatttacaaactactacgctaatttctaatctatacaaaatacgaaacaaaaaaatcctgacattgtcaggacctattcatctatatgatatttctttatgtcaaaatcaaaatcgaataattctttaggcggtataccaaatgttgatgccatttttagaattgtttctattgtcgggtttcccttacccttttcatatttattgtaattgctagaatcaaaaggtgaattttgtgcaaccgcatccattgatttatattttactgatctaatctctttaagattatcagaaaacattttcatatatatttttagaacatctttactatccatacaattctctattagatagcaattttggaattttattaaattatttcatggtgatatattacccatatgtaaaatatttagtcgttccttaacaaaacccactatttaatttatttttaaaaacaggattagaaaacagcataatttgtatcttataaaataagaaaataattttctgtttcagtagttccatcattttcttcatgttccaagcggttgcagctagtaatgcattgatttgtggtcccgtttctcccatgaagtaattttttgccagcctaaaatcggtttttaaatgtccgatgataggttctattgccgctctggttctaaattttttgcgctttgtctgcttttgataagcagtgtctttttttcttggagtgcttgggatggagattttcacgccctttatttctgattttcctctgccacctctatcgtaaaggagttcttttgggagcttttgaccaccggtttccatctgttccaaaagtggttctatggtgtgaccatcgtaaggagtttgcaaaaatgctttaatcccgagaatgattttcttgcctttgttggcggtggttatcaaacctaccttattcccaaattcatactggctatgcgcttttcctttggcaatacatcgggtaaaaggcttgtgaatgctgtaaattttatcggcatcgtttcttttttgtgtgacaaccttggtgtacaatgtcattaaatctttataaaattcttgctgttctgcattaaaattccgttgcaattcacgaatcagtctcatggcgatggttttgagctgtctttgagatttccttgccgcttttgcccgcttgggatgttttccgttgtaggtgttgcgcaccatttgtttgctgacttttgtgtagcgttgtctttgttttatgccttcatttccggctattttgttgcaataatcgatcacttttttgcacaattttgcatcggtaggaaaagaggtattattctcctgaacggtagtatcggacaaaacaaaatttgaggtgttcgtcttggcatcgtgcattcttacgctgtaggcaaagattttttcgatacccttttcgccaattctttttcggaaatgaacaaaattactcgggtcacaaggaaattcgtgttcaaagaaaaccctgccacaaaaatactgcatataaggattcatgatccaggctttttccaacgtctcatcgcccaaattatacaaatgtttcagtagcaaacaacccaccataaaccgaatcggatggctcggattgcccactttggaatacaagggcgaaaattctttctcaaaataattccaatctattttttctgaaagtagaacaagttcatgctcgtggttaataaaatccaccaacattgggcggaataattctggcttcttttctggatttttccccaacatatttgcaaggttttaaagctctaagatacaaattcttgcaataaaaaacaagctattttaaacccaaaatactaataatcagtaaattataggtagcttaaggagagactatttattatatttgtaaaataagttacagaaatgtaattttgcgatacttcaagaataatagaagcattcgcttagaatctcgcccgaaaactggtaatttttagcatacgagaggataagcagaaggctcacgacctaggcgtgagctcacttatctgcatgtaaggtataatagtgccccgaatcggatatgtagagtttcacgccgtttttgtatccatgccgttgtcctttttactctacattacttctaagctgcttttctaactacagtatcaggacaggtacaatggttgcgcagccattgcggcagttttgccttctcgggacacacattttcattcatatcattattaatctggcggattgcctttggcgggaaagcctgcaaatacccctgcagcgccttcccccatcgcaatcccaaaaaacaaccgccctaatggactatcacaatgacacttaatacctatggcaaaggacctaataaaaaaaaccgttaagcggagaggatttttaggcgttaagaacactcactatcgatgatgaactggattacctccattatttcttttcggatcagagagaatttgtagcctattacaaacgtggcgctacctacctggatgacaaatacttcctgcgccgccgctacgacctctatacaccattagaaaccgacctgcatagtttcgacagccgttttgccacatcccatgatcatgtcgctgccaggatactggcattcgaagagtatgaggcattcctgcggcagtggctcgcaaagcacagcaaaaacaggcaggaggaagacagctttgccggcatggtcacatggtcagcatccaaggcagcccttaccgaattgctattctccctgcacctcaccggctgttttaacggcggcaatatagagttggctgaggtcatccgctgggcagaagcgtcccttcatacagacctcggcaactaccacaaaacattagccgaagtgcgcaacaggaagacccgccgcaccaaattcctggacctcatcctccgcaacttttaggattaccttgacaggtcagatgaataataccgtggctccccagctcaacaacacccctccaacacccaaacctgtcatgctgaacttgccgaagcatccatcaaccatcatcccacatcccacatccctcatccatcacttatcattcatccgcacccgtcagctcgtctatcatctatccgtctctcatctctcatccaaaccctcaaaccctcccattccccaactccctcacccctcaaaaaaatccttcggtactaccgaaaaactattgaaaaacataggcagtgatatcccaaatttgtagggtaacaatcagcaatatggcaccgaaactcacccggctctgcatttacccgaaggacatccagcttatcactggccgcagtgagcgccattgccgcgagatcatgtacatcatccggcgcagcctcaacaagcaggaccaccagttcatcaccatagacgagttctgcacttgggccggcctggaccccgccgccgtccgccaaatcctccacaactaaccctagcacctccagctcccgaatctgtcacgctgagcctgtcgaagaatctcaaccacgccttgaatgttttagcttgttgattttatattatttgaatgaaactcgtgaaatattgagctggtagaatattaaaatgccccgaagatagtcgaggcgctaattgttttattcgtggagtattatatttttttaaggtactcatcaaacatttggacataaaaaaacctcctgattatggacaagaggtaacccaaatgttttcacaacggaataatccttattgtgaattgctttcggtttcaaagataaagaatatttattttctacaattacggaaaaccgtaaacatgatattttttttcttattaaatttaaagaatctatgtaaaactaataattatgactaaaaatatacttggattagacctgggaacaaactcaataggttgggcgttaattcaacaagactttcagaacaaacaaggagaaattcttgggatgggaagtaggattattccgatgtcgcaggatgttttgggagatttcggaaaagggaattctgtttcgcaaacagcatcaagaacaggttatagaggcgtaagaagattgcgagaaagatttttgcttcgaagagaaagacttcacagggttttgaatattttgaattttcttcctgaatattatgcttcacaaattgattttgagaaaagatttgggaaattcagagaggaaaccgaacctaaattagcttatagtaaagaaggttttattttcaaaaattcttttgaagaaatgcttactgattttaaaaatcatcaacctcaaattttacaaaacgacaaaaaagttccttacgactggacgatttattatctccgtaaaaaagcactttcgcaaaaaattgaaaaagaggaattggcttggattctcttgaattttaatcagaaacgtggttattatcagttgcgtggagaagattttgaagaagagaaagataaaatgtttgttagattaaaagtagacagaattgtcgattccggagaaaatgttaaaggaaaaattctttatgatgtgtattttgacaatggctggaaatatgacaaacaaattgtaaaaacagaagattggattgagcgtgtaaaagaatttattgtaactgaatcttttttgaaaaacggcgatattaaaaggactttcaaagctgttgattctgaaaaagattggattgctatcaagactaaaatagaacaagaaattgataattcagacaaaacagtcggaacctatatttacgaaacgcttctgcaaaacccaaaacaaaaaatcaagggaaaactggttcgtactatcgaaagaaagttttataaagaagaattaaaacagattttagaaacgcagaaagagtttcatcctgaattaaataatgaaagtctgtataatgattgtgttcgtgaattataccgaaataatgaagcccatcaattgactttgagcaaaaaagattttgtacatctttttatggatgatattattttctaccaaagacctttgagaagccagaaatcatctatttcaaactgttctttagagttcagaaaatacaaagatgaaaacggggtagagcatacgcagtatttaaaagccattccaaaatccaatccatattatcaggaattccgcatttggcaatggatttataatctgaatatctacaaaaaagaggatgatgctaacgttacaaaagaatttttaaacacgacgaaagattacgaaaatctgtttgagtttctcaataacagaaaagaagttgaccaaaaagcattattaaaacattttaagttaaatgataaaacacatcgttggaattttgtagaagataaaaaatatccttgtaacgaaaccaaaacaatgatttatgaaaggttgaaaaaagtcgaaaatatttctaatgatttcctaacgagagaaattgaacaaaagatttggcatatcatctattctgtcaatgataaaattgaatacgaaaaagccttaaaatctttcgctcgaaaaaatcatctggatgagaattctttctttgaagcatttaaaaaattcccgcctttcaaaaatgaatatggttctttttccgaaaaagcgattaagaaattgttgcctttgatgcgattaggaaaatattggaactatgctgatattgataaatattcaagagaaagaattcagaaaatcattaccggagaatatgatgaaaatatcaaagataaagtaagggaaaaggcagtacatcttacaacagaaaatgattttcagggtttgcagttgtggctggctcagtatattgtttatggcaggcattcggaagcatcaatgattggcaaatggaattctgccgatgatttggaagaatttttaaaagaattcaaacaacattcacttcgcaatcctattgtggaacaggtgattactgaaacacttcgtgtcgttaaagacatttggatgaagtacggaaacggagctaaagatttctttgacgaaattcatattgaattgggaagagaaatgaaacttcctgcggaggaaagagatagattaacccgccagatttctgaaaatgaaaacaccaatcttcgtatcaaagctttactggctgaaatgatgaatgatggagcagtagaaaatgtacgtccatattctccaatgcagcaggaaattctgaaaatttacgaagacggtgttttaaattcaggtattgagattgaagatgaatatctgaaaatcagtaaaacagcgcaaccttcatcctctgatttaaaaagatataaactttggctggagcagaaatataaatcgccttataccggacaaattattccattaaataagttgttcacaccggaatacgaaattgaacacatcattccgcaaagccggtattttgatgacagttttagcaataaaatcatttgcgaatcagcagtcaataaactgaaagataattatatcggatttggatttattaaacaatttggcgggacgattgttgaatgtggtttcggtaaaagtgtgaaagtttttgaatccgaagaatacgaagattttatcaaaaagcattacgctaacaatcggagtaaaagaaacaagctccttttagaagatattcctgagaagatgattgagcgtcagatgaacgatactcgtcatatcagcaaatatatttccggaattctttccaatattgtgcgagtagaagacggaacagacgaaggtgtaaattctaaaaatattgttcccggaaacggtaaaattacaacacaattgaagcaagactggggtctgaatgacgtttggaatgacttgattctgccacgttttgaacgaatgaaccaattgaccaattcaaatgattttacagcttggaatgaaaaccatcagaaatttttaccaaccgttccaattgaatattccaaaggattttcaaagaaaagaatcgatcaccgtcatcacgcaatggatgctttggttattgcttgtgcaacgaaagaccacgtaaatttattgaataatcaatcggcaaaatcagatacaaaacgttacgatttgaaaaagaaattgatgaagtttgaaaaagtggtttataatcatcctcaaaccggagatagaattgaacgagaagttccgaaacagttttttaaaccctgggataatttcaccgtgggtgcgaaaaatagtctggagaaaattattgttagctttaaacaaaatcttcgtgtgattaacaaagcgaccaaccattacgaaaaatatgtagaaaaggacggcgtgaaaactaaagaaagagttgagcagaccggaacgaactgggcgattcgaaaaccgatgcataaagagactgtttccggaaaagtagatttgccgtgggtaaaagttccgaaaggaaaaatattaacggcaaccagaaagtctttggatacatcttttgatttgaaaaccatcaattcaattacggacacagggattcagaagattctaaagaattatttagagtttaagggaagtcctgaattggcattttcacctgaaggaattgaagatatgaataaaaatattgaaaaatataatgacggaaaaccacatcaacctattaataaagtcagaatttttgaattgggaagtaaatttcctttaggacaatccggaaacaagaaagataaatacgtagaagcagcaaaaggaaccaatctattctttgctgtttacgaaggtaaaaatgaaaaaaggagttacgaaacaattcctttgaatatagttgtagaaagacagaagcaaggattacttgcttgtcctgaaactaatgaaaaaggagagcgtttactattttatttgtcgcccaatgatttagtttatttagctacagaggaagaaaatgatattgctccgtcaatcaatttcaataatattaataaggaacaaattaataatttgtataaaattgtaagctttacagggaatcgtttgtatgcaattccattaagcgttgcaacgacaattgtaaataaggtagaatatacacaacttaataagattgaatttactaaagagaaagagtttcttttaaaacttaatgtcaatcgtttaggtgatgtaaaaacttttacggcgaatgatatcagaaaaattttcatcggataaggataacgatttcaaaaaaataaagtattcaattgatacaaatattttagtatatgcttatgaaaaatccaaccacgctatttctgaaacagcaataaatctaataaatcaagaagcaaatatttctaattatgcatatcaggaatttttatttaatttaaaagaaaaagggctcctaaaaggagaaatttcaaaaatgggaatagaactactcaacatattaaacttaaataggattgataaggatacctatcgatacgcccattacttaatgattaaacataattttcaattaggagattctattgttatagcagatgccattttgaataattgtaatgtgttatattctcaggatgatatgggacatcatggattggttgataagaaattaagaattataaatccttttaaataagacaacaatgatcacccgctccatctacatcggcaatcctgcttatctcaagcttaaagacgggcaaatgtatattctttgtccggaaaccaaacaggcaaaaggtaaagttcccgtagaggatctgggtttattgatgttggatcatttccaaatcacgctctcccatcagctcatccaaaaaatgatgggcaacaatgtggtagtcgtgagctgtgatgaccaccatttgccgcacgggataatgctgccattgtatgggcacaccgaacattccgatcgggtaaaagaccaactggaggccagcgaaccacttaaaaaacaactctggaaacaaaccatagaatgtaaaattgaaaatcagaaagaagttctccgaagattgggaaactattatgaaccaatgcttgattatcaaaacaacgttaaaagcggggatagtaccaatatggaaggtattgcggcacaacattactggaaatatctcattagtctggatttcctcaggcagcgcttaggggattcacccaatcagtttttcaactttgggtatgccgttttacgaagtattgtcgcaagggctattgtagaaacaggattgctgcccgtgttggggatctttcataaaaataaatacaatccctactgtcttgcagatgatttgatggagccctatcggccttttatagatttattggtcatgcaatggctgaaaatcaatcctgataccgaagagttgaataaagaatttaaagcccacatcctgcagattgcaaccaaagatgtaatgatagatgataagacaagaccattgttggtggcggtaaaaacgactgctacttcgctttataaatgttacacaggggagaagcggctcatttcctatcctgaattgataggaataggttaataagacatgattcttcatatattgtacttaatataataaaaaatgaatgccgaaaggtttaatgcataccgaattatgtgggtcttagtgctatacgacttaccgactgagaccaaagccaatatgaaggatgccaaccgctttcgtaaagctttgctggatgatggttttaccttgtttcagttttcgatgtatgtgcgccattgcccgagccgtgaaaatgctgaggtccatatcaagcgcgtaaagtttatgctgcccaaagccgggaaagtggccataatgtgcatcaccgacaaacaattcggtgatatagaaattttctttgccaggaacaaagaagaaccgccaccaaccttccagcagctggaattgttttgaaatataccaaaatttttaaagaaccggaattcaaattaaaaaactaaaatcgcaaaatccacaatggaacagaacgccacccttatcatacacaagcaaaccctgccttttctaaatatctctctgtatctcaatggtattaagcctgttcaatcattaatactggaaaacacttctgagaaagatacttccccgctggaagtgaatatcaccgccgatctcccctgtgtagaaccatttcgttatactgtcccgttcatcccggcacaaaaaggaataaaaattcccttagaaaatttgaaatttaacagagattttatcaacaggctttcagaaaccgaaaaagctaatatcaccatcggaatcaccggagaaaacgcaatcacaatcaatgaaatatttgaattggatattcatcctttggaatattttggcggtttccagatattgccggaactcattgccgcctacgtcacacccaatcatccatacatctatcacctcaaaagaaaagcggtggagattttagaaaagcagaacctcaaaacggcttttgaaggctatcaggctaacgatccggagcgtgttctacagatgatgtcagccatttattctgccgttcaaaacgagggaattgtttacagcgcgctaccgccgggttatgaggcaaccggccaaaggctacggctgctcaataccattcaacaggagaagttcggaaactgtatagatctgagccttttgttcgctgcttgcctggaagcgatcgatctgaacccgattctgattctcgtaaaaggtcacgcttttgtcggatgttggcttcaggatgataagttttccgaagtcatcaatgatgataaaaccgccattaccaaacgcctttccaaaggaattagagagatggcagcatttgaagccacaagtatttgtaaaggaaataacctcaaattcagcgatgctttgaatgcgggcgaggctcagctggtgcagcaggaagattttctcttgtccgtggatataaaacgtgccagaacactaaggatccggccgttgccattgcttaccaacgtttcggaaatccagttggatgaagaaattatccggcagaccgaaacagcagaaatggaaaaccatttcgagctgggtaccatttatcaggacgatcttttgcaaggtaataagcccaaaaccaaacagaaaatatgggagcgcaaactgttggatttgtcactacgcaataacctgctcaacctgagaatgacccgtaatatgctgcagctggtggatattgacatcagcaatttagaagacaccttatccgaaggcaaaagtttttctgttattccaaaccctaacgcggaagtattacgaaaatataatttgttcactcagccgcttcacagctcatctcccttgtatcagctcgccaacgatgaattgaaatacaaccgcctgctgacgcattatcatcagcaggatttggacagtatccttacttacattcacaaaaatgcaaaacaggcaattgaagaaagcggatccagtaccttgtatcttgcagttggattattaaaatggtttgacaggaaaacaccggatcagccacggtattcaccagtgcttctgctgcccgtagaaatcagccgaagatctgtcaacagcaagtttatactgaagagccgcgaagaagaaacgatgataaatattacgctgatagaatttctgagacaggaatatgaactgaacctaagcgcattagaacagcttccgtatgatgaaaaaggtgtagatgtggcaaaagtaatgggcatattgcgcagagcggtgatgcagttgaaaggttgggatgtggaagagcaactagtgttaggcaatttttcgttcagcaaactgattttatggaaagacattgtcgcccatcaggaagatttgctgaaaagtgatatggtgcgcagtctggtggaaggaaaactgtctttcagcgaaaactatgaaacgatttcggcaagcgattttgacaatattcattctcaatctctggcattgcctattccaacggatgtatcgcagatggaagccgtgcttacggcacagcaggggcatagctttatccttcacggccctccgggaactgggaaatcccagaccattaccaatattattgcagatgcgctgtatcacggcaaaagagttttgtttgtagcagcaaaaaaagcagcgttagatgtggttcaaagaaggttggagcaaatcgggctggcaccttttacattggaattacattccaacaaatctaaaaaatcagatgtcctggaacagctggcaaaatccattgaaaccgcaaaattggtacgcacagccgattttgaacaggaagcgcaacgtttagacgcggccaagaaagcaatcagcgattatgtcaatattttacaccaaaagcaacaggtgggctggagcttatatgacagcatcaccgctctggaaaatgaccatgatgagaatttcccaaaaaattttattccggaagaggttctgcaacaattggatgcagcactttggcaacaatggacggattggattccacagtttcaatctgttgtaaaattcatcattcacccctcagagaatcctttgtctgctttcaatttgccacactattcgcctgtggtcaatgatgagattgccaaacaaacccaacagttgttgcaacttttgcctgatgtacaaagcaaattgaaatctttggcttcggcaattcatttcccgttttccgtacaaacaaaaacagagtggggacagttcattcaggtaatagactcattgcaaaatctgccggatattcctttggaattgatcctgtatttatctgacaaggaaaattaccagatgtatgaagagtggaagagtgcattccagcagtatcagaattcattaaacaatattttaaaaaattataaacgtaatgttctgaacactgacatttctgcaacagaagtacaatggaaaaaggcgcagcaaagttggtttttaccaaagtggctgaaatcaggaaaaatcaaaaaggaattaaccgcttttcggaatgcagcttttaccaatgatcatgaagtagaacagcttttttcggacaacaatcagctacaggaagcgcaacgccttttgcagcaacgccgttttgccgaactgcaaaaagcattgaaaaatttgtataaagatgagcagacagatttaggggatatcgacaaaaaagccacctttacccagcatttgagcaatataacaaatatttggggacgcaatgcgcttggccaatggattcagattttacagcaagaaaatatgcagtattctgatgaaatcaaacaaaagcattctactttaatcgatgaattccttcagttgacagcgatttttaacgagcaggagaaaaactacggaacgctaacagggactaattttcaacaaaaagaaaactggcttgaaagaacagtagcccaacttcaggacatacaggaaaatctccctcaattaaaaaactggatgaactacgtgcagctccggaatcagggtgaggatttgcatttgaagtggctcataaacgcttatgaaaataaggtttgtaatgcggaaaatatttcagattatttttattatgcggttcatgcctctgttgtgcagcatgttatatcgcagcacgaatcgttgagtttattcaatgcgggtttatttgaaagtaaggtagagcagtacaaaaaaatcgcaaaagaatttcaggctcttaccatacaggaactgcgtgtgaaactggcagcacagttgcccaacacaaccgcagaagcaatgcaaagctccgaaatcggtattttgcagcgggccatcaaaaacagaggcagaggtttgagcatcagaaaactctttgaccagattccagccttgctgccgcgtattgcgccttgtatgctgatgagtcctatttcggcagcacaatattttgatgtggatgccagccattttgatatggtcatttttgacgaagcatcgcagctgccaacctgtgaggcggtaagcgcattggcgagagcaaaacaggctgtgattgtaggtgatccaaaacaaatgccgccgacttcatttttcagcagtgtaaaacttgatgaagaaaacatggatgtagaagatctggaaagtattctggacgactgcctgtctttatctgtcccgtccaaatatctgttgaggcattaccgtagcaagcacgagagcctgattgctttcagcaacgttaattattacgaaaataaactgttgacgtttccttcggctgatgatttgaaccgtaaagtgaaatttcatcacattgagggattttatgataaaggaaagacacgtaccaataaatttgaagctgatgcattgtggaattcatcaaatctcattacaataattcacagaaacggaaactgagtttaggcgtggttacgtttagccagacacaacagaacctgatagaggacaaactgcagaaactttttatgtctgatccgagactggaagagttcgcccacgaaagtgatgaacctttgttcgtgaaaaatctggagaatgttcagggtgacgagcgcgatattattttgttttcaatatgctatgcgcccgatgaagaaggaaaaatgagtatgaattttggcccgttgaaccggaatggaggttggcgaaggctcaatgttgctgtaacgcgggccgttatgaaatgcatctttttgctacattgcagacggatcagatcgatctaagccggacatcagccgaaggtgttgcaggccttaaagcctttttgcactttgcggaaaaagggcatctgagtattcgtcccgaagatattcaggaaacccgcaataaacaacatctgtccgaaacaatcagtaaacgattaaaggaaaaaggagtggaggtgaaatgtaatattggtacttcgggttttaaagtggacatcggtatcgttcatccggacaagccagaacaatatattttaggaattgtagtggacggtcattactactataatgcgcgtactaccaatgatcgtgaaatggtcatgccttcggtgctgaaagcattgggctggaacattcatcgtgtctggacaatagactggtatgaaaattcggaaaaaattgttgatacaatcattgaaaaagtaaaacagctgcaaactcgatccgaagattatgaagaaaaaattaccgaacccgttgttttgccggagtttgagccaatcaaagcaatgcccgacgcacctattaatactgtaagcatgcaaaaaccctatattgctcacatcttaatccctgttcctaatgcgaacagtgaaacaatctatgaattccagaaccggaacattatcaggcagcagatacaatcgttagtagatacagaagctcctgtcagtaaaggattgttatacaggaaagtgctgcagatctggaatacaagccgtgtcggagcgaaattggacagatatttggaaggcatcattaaagaaatgaatcttgtgcagacagtacatcatcagccgttttattggagtaacggcactgctttgaattactatcgtatcaacgacacggaaaaacgcaatatggaggatattgctcccgaagaaattttggtggctttgcaggaagtgataacagacaatttaagcatcgaagaagacgaattgctgcgctatttggcacgcacttttggttttgcgaaattgggtaaacaaattgatgctattttgcgctatacagttgatcttgcagaaaaagaaaatattgtaaaaaaagagaatggaagaataatattgaccattcccaaagaataaaaaacatattttcaaactgagattttttctttgtagaaataaaaaagctggaatcggtttgtcatctgtgatactatcaggaagaattttaagattctaaaagcaataaaaacccactgaaaaacagtgggttaaattttgaggttgtgtgatatctcaaagatactcaaaaatgaaagcaattcacaacgcgataatcgtaaggttgaacgttgaacatgttgtgtgatatctcaaagatactcaaaaatgaaagcaattcacaactaggtgtagccatatcaagtaaataagcttgttgtgtgatatctcaaagatactcaaaaatgaaagcaattcacaaccggaatcgcctacttttgcaatattttttagttgtgtgatatctcaaagatactcaaaaatgaaagcaattcacaactatgtttttttacaaatgttatctcgagttgttgtgtgatatctcaaagatactcaaaaatgaaagcaattcacaacaagattcgaaataattacaagctgcgcagcgttgtgtgatatctcaaagatactcaaaaatgaaagcaattcacaacgtagttcctgtagtctctttgagctgcttcgttgtgtgatatctcaaagatactcaaaaatgaaagcaattcacaactacttcgtgcatcaggataaacatatcctagttgtgtgatatctcaaagatactcaaaaatgaaagcaattcacaacagccaattaatttgcctttacggcgatattgttgtgtgatatctcaaagatactcaaaaatgaaagcaattcacaacattcctgcatttgcttcaccagctcaataggttgtgtgatatctcaaagatactcaaaaatgaaagcaattcacaacaaaaaggtacattatacctttttgttattagttgtgtgatatctcaaagatactcaaaaatgaaagcaattcacaacaataatcattagattcgacactatcccgtaaagtgtgtaagtagaaaagttaggcttggattttataatctgagccttttttcaaaaataagcataaattggtttaaaaccaatccccaattatggataggcattgtccattttttggtagcttcttttagagcaagatataccgactttaaaacagcatcatccgtaggaaaagacattttatttttagtgtattttcggatttttccattgaggttttcaattaaattggtggtgtaaatgatttttcggatttcgattgggaaatcaaaaaatacggtgagttcgtcccaattgtttctccaggattgaatggcgtacaaatatttactttcccatttggttgcaaaatcttccagggctgctttggcggcttcttttgtaggcgcagtataaatgtgtttcatatcggcagaaaacgcttttctgtccttccaaaccacgtatttacaagcatttcttatctggtgaactacgcagatttgggtttgggattcagggaaaacggagcggatggtctgggtaaatccatttaaattatcggttgccgtgatgagaatatcttctactccacgagcttttaaatccgtcaaaacgctcatccaaaagccggaactttcgttctttccgagccacattccgagtacttcttttcttccttctcggtttaatccaacagctagatagatggttttattgatgacttttgagttctcccgaaccttaaaaacaattccgtccatccaaacaatcaggtatagttcatctaatggtcggttctgccacgcaacaacttcactggcaacagcattagttatccgagaaattgttgatgtagaaacctcaaaatcatacatctctctaatctgttcttcaatatccgaaacgctcattcctttagcataaaacgagataatgatattctccaaaccatcgatgatattgtgtcttttgggaactaaagcaggttcaaaactcccttctctatcacggggaactttaatttggcttcgccgaaccacttcgttaggtttcggattcgccaaatgatgattttatcttcttagttccgtgtccgtttcggtagtttccattggtggttttttcgtgtttttcattgtcaagatggctgtctaattcagcatccagcatatgttctactgcttttttgtgcagttctttgaagaacgaggttaaatcttctccgtttttgaaggatttgtagaaatccttgttgtttaataaatcttctttactggtcataactgtataatgtttaaaaatagtaaaaagttatttggcttcgccgaaccacttcgttaggtttccgaaaaattttttgagctttgagggctcaaaatttttcagaataacttttctacttacacagttagtgggacactaccttagattcttgagagatggactg

SEQ ID NO: 1238 - DNA, 24287 bp, synthetic construct
  misc_feature 1..24287: note = Synthetic
  source 1..24287: mol_type = other DNA
attcaaatggttcacatgtacattcagatgctctgcaaagtcggaaggcgtttttaaagccagaggataagcgggggagtccaacggaaactgtttgttgagcaattcgtcgaaaagtttgtacagccttacattcgcaggaagctcattagggtgaatgtcttccacacggttttccagtgccagatgcatcactgaggccagattgcttttgatactgctgcaacggaaaggatacgctgaattgttcatcctgtaaatctgttcaaaatacagagtagcaagctgagtttgttcctcattgagaaagacaaccggtttgctccattctttgaacatagaagtttttttaaacagattaaattctgaatttccgttaaaaaactcctgattgaaaaggcaaaaatagccctcctgtacatcactttcgcactcccatgaatacggtatacttggagatgggaaaaacaaagccggaccatctataaacagctggtgtgctccataatgaatcgtaccttttccgatgataaagctgattttataataatcgcggcggttgtaaggactcttgaagctgcaatacctacgcatggaaatattgaaatgagattttcctgtttcaaaatcctcagaatcaaacattttgatctgatctttacggatgcgtctgtaataatcttctattgtttccagctgatcactcataggtaaaaattataaaaatcaaagatatataaactattgcttacttaaaatgattttaagtgagataatagaaataagaattatagcttccctcaatagttataagagtaaaaagtgatttatttactataaaagaggaaaaactatgagcaaatctgtgaaatctgcggttataaaatttaaactatcctttattaatttccagttccaaaatatgagaaggcaactgaaaagctccagcctttgaacccgatacagaaacaaatccaacctcttttaaaaactctgaaagtggatcatgatctaacatattgatccatactatatctgtaaaactcaccgctgatctgcattttttccagagtgactgtcttgtttcaggagaatcaaactctgaaaggattacaaagctgatctcggttgctctttttccgtctggaatttccggatgcagagaaccacttttaataatactgtatccaataggtttctgatcagcataagtcataataagctggttggaaagatcgttcagctcattaatcatctttctcggatctatttcgttttgaatgtactttttaatttcctcctcgcttacgaactctttgtgtaatgcataaacggaagaatcaataatggctataagatcagaaattccttcttcagaacctactgtaaattttgaaatgatatccatgggattttttttattcaaaattataagaataatacattcatcagggatacagtttgctaaaatatcatcggtacagatgaatgtttttgtaaatttgttcagtacagctgatcaacatcatgaaaccttttaaatacgaaatttttacaaccatcatagaaaaacagatccgaagtggaattttacaggagaaagacaaacttccgtctgtccggcagatcaaagaaaaatacaacttgagtacaagttcagtgcaaagcggatttgaatatcttatgatcaaaggccttgtcataagcagtccacggtctgggtattttgtagcggctattcaggaagaaaatattccggaggaaagaataacactacctatcgtaacgcgggatgaaacatttatgaaaaatatgatgtttacctccaaaagagcttcagaatccaactctttcaatgcagcgatgccgggagatcttctcattccgcagaaacttattctcagaacaatgcaggaggtgattcgtgaaaaaggtgcagcattactgagatattatccgtcaaacggtatggaagcattaagaaagcatattgccaaacagatgggagcttatggctgtacaatgaatcctgatgagattattattacagacggtgctctacaggcacttacaatagctttgaaatcggtgactaaagccggagatacaattgcagtagacagcccttgtgtattttctgtactggaagtgatgatgcatcttgaattgaaagtaatcgagattcctgtacattacagaagtggttttgatgcagaatatttcagaacagcctgtaaagaaaacgagattaaggctcttgttataactcccaattttcataatcctacaggaattataatgaaagatgaagtaaaaaaagaagttttgggcattgcagaaacgtatcagttgtgcattgtggagaatgatatgtattctgacctttattttgaagaacaaagaccgcgcagcatacaaagctttgataaaaaggggattgtgatgacctattcatcattttcaaagacattggcaccaggaatacgtctgggctggctttatgccggaaatttttatgcaaaatccgaaagagtcaggtttgtattagggcgtacggtttctcctgtttatcaggagctggttttgaaactgttgcagggaaacagctatgaaagacatcttcgggtattccggaaaaaactcaatcagcaggcgatgcaggttttggatgctttaaggaattcatttcctgaaggttcttattttcacaaacctcagggcggctacagcatttggggacagcttccggagcatacggatatgcagaaattttatcaatattgtgagacacacagcatcctatttacgccagggcatactttctcattcacggataaatatgatggccatttccgggtggtctttgcggaaaggattactcccgaaagcttaaccttattggggaaagcagggaaaaaggttaagaataggttactttgaacataagaactttattcaaagcaggattttaaacttcaattgacaggtataaaaacatgttttgtggaatatcagagataagagattgcctgttttttcaattaaggccatattgtactttcttgcctttgtcaatttccaattgtgggatattatcaatcattttaaaattaaaaccatcaatccatttttctttcgtaaggtcaatatctacccctgaaatgatatgtttctggaagaaataagtaatatcttcattcagatattgcagagctgtattgagaaaaagttcatctgtaaacctgagtttcttttccgtacatactttcaataattcacgcatcagaacatccagcgattttttataatgggtttttattaaaatatgattatccagccagaaagcaaaaatagcgccccgtctgtagggtactttttctacatcacggcttttccagaaatcatcttttattttataattcggaatatttcgttgtggattcttccaatgactttgaatgacttcagtattgaatgaggaaagccactcatctatagaaatatctttgattcttaatctgtttttataagtataataatcagtaaagccttcactaaaccaataattaagctcttcgttcttattttgaatcttatttccaatccattcgtgcatcagttcatgatgaagaagataaaggtaggcacttttgttgttgaaaggattattagttccctggatcataaatgcatttttgatagcagaccctgttgagctatatcctttgaaaaggctgtctttttgtgaaacagtaggggttaaggtaatcgtataataatcctgatcataatctttccagaaatctctttgagactgtatcgcttttttgaggtttgaaaaaaggaaatcatctgtaaatccgttttgccactgatcccttaatgcaagataaactggcttattttgtattttaaaggaataaaacctataatcacctcctataaacaatgagttgtaaaatccttcccaaagtgttgttttgatgttttggacccgggcctgtgtagcaaaattattgtgaagtctgaatttcacagggaaatttatccattcaagggaaaactcaaattccctgtcttccggtatttttgtaaatgaaacgggaactatgaataggtttttacctaaaacgtggaagaatgtattgttaatcttgggacgattgaatattttataattaggatctttaaaatcctgtttaatatgatagacaagtgaaactttgtttcctgttttcatcctgacttttattttattcttttccggaaggttttcaaaactaatatccggattttcatcttttgatattgtaagactgttgaagagattattttcgccccagttttcattggcaaaatagaaggaaatggtatctgatggttttttaaggatataatcaacctgaacttttaatccgttttgctcaagatctgcatcataaaagattttgtaatttattttgttctgagaataggtgagcagaggtaataataaagtcagaatgaataatttctttaacatggataagtcgttttttcaaatttataataaaattcgaaaacttcggcgttgatgcttagttgcatttttgtcaggcattatttttaaatgatgttgttttgatttatcctcggttcttgttgattcttaatggtttatttaattataggcccttgctttatctaaaatccgattatacggctgtttttctacaataatttgattttattttaaaaattaaattgaatttaaaaaagacttaaaaaaaatgattaaatgaactattttttttcaacacaattaggctggaatcaccataaaacctatatttgcagcctaaatttttaaataaatgaaagaactaattgaaaaaatcaacgcagaatttgaagcgttcacaactgaggcaaaccaacaagcagaaaaaggtaacaaagcagctggaacaagagctcgtaaagcagctttagaactaagcaaattgttcaaagacttcagaaaagtttctgtagaagaagctaaaaaataatttactttcagccggcttttgaagccggctttttttatcccccaattcgatgattttctaaatctgaaatatgttaaaaacgctcaatgatagagcgattttccttacattcaacagataatcttaaatgctgttttatgaattatagccataaggctgattttgttattgtatttggataaaaaaattaataaaatcattgtaaaacctcttttttaggcttaatctttcatcatctccccaatttcctttatctttaaagcaatcaataaatagtatgaggataaatagattttttgcagtgcctgcggtaatgctggctgctcagttttcatgggctcagataaaggttgacccgaaagaaaggcttagccctgtcgtaaaaagttttgtagatgaagtaaataataattcccagctggaaaatctggcttctgagctgctcgacggaatcgggcctcgtcttgtgggaactcctgaaatgctggctgccaacgaatggagcgttggtaaacttcgttcctggggggtagatgccaatcttcagcaattcggaacatggaaaggatggcagagaggaactactcatgtagatatgacctatccgcgtgtaaaatctctttccgcaacacagcttgcatggagccctgctaccaaaaaagccattgaggcagaagtgattattcttccgaaagcagcctccaaagcagaatttgatcagtggcttccttctgtaaaaggaaaaatagtgctgatggctcaatatcagaagataggacgttctgatgagcagatcaaagaatttgcgactccggaactgtatgaaaagcttaaagcagaaaaagaacaggcagccaaagattttacagcgtatatcaagaacataggatatgataataacagtcttccggaagctttagaaaaagcaggagcggcaggaattgccatttcaaactggacaggcattatgggcgctaacagaatatttggtgccaaaacatccaaaattccaatgattgatattgatgtggaagattacggaatgctttacagaatggcagaaaagggcacccagcctaaaattaagattgatgcccagtctaaaatacttcctgaagccaaaagctttaataccataggaattatcaaagggaaagaaaaacccgatgaatatgtgattctttctgctcaccttgactcatgggacggagcacagggcgctacagataacggaaccggtacgattactatgctggaaaccatgagaatcctgaaaaaatattatcctaataacaagagaactatcgtcatcggactttggggaagcgaagagcagggattaaacggttcaagaggttttgtggcagataatccgcagattattaaaggagtacaggctgctttcaatcaggataacggaaccggacgtattgtcaacatcagtggtcagggatttgtaaaggcttatgattatgtcggaagatggcttgacggagttccgaaagcagtaagaagccacatcaaaacagatttccctggaatgcccggcggcggaggttctgaccatgcttcattcgtagcagcgggggtaccgggaatttctttgggatcccttaactggggctattttggatatacatggcatacaacaaaagatacctatgataaaattgttttcgatgaggtaaaaaataatgtgattttaacggctgcattagcatatatggcttctgaagatcctgaattcagcaacagagaaaaaagagtgatgcctcaggatgaaaaaggagagacggtaaaatggccggagctcaaagaaccgagaagaagttctaaggattataaataaagctttttatacaattagataaaaatagaaaaggtcatcataaagatgatcttttttattggctgattttctatcaattcttaattctgttaggattattgaagcccgacatcctgtagatctgaaaacttaaagatggctggctgataacgtgaatctgaaagttcaccaaatccatattggcaaaagacaaaaggtaatccattggcttttgcggagttataatccgtttgggtatcaccaatatatacggaatcttcgatggctaaatgattcctttccataagaagctttatattttcagattttgttttttgggttcgtccatgggattcaaaatcaatgaaaagatcattgaactgataatattctaaaaatgattcaatataaccatcctgagagttgcttacaataaaaagagagtgggtactggccagacttttcagggtactttcaacaccatcatataaaatcccaccctgtatgtgtaatattttattttcttcagcaacaatttcagaaagaagagcttgagcctgtagatctgaaatgcctggaataatatcttttacaatatcatgagccaataatcccatatactgattcatgtcttcgggtttcaattctctttggattagctgatgtttacccagtacttcattccagattttgataatggtagccctggaatcccataatgttccgtcaagatcaaaaattaagttctttgttttcaaaataaatattttgtaatgtatgttttagtttacagtgaaaaattacagaatcatgctcagctgcactctttttctggcttcatccacttccgttacctttacacgaacatgctgatgaagttttaccacttcattaacatctgatacaaatccgtcttttagctgggagatatgaaccagtccgctttctttgattccaagatctacaaaacacccgaaagccgtaatattgttgacgattcccggaagaatcatgcctgcttttaaatctttaatgcttttaacattcggatcaaattcaaatactttcgcagcctttcttggatccagtcccggtttttcaagctcttttaaaatatctttaattcctaaaatcccgatttcacctgttatataactttcaggttttatcagggctattttgtctttattggcgataagttcatcggttttaatacctagatcttttgccattttttctacaattccataagcttccggatgtactgcggaattatccaatggattttttgcatttgcaattcttacaaaagcggctgcctgctggaatgctttttccccaagtcttggaacttttttaagctgttttctatcttcaaaggctccattttcagcacggtaattaacgatgttttcagccattttttctccaattccggaaacatagcttaacagtgatttacttgcggtgttaagattaatcccaacagaatttacacatttcattaccgtagaatcaagttcatttttcagttgggtttggtctacatcatgctgatattgccctacaccgatagatttagcatcaatttttacaagctctgccaacgggtcagaaagtcttctcccgatagatacggctccacgaaccgttacatcataagtcggaaattcttccctcgcgattttacttgcagaataaaccgaggccccggcttccgaaactacgaaaacctgcaaaggtttatcaaaagcaatctttttaataaaaaattcagtttcacggcttgcagttccgtttccgatagaaatggcttcaatattataagcattcaccatagaacggatctttttcatagccattccgctctcattctgcggagcgtgaggatagagggtttcgttgtgtaataaatctcctttttcatccaggcaaacgactttacatccgcttcggtatcccggatctattgccagaattcttttttctcccaaaggcggggcaagaagaagctggcttaagttttcagagaaaatttcaatggcttttttatctgctttttctttggcttcctgcagtgcctcattagagattgcaggctccagaagtcttttgtaactgtcttttatcgccagtgcaatttgatccgaactttcattattagatttgataacagccttttcaatgaaatcaatggcttcttccttgtcaattcctacatttgtttttacaaaaccttcagcttctgctcttaacatagcaagaagtctgtgagaaggtgttctgctgagactttcttcccactcaaaatactgagagaatttctgtgcatcttcttcgtcctttttagcttttaccaccttggaggtaaccacagctttacgttgaaacaaccttctgagattcttacggacatacatgttttcattgatccattctgccatgatatctcttgctccctgtaatgcatcttcttcggaagtaacttcatgggtaagatattttgaggccagaaacagaatatcgttatttttctggctcatgatgattttggctaaaggttccagtcctttctctttggcagtatctgctttggtttttttacgctttttgaaaggcagataaaggtcttccagttcctgtatatcaaagctttcttcaattctttgctgaagctcagatgttaaagagtcctgttcttctatcgattttaaaatggattcctttctcttaacgatttcttcaaattgcttgctgatctttgagatctgttcaatctgtgtttcgtcaagatttccggttttgtcttttcggtaacgggaaataaaaggaatggtgcagtcttctgctaataattgtaaggtattattgatgctcttttcagaaatattgagctgcttctgtataaattctacggtcgtcattgttctgttttcggatcgctaaaatagggttttaaaacgaaaaaaggcgagttgccccgccttgaatgttttcacaacggaataatccttattgtgaattgctttcaaaatttataatacaaatatagaagaaaaaatatttaatacaattatggaaatccgtaatttgaatgctttttttattgctatttttatgtggtatcaaaaacataaccacgatgactaaaaatatacttggcttagacttgggaacgaattcgatagggtgggcattgataaaacaggattttgaaaacaaatacggagaaattcttgggatagggagcaggattattccaatgtcacaggatattctgggcgattttggaaaagggaattctgtttcgcaaaccgcagaacgaacaaaatacagaagcgtacgaagactacgggaacgattccttctaagaagagagaggcttcacagggttttaaatattctgaactttcttccggaacactattcttcacaaatagattttgaaaagcgattcggaaagtttaaagaagaaaccgaacccaaactggcctggaaaaatattggtagacagttttcatttctgtttcaggtttctttcaacgacatgcttgaagaatttaaggcaaacggacaggatttaaaaattccttacgactggacaatttattatcttagaaaaaaagccctttcacaaaaaattgaaaaggaggaactggcctggattcttttgaattttaaccaaaaacgtggatattatcaattgcgtggtgaagattttgaagaagaaaaagataagacgtttgttctattaaaagtcgaaagagtagttgattcaggcgaaaatattaaagggaaaattctatatgatgtttattttgataatggttggaaatatgacaagcaaattgttaagactgaagactggattgatcgtacaaaagaatttattgtaagtgaatccattttaaaaagtggggaagttaaaagaactttcaaagcagttgattctgaaaaagattggattgcaataaaaaccaaaaccgaacaggaaatcgaccaatctcgcaaaacagttggaatttacatctatgaagcgcttcttcaaaatccgaaacaaaagattaaaggaaaattggttcggacgattgaaagaaaattctataaagatgagctaaaacaaattttagaaaagcaaagggaatttcatcaggaacttcaaaatgatgatttgtataatgactgcattcgtgagttgtaccgaaacaatgaagcacatcaacttactctgagtaaaaaagattttgttcatcttttgatggatgaccttattttctaccaaagaccgctgagaagccagaaatcttctatttccaactgtacgttggaatttagaaaatataaggatgaaaatggaatggagcatacacagtacttaaaagcgattccaaaatctaatccttattatcaggaattccgcctttggcaatggatctgcaatttaaatatttatagaaaagatgatgaagcgaatgttaccaaagattttttaagtacggcccaagattttgaaaatctgtttgaatttttaaataatagaaaggaaattgaacaaaagccattgattaaatttctttttgaacaaaaagatatcaataaaaaattgtttaacgctgaagcagaaaaatatcgctggaactatgtagaagacaagaaatatccttgcaacgaaactaaaacgatgatttcttctcgattggataaagtggataatatttctgatgatttcctgacgagggacattgtgcagaaaatttggcacattatttactccgtcaatgataaaatagagtacgagaaagccttaaaatcttttgcgaaaaagcatcatttagatgaaagttctttttctgaggctttcaggaaatttccaccatttaaaagtgaatatggttccttttcggaaaaagcaattaagaaattgttgcctttgatgcgattaggaaaatattggaactatgcagatattgatacattttcaaaagatagaattcagaaaatcattaatggagaatatgatgaaaatatcaaagataaagtaagagaaaaagcggttcatcttacgtcggaaaatgatttccaaggtttacaattgtggttggctcaatacattatttacggaagacattcggaagcatcaataatagggaaatggaattctactaatgatttggaagtgtttttaaaagattttaaacaacactcacttcgcaatccaattgtagaacaggtaattacagaaactttgcgtgttgtaaaagatatttggctaaaatacggaaatggagcaaaagatttctttaatgaaattcatattgagttaggaagagaaatgaaacttcctgctgatgatcgaaaaaaactcactaaccagatttctgaaaatgaaaataccaatctccgcatcaaagctcttttggctgaaatgatgaatgatcattctgtagaaaatgttcgtccgttttcgcctatgcaacaggaaattctgaaaatctatgaagacggagttttaaattcaggtattgagatcgaagatgaatatttaaaaataagcaaaaccgcacagccttcatcagcagatttaaaacgatataaactttggctggaacagaaatacaaatcgccttacacaggacaaattattcctttgaataaattgtttacgccagaatacgaaattgaacacattattccgcaaagtcgctattttgatgacagttttagtaataaagtaatttgtgaatctgcagttaataaattgaaagataattacattggcttagaattcattaaaaaattaggcggaactgttgtagaatgtggaaacggaaaatcggtaacagttttaaaagaagatcaatatgaagattttgtcaaaaaacattatgcgaacaatcgaagtaaaaggaataagcttttattagaagatattcctgaaaaaatgattgaacggcaattgaacgatacccgttatatcagtagatatatttccggtatactttctaatattgttcgcgttgaagatggttcagatgagggcgtaaattctaaaaatattgttccaggaaatggaaaaatcaccacccaactgaaacaagattggggattgaatgatgtttggaatgatttgattttaccacgttttgaaagaatgaatcaacttactaattcaaaaaattttaccgcgtggaatgaaaatcatcaaaagtttttacctaccattccaattgagttttccaaaggattttcaaagaaaagaattgaccatcgacatcacgctttagatgctttggtgattgcctgtgccacaaaagatcacgtgaatttattaaataatcaatcggcaaaatcggataccagacgctacgatttgaaaaagaaattaatgaagtttgaaaaagttgtttatcacaatacgcaaacaggacaaaaaatagaaagggaaataccaaaacaatttttaaaaccttgggaaaactttacagttgaaaccaaaaattctttagaagaaattattataagttttaagcaaaaccttcgtgtcattaataaggcgactaattattatgaaaaatatgtagagaaaggtggtttaaaaaataaggaaagagtagaacagacaggaacaaactgggcgattagaaaatcaatgcataaggatacagtatccggaaaaatagatttaccttgggtaaaagttccaaaaggaaaaattttaacagcaacgaggaaaagccttgatacttcatttgatttaaaatcgataggatctattactgatacagggattcagaaaattctcagaaattatctggaattcaaaggcagtccggaacttgcattttcaccggaaggaatagaagatctgaataagaatattgagaagtataatgatggaaaatctcatcaaccgattaacaaagtaagagtttttgaactgggaagtaaatttcaggtaggacaaaccggaaataaaaaagataaatatgtagaagctgcaaaaggaaccaatctgttttttgctgtttatgaaaatgaaaatggaaacagaagttatgaaactattcctttgaatgaggttatagaaagacaaaagcaaggtttatctgtagttgacttaaaaggaacaattgatttttttctttgcccgaatgatttagtatatattccttcagaagatgaacttgaaaatagtagcaacattgacttcaaaaattttaaaaaagatcaaaacaaaaaaatttataaggtagttagttttagtggaagccagttgttttttataaggcaggaaattgccatatcaattgtaaataaaacagaattttccactttgaacaaaatggagcgtagtattgatggattaatgattaaggaaaattgtatcaaattaaaagtagaccgtttgggaaatatctctaaagcataatattatgatcacgcgctctatctatatcggcaatcccgcttatctcaaactcaaagatgagcagatgaaaatcctctgtccggaaaccaaaacggaaaaggggagtgttcctgtggaagatctgggattactcatgctggatcattatcagattaccatttcgcacaatctgattcagaaaatgatggggaataatgtggtggtgattagttgtgattcccatcatttaccccacggaattatgcttccgctgtatggtcatacggaacattccaacagagtaaaagatcagctggaagccagtgaaccgcttaaaaaacagctttggaaacaaacggtggaatgtaaaattgaaaaccagaaaaatgttcttatgaaattgggaaactattatgaacctatgattcagtatcaaaaaaatgtactgtccggagatacaactaatatggaaggtattgcggctcagcattattggaagtatctaatcagcctggattttttaagacagcgtttcggagattctcccaatcagtttttcaattttggctatactgttctcagaagtattgtagcaagggctattgtagaaacagggctgctgccggttatgggaattttccataaaaacaaatacaatccctattgtctggctgatgacctgatggaaccttaccgtccgtttatcgatttacttgtcatgcaatggctgaaaatacatccggatatagacgaactgactaaagaatttaaggcacatattctacagattgctaccaaagatgtgaatattgatagtaaaataaggccgttgctcgttgctgttaaaacaacagcttcgtcactatataaatgttatacaggggaaaagcggctgatctcttatcctcaactgttatgaactccgaaaggtttaatgcataccgaattatgtgggttttagtattatatgatctcccgactgagaccaaagctaatatgaaagaagcgaaccgcttccggaaagggctcattgatgatggttttactctttttcagttctctatgtatgtacgtcactgcccaagccgcgaaaatgctgaagttcatatcaaaagagtaaaattcatgcttccaaaggccgggaaagttgctattatgtgcattacggacaagcaattcggagatattgaaattttctttgccagaaataaggaagagccacctccaaccttccagcagctcgaattattctaaattgcaaattctaattataaaaataatctactgaaaatcagtagattattttttgaggctgtgactaatcacgaagataataaattttgaaagcaattcacaacaagcctctggccaaagtttaaaatcgttaagctgtgactaatcacgaagataataaattttgaaagcaattcacaacagtgttgtagatcgttccaaatacaattaagctgtgactaatcacgaagataataaattttgaaagcaattcacaactatctattgctgaattaaaggctcagagaggctgtgactaatcacgaagataataaattttgaaagcaattcacaactcaaatactcaacctttcgcttgctacggtgctgtgactaatcacgaagataataaattttgaaagcaattcacaactatgatctgattaaaagtgaaagaggtgatgctgtgactaatcacgaagataataaattttgaaagcaattcacaacgacataaagccagataatcttcaacagcacgctgtgactaatcacgaagataataaattttgaaagcaattcacaacttgtcttactttatctactattcttggaaggctgtgactaatcacgaagataataaattttgaaagcaattcacaactcaattgcccccgctactgttacaccttttgctgtgactaatcacgaagataataaattttgaaagcaattcacaacaatgcaaagaattttctgccgaatgatcctgctgtgactaatcacgaagataataaattttgaaagcaattcacaaccctatcagattcaaggtcttttaaatagtcgctgtgactaatcacgaagataataaattttgaaagcaattcacaactaaattctattcattaatgtaggattataggctgtgactaatcacgaagataataaattttgaaagcaattcacaacagactgttctataagagaatttgacacatcgctgtgactaatcacgaagataataaattttgaaagcaattcacaacactgcaaagaattttctgccgaatgatcctgctgtgactaatcacgaagataataaattttgaaagcaattcacaacctatgatctatacaaaaaagcatcatttgagctgtgactaatcacgaagataataaattttgaaagcaattcacaacgtaagcggatcatatgtaaatccctctacagctgtgactaatcacgaagataataaattttgaaagcaattcacaacggtcatcatcgtctgaacctgagactaaaagctgtgactaatcacgaagataataaattttgaaagcaattcacaaccatgatccctcgctgctatgatgttgaaacgctgtgactaatcacgaagataataaattttgaaagcaattcacaacgtaaagcctcacagttctttaataattttagctgtgactaatcacgaagataataaattttgaaagcaattcacaaccaggtctggccagttccagaaatctttcaagctgtgactaatcacgaagataataaattttgaaagcaattcacaacgacatatagaacaaagctttataagaacttgctgtgactaatcacgaagataataaattttgaaagcaattcacaactcaggttgaaaaagagtgttcttcaggatcgctgtgactaatcacgaagataataaattttgaaagcaattcacaacccgactttatgaagatcaatagcagctacggctgtgactaatcacgaagataataaattttgaaagcaattcacaaccatgatagtaaacggagagctggtctgcaagctgtgactaatcacgaagataataaattttgaaagcaattcacaacgaaaagcatgcaaggcactgagattaagccgctgtgactaatcacgaagataataaattttgaaagcaattcacaacgaggatgaaagattcaaacaacgatgtatagctgtgactaatcacgaagataataaattttgaaagcaattcacaactataaaaaaatgtaaacatcacccaaagatgctgtgactaatcacgaagataataaattttgaaagcaattcacaacagaaaggcttctagcttcttttcctgatatgctgtgactaatcacgaagataataaattttgaaagcaattcacaactaggctttacctatggtgcaagtgatggaggctgtgactaatcacgaagataataaattttgaaagcaattcacaaccaatctcatatccaagtgctgcaaatggatgctgtgactaatcacgaagataataaattttgaaagcaattcacaacacaaaataaaaagcaccttaaacaagatgcgctgtgactaatcacgaagataataaattttgaaagcaattcacaacaatattttcattaggatttactccattaaagctgtgactaatcacgaagataataaattttgaaagcaattcacaacaggatgctgattcaggggtttcatgatattgctgtgactaatcacgaagataataaatttttttatttttgccttgaaacagtatttctgaaattttaaatgtataagattcaagctgttttgattctcaatactgatggagtttataccgaatttggaaatatgattgcaaataattgaagattttcacatttcttgatatatgataagatcatacaaatctggtttttctatttttgtacccgaaaacaacaaaatttcaataaacttttttaaaacagttcaatatgaaaaaaattagcgtaattgcattagtaggagtaggattgcttttggcatcatgtgataaaggaaaaacagcagaaacagcagctaccgctcaggaacaaaccgtagcagaaagcaaaggtgagacgctggcagtagatacagtaggttcagtagtaaactggaaagctttccacaaaggaggtatggctccacgttggggaactcttactgtaaagtctggagatcttagcattgatggaggacaggttgcagcaggaaactttgtgatcgatatgaactctattaaagtagatccggcttcagtaacagaaaaagataaaaaaccggcagatcttgaagcacaccttaaaaatcctgatttctttgatgtagcgaaaaaccctacttcagatttcaaaattacaagtgttacagatttgaaagaagcgccaaaagatgcgatagcaggagctaataaaacagtaagcggaaatcttaccttatcaggaaagacaatgaatgttactttccctgcaaaagtagacgttgccgaaaattcagcggctattcaggctaaatttacggtaaacagagcagattgggggcttaaattcggtacttctgaagcagatcctgcagaatggatgatcagcaaagatattgagatcgctatcgacgtaaaagctaaaaaataagttatttaaattataataactacgagagctgccttcatgaaggcagctcttttattttgggactggaaatacaatcaattcaaaatctttgaatgctgaattctcacaccatactcactcccaagatataaaggatttccatgcttttcagaccaaaatccatccaataggtctttacttaggcatcggtataccgcaactcccttataaatggtatgatcttcaccctcatagttgaaattgatcactaaaatttggtctttataaaatcctgttccgttttgctgatgttcaccaatcatccactgagcaataatgcggttattttcatcaacagatagagttaatataccatgataagttggcagcgaagattcctcctggttgcttccttcaatggagtagcttcccaccagatcgtgtactgtcattgatttatttttaaaagagcaaatttaaaacattaaaatcatattaaataatcttcattgtaagcttaaaatcagaatgattcatcttaactggactttacttcttaaatacattcttaatggtttaaaaagattgaatatttaagaacattctatagattatgctttatttttgctgcaaattaaatgaagaatgattccttttctgttgataataaatgtgcttgcattaggtgcttttggttttgataaatggcaggccaaaaagcatcaatggcgaatttccgaaaatacccttttaggaatttctctgctgggtggaattataggagccgctgccggaatgattctcttcaatcataaagtttccaagaaatcttttctcatgaaatttgtattggttgtgctgatagacctggttttgttttatagattgttaaggcattgattttgaataggtaatatattccccctgaacgttaaatattttaataatttactttttatgtgtattttttttataattttatcgtgctaataacaaataaacaaatcaatatgagaaatcttagaaaaatttccagaactgaaatgaaatcagtccagggaggaatcatcaaaggaatggtaagatgtaaggatgccgacacatgcgccgtaagatggggatgggcaaccggattctccagcaattgtgcagagtttgacatcatttgcggagaaccacctgcagtagatccatgcgaaatacaagcttgtgtatagataacttaaagagtgtttttcggacactctttttttatgatcctgtccataagtattttaaacaaaatattaaatatttgtataactaaatattttttcattaaaattcactacttttgcacccgtaaaaatcttttatgcaaaacattagaaatattgcgattatcgcacacgttgaccacggaaagacgactttggttgacaagatcattcacgctaccaacattttcagagaaaatcaggagagtggggagttaattatggataacaacgatcttgaaagagaaagagggatcaccatcttatccaagaatatttctgttacttataaagacacaaaaattaacgtaattgatactcccggtcacgccgattttggtggagaagtagaaagagtattaaaaatggctgatggggttattttgttggtggatgcgttcgaaggaccaatgccacaaacaagattcgttctacagaaagctttggaattaggattgagaccattagtggtgatcaataaagtagataaaccaaactgtcgtccggacgaagttcatgataaagtattcgacttgttcttcaatcttgaggctacagaagagcaattggatttccctacattttacggatcttcaaaacagggatggttcaacacttcattagagcagactgaagatattttaccactattagatggtatcctacaatatgttcctgaaccgaaagttacagaaggaaatcttcagatgcagattacttctcttgacttctcttctttcttgggaagaattgcaataggaaaagtaacaagaggtgagatcaaagaatctcagtggattggtcttgctcaggcagaaggtaaaattgtaaaaggaaaagtaaaagaactttacgttttcgaaggattaggaaagaaaaaagtaactgaagtaaaagcaggagatatctgtgctgtagtaggtttcgatgctttccagatcggagattcgttcgtagatcttgaaaatcctgaaccattggaaagaacggcaattgatgagcctacgctgaacatgacgttctctatcaacaactcacctttcttcggtaaagacggtaaatatgttacttctaaccacctgaaagaaagattaacaaaagaattagagaaaaaccttgcattaagagttcagcagactgatgatgctaatacattccttgtattcggtagaggtattcttcacttatctgttttgattgaaacaatgagaagagaagggtacgaaatgacaatcggtcagccacaggttatctataaagaaattgacggtgaaaaatgtgagccttatgaatctttggtagttgatgttcctgaagaatttgcttcaagagtaatcgatttagctactcagagaaaaggagatcttcacattatggaaactaaaggtgaaatgcagcacatggagttcgaaatcccttcaagaggtttgatcggactacgttctcagatgttgacagctactgctggtgaagctattatggcacaccgtttcacagaatacaagcctttcaaaggtgctatccctggaagaaacaatggtgttttaatcagcaaaactacaggtcctgctacagaatattctattgctaaattacaggatagaggtaagttcttcgttgatccgggtgaggaaatctatacaggtatgatcattggtgaacaaaacaaacctggagatcttgtagtaaacatcgtagaagcaaaacagttgaacaacatgagggcttctggaaaagataaagatacaggggttgctccgaaaatcttattctctcttgaagaatgtatggaatacatccagggtgatgaagccattgaggtaactccaaacttcattagaatgagaaagaaaatcctttctgaagaagaaagaaaaagagttgaaagaggagcaaaagcttaatctaaaattcttaaaatataatagagcctcgattttcggggctttttttctatgccaacccattaaaatgcttattttggcataataatctctaagaataaaaataaattttaatgtagttttgtgactatgagaatgaataaattaaaacttatcgttttattgggcttttttgcttcttacaccacctcatgttcagttcagaacaatgttgtaaaaacaccatccacaaagaatcctacgaaacctaccaataatacaaccccaccaaaagtaaatccggtggctacaaagcctacaactggaactacagcttcaactgaagaaaatttcagaaccaatcttcccgaaatcaaaagagaattccgtggagcatggattgcgagtgtagccaatatcaactggccctccagaaatgaccttacagtagatcagcagaaagcagaagctatcagcatgcttgatatgttgaaagataataatttcaatgcggctatttttcagatcagaccttccgcagacgcactttatacaagtaatatcgaaccatggtcttactttcttaccggacaaacgggaaccgctccttctcccaactatgacccgcttcagttttggattgaagaagctcacaaaagaggattggaactccatgtttggttaaacccttaccgcgcacaccacaccaacggcggtgctgtgaatagcctgtcaatggccaataagctgtctgatattgtgataagattaaagaacggaatgtactggtttgatccggctaatccgaaaacacaaggccacgtatccaatgtggtgaaagatattgtaaaaagatacgatattgatgccgttcattttgatgattatttctatccttatgctacctacaataaaggggctgattttcctgataatgccacatggaatgcttatgtaagcagtggaggtaccttatccagagcggattggagaagagataacgtgaataaatttgtagaacgtatctataaagaaattcacgcagaaaaaaataatgtaagattcgggattagtccatttggaatctggaaacccggatatcctgcaggaattgtaggctcctctcaatatgacgaattatatgcagatgccaaattatggttaaataaaggctgggtagattatttctcaccacagctttactggcctatagattccaagggacaaagctttgaagccctgttaagctggtggcagtctgaaaatacaatgaaccgtcacttatggccgggattgaatactgttgagattaaagtatcagaccgtccaacggaaatcaaaaaccagattgctatttccagaaatatcctgaaaaatgatgccggagaaatacactggagtattgccgggcttaccaaaaacccgaacatgctacctgctttgaaaagtggaccatacagtgaaaaagcattggttccgaaatccccatggatcaaagctgtaccattgcagactcctaccttattcattacggataatgggagctttgcacagacgagctggagtacaaaaaatgccgctgatgttttcctgtgggttcttttctcacaatacaacggagtttggcagactgaaatcttaacattggataccctttcaaaagatatccctaagtttaaagatggtaaaaaactgaatgcagtggccattaaagctatcgacagattaggaaatgaaagcgattatacagccagaaagattaaatagataaggataaatcctaagttattgcgaacctttaggtgaagcagtctcaataatagtttaaaaaccagttctccaaaagagctggtttttattttagaataactataaattatcaacttaaataattgaaatacagttgtattttaaagtgtttttgaaaaaattatacaaaacaataaccttatcggaactgtttttgcatgattcattctataatcaccaaaatataacattatgaatactaaaagactttccgcaaaaatagaaaaagcgcttagtgaccagatgaacaaagaaattcatgcatcacacatttttttatcttatggaatttgggcagatgacaaaggatatcagggaatagccaattttctttacaggcattctcaggaagaaagaaatcactctatcaaattcatggaatat

SEQ ID NO: 1239 - DNA, 24257 bp, synthetic construct
  misc_feature 1..24257: note = Synthetic
  source 1..24257: mol_type = other DNA
aataaaagaagaaaactagaaataatggaatcacatcgattgtttttgctattattcttaatttttcattcccaaaaaaatcgactttgtaaggtaaatcatattcaaattcatcataaatacgtctgccttccaaatcaaaatttcgagtcgctctccggattatttttctttctttaagttctgaaatttttttcattttaattgacataaaaatctagaaataagaaaattacaaaaccatacttagctgaattctctttctcgcttcatccacttcagtaactcttacctgaacgtgttgatgtaatttcaccacttcattgacatcagaaacgaaaccgtcttttaattgagaaatatgaacgagtccgctttctttaattcctaaatctacaaaacacccgaaagccgtaatattgttgacaattccgggaagaatcattccggtttttaagtcggtaatcttttttacattcgggtgaaattcaaaaactttggctgcttttcttgggtctaatcctggtttttctagttctttcaaaatatcttttattcctaaaatcccgatgtcttccgttatatatttttcaggttgaattaaattgattttctctttattggcaactaattcattggttttaatgcttaaatcttttgccattttttcgataattccatacgcttcaggatgtactgccgaattatctaaaggattttcgccattggtaattctaatgaaagctgcggcttgttgaaaagctttttcgcccaatctcggaactttttttagctgttttctattttcaaaagctccattttcagcacgatagttcacaatattttctgccattttttcgccaattccggaaacgtagcttagtaatgatttacttgcggtgttcagattaattccgatagagtttacacatttcattacggtagaatccagttcgtttttcaattgagtttggtctacatcatgttgatattgtccgacaccgatagatttagcatcaatttttaccaattcagccaacggatcagaaagtcttcgtccgattgaaacggcgccacgaacggttacatcaaaactcggaaattcatctcttgcaattttacttgcagaataaacagatgctccagcttccgaaactacaaaaacctgcaatggtttatcaaaaccaatttttttaatgaaaaattcagtttcacgacttgcagttccgtttccgatagaaattgcctgaatgttgtaggcattcaccatcgaacgtatttttttcattgccattccgctttcgttttgcggagcatgcggataaatggtttcattgtgtagcaaatctcctttttcatccaaacaaaccactttacaaccacttttaaagcctgggtcgatggctaaaattctcttttcacctaaaggcggagctaataaaagctgacttaagttttcagaaaatatttcgatggcttttttatcggctttttcttttgcttcctgaagcgtttcgttggaaattgcaggttctaaaagtcttttataagaatctttgatggctaaagcgatttgctctgaactttcatttttagatttgataattgcattttcgataaaatcaagtgcttcacctttatcaattccgatatttattttcacaaagccttcagcttctgctctaagcattgctaaaagtctgtgagaaggagttcggttaaggctttcttcccactcaaaatattgtgaaaatttttgtgctgcttcttcatcttttttagcttttaccacttttgacccgacaacagctttgcgctgaaaaaggcgacgcagatttttacgaacgtacatattctcgttgatccattctgccataatatctcttgcaccttgcaaagcgtcttcctcggaagagacttgatcattcaaatattttgaagctagaagctcaatatcctgagctttttggctcataatgatcttggctaaaggctcaagacctttttcttttgctgtatcagctttggtttttctgcgttttttgaaaggtaaatacaagtcttccaattcctgaagatcaaaactttcttcaattctggtttttaattcaggatttaaagcatcttgctcttcaatagattttaaaatgctttccttgcgttttacgatgtcttcaaactgtttattgagtttaaaaatttgctctatttgaatttcgtccagatttcctgttgcatcttttcgataacgagaaataaacggaatggtgcagtcttcagatagtaattttaaagtagcattaatgcttttatcagataggttgagtattttatgtataaattctgttacagtcatgccgttttttttagaatggctaaaatacagacttttttaaaggaataaaatatatgggattcgcaatttaaactttgtaaaatttattcatcaaatatgtttaatgaatctggtaatgaattaaatacattgatttgttgaaaaagatatataatctacatttttagtagattatataattattttatataattatgttgtgatataaataaaaatactatatttgtgcaccatcacaaaataatacgcctatgagggaattttctacttcttctatttcttttgtatacataaattcagatgtttacctaatccaaaaaacatctcagtttcattacttaattattaatccatattctattttattatgaacagatttttaacaattctggggattttgctgtgctttcagctcaaagtctccgcacaatgcatgccggtaccggtcccttttctagagtctttcagcactggtgcattgcctacctgctggacgagtcaaaaccctacaacaacaaataatacatccatatttgttaaatggagatttagcacatctgctggttatggtgctaccggaaatggcggaaagcctgcaggaacttttgcatgggtagatgcaagtacaccctatgataatgagcatacggttgagcttattagtccgcagattaatttgaccggattgacaaatccttatgtgaaatttgaatggtttaaaaaccatcttacctcagctacgggaactcttcctccttatgagaacaataaaatgaaggttgaagtaaataacggaagcggatgggttcaaatttggaccgataatagcaatgctgctgagtggagaacggtaggcgttcctcttgcgacaagttatgtaggaacaactattcaacttaagtttacagtcgataaggatgttgccaacaacggatacttttatgatgatgtacttttggatgaagttcaggtattacaggcaccaacctgttttgaacctgtaattgcattggcgacaaatattgctcctacttctgcaactctaaactgggcagccccattagctccggcaccggcaccagctggaggctatgaatattattacagcacaacaaatacgcctccaactgctgcaacagtaggaactattgttcccggattttcagctaatatcactcctttagtttccgcaactacttattattggtgggttcgttcggtatgttctgcttcggataaatcattatgggtagagggggaaccttttactcctggacagattggtggtggtacagcaactcattcatttttgcctgtttattcttgttcgggatttaattattctcaacaaatttatacatcaacagaagttgcaggagcagtgggaacgaataacatgattacatccataaagtttttcgtgtctagtattgggacagctcaagcaaattataatcagtgggtagtatatatgggaaatacatctcaaaatgattttcctactaccacaagttggattcctgccggaaacatgactcctgtttttactggaacattaccagctatggtaaccggaacctgggttgaaattcctcttgcgataccatttctttgggatggaacaagtaatatagtagtagcggtggatgaaaatagttcaggaacgtcttgtaccgcaaactggggaagttataccgcaggagcaaataaagggttacttttttatagctctatcactaatccagatccaatgaatcctcctggagcatctagtagatatggtgttttgccaaaaattcagtttgttggtactgttatgccttcatgtactaatgtaccgccgtcaaatattgtagtaagcaatattaccaataattcggcttctgtatcttggtctgccgctcaaaatgcaacttatgtcgtaagatatagagttttaccatcgggagcgtggcaaaccattaatgttacaacaccatttacgaataatatactgctttccggtcttattgagcaaactcagtatgaagtagagattgctacaatttgtggtactcagggtgctttttctgcaccaagtacttttactactcctgctcttacctactgtagttctggaactgcatcagttggaaacggatacatcagtaatattaccatgataggaaccaatgttgcaaccacatctaataattctggagccactacctataccgatttttctaatgatccttcaaagaccattactttattaagaaattcggttaataatacgctgtcggtgggaagaactattacttcaggtacttattctacctatgcttggattgattttaacggtgacggagtttttaataataatcccgtaactactgcaggaggagaacgaatcatgaatttttcgtattctaatactacacctgtaaatacaacttttaatgttcctgcaaatgcttatgtaggtaccagtaaaatcaaaatgcgtgtcattgtgtatttaagcgcaccggcagatgcttgtgctaatcttaccagtaatggagaagtagaagattatcagattaaatttatcgatcttcagccgtgtactactgcttttccaacaagtattgttgtggggaatctcactcatactacggcaaatgtatcatggatgccgacagccaatgcaacatatgtaatcagatggagactgggaacaacaggtgcatggcttccaagtgcagcaggattaacgcttcctgtaggacaaagctctcatatcattactggtcttactgagcaaactgcttatcaggtgcaagtggcaacgatatgtggtggaattcaaggagcattctctccattgttaaatttcacaacgccaccagttacttactgtaatatgaatggaacggggactaatgattatatttctaatgtaaaaatgacgcctgtgaattttccaataatggagaatatctcacttcaaaccaactatgctagttatacaacacctgctactttaattaatcttgaaataggttcggtagggaatcaaatttcagtatcaaaagcttgggcaggaacgacgtatggagattcggtacacgcttggattgactggaatagagatggaatatttacagatagtgaaaaaatcatgaatactccttccaatacatctactcctgttacagcaacatttagtgttccggcaactggagtttatacagggacgaataccacaacaatgagagtcgttctgaagagaggaagtgcacctgtaatgtgtcaggatgctgtgaatggagaagtagaagattatgctgtaagattaaaaccatgcaacaatactactcccggaactcctacttttaatacaatcacgcataattcggttattattaactggactccagctaccaataacaacgcgtttgttttagaatacagaccggtaacaaatcctgcttctgcgtggactacgatgaatctttcagtgctaggaggaaatccgccagtaactatttctgcgctaactcctgctacactttatgaagtgaaagttgcagcaatatgtggaagtgggggagcaggtgcttttactccaatacagacatttacaacaaaatgtgacccaacccctccgaatgtggtaatatctaacatcacatcaaattcggcaatagtaacatggaatccgattgttccaaatgctacttatgttttaagatggagagaggtgggaactaccgtttggaataccccagcattaccgccaccaccagttaactcttatgtgattccaaatctggattcttataaaacatatgaagtacaggtagcgagtatttgtaacggtgaaacaaatcctaatccatgggcaaatacgcagatatttaccacggtaagagtttgtgaagtacttcctcccggatttactattactcaattaacccctacaactgcagaagtggtttggagtgcttataccggtactggagctactaataattacatattaagatacagaaaagtaggattaccaagctggacaactattaatgttagtaataatacctatacaataacagggttattagaattaactaaatatgaaatgcaggttgcgaatgtttgtagtggaggacctgggaattttacccctctttactattttacgacccctacagtggtttactgctcaatgcattcaactaattttgcctctgaatatatttcaaaagttactgctacaccaaatggtaagcctcaaatgattaatatttctacaggaactacatattccgatttcacaggaaacgctacaaaattcattgaattaattcagggttcaacaggaaatcaaattactattgacaaaactcaaggcgcagattctggagtagctgtctggattgatttcaacagaaatggagaatttgaccttgatgaaagaattcttgctgatgggcttaactcaaattctactgcaagtgcaacattcagcgtgccatctgatgcattcatcagtatgacaaactctaaatatgttgtaatgagagtagctatggctaaaggtgctataccagttaactgtatcagtttcgatgatggggaagtagaagattatacggtgagaatatcaaagttaccaattgtaaattcggttaaccaaacagatattctaatttatccaaaccctgttaaatcagtcttgaacgttaaaaatattagcgaaaaagcaaactataagatttatagtgctgctggaagacttgtatcaagcggattaatcgttaataataaaattgaggtaagtgctcttattagcggtgtctatgttattgacattgatgataagaaaggaaatgcgcagagaaaattcattaaagaagattaactgttttaatttccatctataaaaaataagctctcaattctgagagcttattttgctttattgaagatacaattgataagatttctattttaaaacctcattgtagtacaacaagtcattattttcatcaaaaccaataatcatcacacggaaatttttcgcatcatcattattataccactgaacaatagtaggttccttaggtttactttccagataaggattccagtataaaatacttcttttgtcctcaggaacagatcttgcactttcttcatcgtagatgccgttattaaaaggtatttctttgtcgtaaccgtttagttttatttctgtaagattagagggtagagtagtatctactacagaaccggttgttccgccacgacgggtatagattgcgattgcaccatttcctcctccgaagcttcccgcaaaatttcctttaattacttttaccattgcaatatttgaaacagaaatattagaaatctggcctgcatcaactctcatttcgtccaaaaaaaactccataggtccaccacgatgcgtagcagtataattaccaccctgcatctgaatctgaagaccagcaactctgccttgtaaatattgtaaaatattttgagagccttgtgcgctctgattttcattcactaaatcaaaaatagtttcgtttccacttctgaaaagtggactgcttagttcgttatttagttttttggttaaatctttcttttgtgctttaactttaacttcttcaataagcgtttctttttctcgtaggcttgtttgtgaacttttattcgctacagcacgttctatttcaataggtattgtatctgttgaattgcgctgaaccagagtataattgctaaaaggtagattacttctcaatggtaaaaatgaaaatgcgggttgaaaataaacctgtaccgaatttttgttggttttctcaccgttaagttgatacgaaaaagccattgaatcttcaaaaattaaaccactcaaggtgaacattccttctttgtctgttttaattaaattgtatttaattccctgatcaggcattttgaatattaaattaatctctgcttcagaagcaggttttcccaattttgtagcttttcctttataagaaagaaaattttcaggtttgtatttaataactggaaatgttccggacataatagtttgccagttaaatctcgaccatttttctgaaatcagtaaagcatccaaagcatctgtatttctgtttttactgaaatattgggcaggattataaatttttgaagtcagatctcctgtaagccaaagcgtacttagcaaattgttttcgttctcaggattttcactttcattatccgttatgcttactaaataacttgatatggaagaatcattattaatattgaatgaattgctgtctcgaggttttaaactaagagaaatagcttttaaagatggctgtttaagtttaagagattggggttgcacaaaacaaagccgctgcgcaacaatattctcagactcatcaaaaacggtaagatttagaatcccgttcaccaattgattggtcggaattgaatatgttttttctgaaatattagaaacattagctttataaaccaactgattattgatggttcctataattttatatttattgttttggttaatatttttaccctttaaaacaaatttgatagcatcagactgactttgaacctgtaaattgagtcctgaagaagcaacttctggtaaagtaacaatttgttttgctcctttatcgtcttctatggtaagttgatatttttttccagctataggagtaaaactaaaagaacctgtattttgatcaagtcctttaaaagcaacaagctttgtttgtggattttgtatttctgtaataaaaccattccagtttgttggtgtttcgccttttgattgtagtcttacagcaaatttagtattgatgccatcaataaaagttccactttcgggggaaaccgtggcgacccaaggagcagatgtgttttttataagcttttcagaagatgaaggattgtaaactgtaattggtgtaatttcattaaaatcatcactgaaattgcccatccatgtggtgtaagctctaatgtaataaacattttctttcaaatctgcaggtaagctaatgcttccgctgcctttaccattaattaaaggatagatttttttgctgatttgttttttattttggtcatatagctcgacaaaaacattggttgaaatggtggaggggctgtatccgtcaaatacaaaagaggtaaaccacagattttcaccggcaacatagttttttttactcagaagaagatgtattttttcctgaggataattttcctcaaactttttgagcgcttcttctgctttgttctgagaaaaataaaatggcgcaactattaatgataatgcaataagtggtttttgagagagggtaatattcattgtacagattcgtgtttaatatatctcaaaaatacattttttcttttgctggagaaataattgggaggttttttaagaatttaaattgaagatacaaaaaaaggcgagttgccccgccttgaatgttttcacaacggaataatccttattgtgaattgctttcggatacaaatctaaaaataatatttttaatctgtttacggttttccacatttttataaattttattattgttatttttagaaaattcatttaaactaaaagctatggcaaaaaatatacttggattagacttgggaaccaactcgattgggtgggcgttgattagtcaggatttcaataaaaaagaaggaaatattcttgggatgggaagtcgtattataccgatgtctcaagatattttgggggaatttggaaaaggaaattcagtttcacaaactgctgcaagaacaggttatcgaggtgtaagaagattacgtgagagatttttgttgagaagggaaagacttcatcgagttttaaatcaattacaatttttaccgacacattatgcatctcaaattgattttgaaaagagattcggtaaattcaaagaagaaactgagccgaagttggtttatgatgcaaatgaatttatttttaaaaattcgtttgaagaaatgctgtctgattttcaaaaacatcaaccgcaacttttagataatgataaaaaagttccttacgattggacaatttattacttacgtaacaaagctttaactcaaaaaatagagaaagaggaattggcttggattctattaaattttaatcagaaacgtggttattatcaattgcgtggagaagacttcgaagaagaaaaagataaaacttttgtacgattaaaagttgaaaagatagttgattccggagataatgttaagggcaaaatattatatgatgtttattttgataatggttggaaatacgataaacaaattgtaaaaactgaagattggatagaacgtgtaaaagaatttattgtcaccgaatcattcttaaaaaatggagatataaaaagaacttttaaagcagttgattcagaaagagattggattgctattaagactaaaacagaacaagaaattgacaagtctcagaaaactgtaggaacctacatttataatgcacttcttcaaaatccaaaacaaaaaatcaatggaaaattagttcgtacgattgaaagaaaattctataaagaagaacttaaaaagattttagaaacacaacaatcatttcatccggaactgagaaatgatgatttgtataacgattgtgttcgcgaattgtaccgaaataatgaagcgcatcaattgactctcagcaaaaaagattttgtgcatctttttatggatgatattattttttatcaaagaccgttgagaagtcaaaaatcttctatttcaaattgtactttggaattcagaaaatacaaagatgaaagtggagtagaacatacgcaatatttaaaagctattccgaagtccaatccttattatcaggaattcagggtttggcaatggatgtataatctgaatatctataaaaaagatgatgataccaatgttacaaaggaatttctaaatacaaccaaagattttgaaaatctgtttgagtttttaaataacagaaaggaagttgaccaaaaattattgctgaaacattttaaattaaatgataaaacgcatcgatggaattatgtagaagataaaaaatatccttgtaatgaaaccaaaacaatgatttcgtcaagattagataaagttgaaaatatttctgatgattttttcacaagagaaattgaacagaagatttggcatattatctattctgtcaatgataagattgaatatgaaaaagcattgaaatcttttgctaataaaaattatttggatgaggtttctttctttgaagcatttaaaaaattcccgccttttaaaagtgaatacggttctttttctgagaaagcgattaagaaattgttgcctttgatgcgattagggaagtcttggagttatgccgatattgataagttttcaagagacagaattcaaaaaatcatcaatggagaatataatgaaaatattaaagataaagtaagagaaaaagcaatcaatctgactactgaaagccattttcaaggtttgcaattgtggctggctcaatacattatttacggaagacattcagaagcatcgttgattgggaaatggaattctgcagatgatttggaagaatttttaaaagagtttaaacaacattcacttcgcaaccctattgttgagcaggttattaccgaaacgcttcgtgtggtaaaagatatttgggtgaaatatggaaatggtgcaaaagatttctttgatgaaatccacattgaattaggaagagaaatgaaacttcctgcggctgatagagagcagttaacccggcaaatttctgaaaacgaaaacacgaatctccgtatcaaagctttgctggctgaaatgatgaatgaccattcggtagaaaatgttcgcccgtattctccgatgcaacaggaaattttaaaaatttatgaagatggaattctgaaatcagatatagaaattgaggatgatattttaaaaatcagcaaaactgcacaaccttctccttcagatttaaaaagatataaactttggctggaacagaaatataaatcgccctacacaggaaagattattccattaaataaactctttacaccagaatatgaaatagaacatatcattcctcaaagccgatattttgatgatagttttagcaataaaatcatttgcgaatcggcggttaataaattaaaagataattatatcggacttggatttattaagcaatttggaggaactgttattgagcttggctttggtaaaaatgtaaaagtttttgaagttgacgaatatgaagatttcgttaaaaaacattatgctaataatcgagggaaaagaattaaacttcttttggaagaaattccagaaaaaatgattgaacgccaactgaatgatacgcgtcacatcagcaagtatatttccggtgttctttctaatattgttcgggtagaggatggtagtgatgaaggtgtaaattctaaaaatatagttccaggaaacggaaaaatcaccacccaattaaaacaagattgggggctgaatgatgtttggaatgaattgattctgccacgttttgaacgaatgaaccaactgaccaattcgacagatttcacaacctggaatgaaaatcatcaaaagtttttaccaactgttcctattgagctttcaaaaggattttcgaagaaaaggattgatcatcgtcaccacgcaatggatgctttgataattgcttgtgcaacgaaagaccatgtgaatttacttaataaccaatcagcaaaatcggatacgaaacgctacgatttgaaaaagaaactgatgaagtttgagaaagtggtttataatcacacacaaactggcgaaaggattgaaagagaaatcccaaaacaatttctgaaaccttggggcgattttacgattgatgctaaaaatagcctggaaacaattattgtaagctttaaacaaaatcttcgtgttatcaacaaagcaaccaattattacgaaaaatgggttgaaatagatggcgtgaaaactaaagaaagagttgagcagaaaggaataaattgggcaattagaaaaccaatgcacaaagaaactgtttccggaaaagtagatttgcaaagaatcaaagttccaaaagggaaaatcttaacagcaacaaggaaaagtttagatacatcttttgatttgaaaacgattaattccattacggatacaggaatccagaaaatacttaagaattatctagaattaaagggtagtcctgaacttgcattttcgccagaaggaattgaagatttgaataataacattgaaaagtataatgatggaaaagctcatcaaccaatccataaagttagaatatttgagttaggaagcaaatttcaagtgggacaaacaggaaataaaaaagataaatatgtcgaagcagccaaaggaacgaatttgttttttgccgtttatgaagataaaaatggcaaaaggagctatgaaacaattccattgaatgaagtgattgaacggcaaaaactgggtttaccagttgtagatttaaagggagtcaatgatttgtatctgtctccaaatgatttagtatatattcctttaggagatgaactggaaaatataaacaatattgattttgaaaatatttcaaatggtagaatgagaaatatctacaaggtagttagtttttcagggagtcagatattttttgtaaaacaagatgtagcaacttcgattgttaataaagcagaattttcaacattaaataaaatggaacgagcaattgatggtacaatgattaaggaaatttgcattaaattaaaagttgaccgtttaggaaacatttcaaaagcataaaatagtgcggaatatgaaaaataatttaagttggaaaataatataaaccttttaaaatgaatcaagaactgatatccgaaggcaaatgtgtattttgtgaagaattgttggaaaaaagtaaaatcaacactcatttaaaaaaacatctgaaagattttttaaagcaagaaccattaggaacctcttttttacttcagattttcacttatccaaactataaaaaatcaccctattttatttatcttctcgtagatggagaggcaaaaatgaaagatatagatggttttttaaaagatatttggttagattgttgcggacacatgagcgaatttgaaggacgaattgcaaaaagccgaaagcttgttgatattttagaaaaagggatggatgtaggatatgaatatgattttggatctaccacatatctgcaaataaaagtagtcgaagaattttcttataaatctccccaaaaaatatatttattaagccgaaatgaacctttgaaattgatgtgtcatacttgcaaagaacaaccagcaagtgttatgtgttctgtagaacaatgggaagatcaagagcatatgttttgtgatgaatgcgctacaaaacacgaagaagtatgtgaagactttgctgattatgctgctttgcctattgtaaattcgccgagaatgggagaatgtggatatgaaggaggatatatagataaagaaagagatggaatttttgtaatgtaattctaaattatgataacccgctccatttacatcggcaatcccgcatacctcaaactcaaagacgagcagatgaaaattctttgtccggaaaccaaaaccgaaaaggggagtgtgcctgtcgaagatttaggtttgctgatgttggaccattttcaaatcacggtttcccatcaattgatacagaaaatgatgggaaacaatgtcgtggtcgtgagttgcgatgcgcatcatttgccacacgggattatgttgccgctttacggacattccgaacattccgaccgggtaaaagaccaactggaagccagcgaacccctcaaaaaacaactctggaaacagaccatcgaatgtaaaatcgaaaaccagaaagaagttcttcgtcaactaggcaattattacgagccgatgctcgattatcaaaaaaacgtaaaatctggagacatcaccaatatggaaggcatcgcggcgcaacattattggaaatacctcatcagtttagatttcctcaggcagcgttttggcgattcgcccaatcagtttttcaacttcggatatgccgttctcagaagcattgttgctagagcaatcgtcgaaaccggactgcttcccgtgctcgggatttttcataaaaacaagtacaatccttattgtctggcggacgatttaatggaaccttaccgcccattcgtcgatttattggtcatgcaatggctcgaaatacatcccgaaacggaagatttaaccaaagaattcaaagctcacatccttcaaattgccacaaaagatgttaggattgatgacaaaacaagaccattgttggtagctgtaaaagcaacagccacttcgctttataaatgctatacaggagaaaaacgaatgatttcttatccagaattacaataaatagttgttggtttttagttgatagtttatgagttgaaattcagtgtattaaatgtttttaagattttttatggcagcttttccgccttccactcccgcttttttctgaaaaccagccacatttgcctttgcttttttcagaaaaagagctccgttcaagtcgggctgcaaccatcataccgcaaaacaaaaccgtgaaaaatgaatgccgaaaggtttaacgcttaccgaattatgtgggttttagtattatacgacttaccaacggagaccaaagccaatatgaaagatgccaaccgctttcgtaaaggtctgattgatgatggctttacattatttcagttttcaatgtatgttcgccactgcccaagtagagaaaatgctgaggtgcatattaaacgtaccaagttcaatcttccaaaagcaggaaaggtagccattatgtgtattaccgacaagcaatttggagacatagaaatattctttgccagaaacaaagaagaaccaccgcccaccttccaacaacttgaattattctaaatttcgaatcctaaaaaacaacaaaacccattgaaaaacaatgggttaaattttgaggttgtgtaatatctcaaagatactcaaaaatgaaagcaattcacaactggtatcgtttattaatgttgataggggcagttgtgtaatatctcaaagatactcaaaaatgaaagcaattcacaacttgtttcatcatcaattctaattttattaagttgtgtaatatctcaaagatactcaaaaatgaaagcaattcacaacttgaatactttgtcaaaggacattgaaaacgttgtgtaatatctcaaagatactcaaaaatgaaagcaattcacaaccgccgaacgcttcttcaatcaatccgtaatgttgtgtaatatctcaaagatactcaaaaatgaaagcaattcacaacacggattatcgtctgctgtttccaaaccaagttgtgtaatatctcaaagatactcaaaaatgaaagcaattcacaacaattgtcttcggaaccatgcaatttggttcgttgtgtaatatctcaaagatactcaaaaatgaaagcaattcacaaccttatgagtttaccaccaattaaagggagcgttgtgtaatatctcaaagatactcaaaaatgaaagcaattcacaacaggatgttaatttagtaaacaaatcactttgttgtgtaatatctcaaagatactcaaaaatgaaagcaattcacaaccacgggttcgtttgttcaagttcctaaagggttgtgtaatatctcaaagatactcaaaaatgaaagcaattcacaactcacagacccttcggaacacaaactaacaagttgtgtaatatctcaaagatactcaaaaatgaaagcaattcacaacgcaaaactaacaagattgtgagcatctgatgttgtgtaatatctcaaagatactcaaaaatgaaagcaattcacaactgattgccattacaatgaaatttttcaaatgttgtgtaatatctcaaagatactcaaaaatgaaagcaattcacaacggctcagggtcaccgcttagataagtcaccgttgtgtaatatctcaaagatactcaaaaatgaaagcaattcacaacaaacgaatgtctattgttagagcttccgtagttgtgtaatatctcaaagatactcaaaaatgaaagcaattcacaacaacagcgacacaagtaaaaccgatgatcttgttgtgtaatatctcaaagatactcaaaaatgaaagcaattcacaacactcatcgagttattatgcgcagaaagcaagttgtgtaatatctcaaagatactcaaaaatgaaagcaattcacaacatgctcaatatcaggcgatacatgatgctggttgtgtaatatctcaaagatactcaaaaatgaaagcaattcacaactggggtcatcatttgttgatgctaatggaagttgtgtaatatctcaaagatactcaaaaatgaaagcaattcacaacagaacaaggctaaaggggacataccaactcgttgtgtaatatctcaaagatactcaaaaatgaaagcaattcacaacgttccctataacagaactacaccgcttgaagttgtgtaatatctcaaagatactcaaaaatgaaagcaattcacaacaggattgccttcggtatcatattgaatccagttgtgtaatatctcaaagatactcaaaaatgaaagcaattcacaactacaactttagatataaatgatttaacttcgttgtgtaatatctcaaagatactcaaaaatgaaagcaattcacaacatgcaggtaaagatgaagaatttaagacgagttgtgtaatatctcaaagatactcaaaaatgaaagcaattcacaacggggtattcagggcggcaaccctaaagtaggttgtgtaatatctcaaagatactcaaaaatgaaagcaattcacaacgagtccgtatagcctttggctcttagataagttgtgtaatatctcaaagatactcaaaaatgaaagcaattcacaacaacccgcatcttctccaggtcccccaaagagttgtgtaatatctcaaagatactcaaaaatgaaagcaattcacaacgttttagtcacaacactttaaaaaaaatttgttgtgtaatatctcaaagatactcaaaaatgaaagcaattcacaacgccgggcgcacattgccaattttgcaacgcgttgtgtaatatctcaaagatactcaaaaatgaaagcaataagcatattaaagttttctctcgaaatatttgaaaaattaatttaaaaactcagaggtgttgatttttacacagtattcacttcctagatagagtggattaccatgtttttcagaccaaaatccatctagtgcgtttttattgatgcagtgataaacggcaactcctttataaatcatttcatcttcactttcgtaattgaagttgataactaaaatttcgttcttataaaaacctgttccatgctgaacgtggtcatcaataatccattcagcaatgattctgttgttttcatccaaagatagggtaagaattccctgataagtaatctcatcactttctacctgattgcttccttgaacggaatagcttcctgccaaatcgtgtacagtcattgattttattttaatgtcctacaaaaatagaaaaacctttggtatcttcagaaaagagaatttcttgagctaattcatgtatctttagacaagattataaatccatgattttttatttactgacaatcattaatcttttgactttttttgtgttttttgcagataaacgaaaagcaataaagcatcaacgaagaatttctgaaaatacgctccttatgctaagctttttcggcggaagcgtgggtgctgcaataggaatgttgattttcagacataaaatttctaaaattacttttttgatcaagttttttggagtgattgtgcttcaaaccatattgctgattattttttatcaaaagcttaaacagctttatatttaaaatgaaaaagttcccaaaataatttcaggaactgtatgttaaaatttttgattcttaaaataactagggcaaaagcttttcgtagtaaacaggagtatatttttcagcatcaaatcccataatcagaaaacggaatttttttgcagtatcattattataaaaatcaaccttcgcaggagtgtcagaatctatttccgtattgggattccagtagagtacaggtctgtaatcactgcttattttagataattcagaatttccgtaatcggaatcaggatatttttcagattgattatagccttccatgacaaaaaagttgagattcaccatttctgaaagtgagtttgttttggttacaggtttcgtatctcctcttttagtataaataagtacacctccgttaccaccgccactcataccaattgcaccgtctttaataatttttaccatagcgatgttatctgaagataagccagtaagagcacttgcatcagttagcatttcatcaagataaacattcgcttttgcttgacggatgtatggggttggaattccattttcgtaattaatcgttaatccggcagcacgaccctgtaaccattgtaatatattttgtgaacttgccgcagactgattctcattaacaaaatcaaaaacagtttcactcatgcttcgataaagcgggctacttagtttgttgttaagttcctctttgaggtctttctttttagcttttaattttacttcctcaatagtgattatcttttcgtcgtattctttttttgcttttttagatgctattattttagtgatttctgcgggctgtgatgaaactgaaattctgtctaccagttgatatccttcgattgcaggtaattctttttttagcggaataaaagtattggtaggatttacataaacattcgttcggctttttaaagcagcattcgctccgttgaattggtaggtgactttaataggtttttcgaaaagcatattgtcgaagaaaaattctccattactgtctgtttcaacctgaaaaaattcacttcccgatttgcctccttctataaacataatcagagtttgttgaggtgcaggttttgcattaagtgttactcttgctttatatgaaatgtatttagaaggattattgataatagaagggtaatttcctgctataatttctttccagtcgaaagatttccattgttctgaaatcaagagagcatcaagcgcttctgtatttcttttttcggtaaaatattgtgcaggcctgttgattttagacttgataacacctgtaagccataatgaacttaaaagattttcatcctgcaaagattttttaaactcagggtcaaatacagttacagaataattgataatgtctttaagaggcttaatttctaaagaatttaaagctcttttttctgtgctgattatttcaggttttacttcaggagccgcgatgttttgattttgaggcattacaaaacacatcctgtttaccaatacattttctttatcgtcaaataccgtaagctgtaaaactccgttgataagctgattggttggtattacctgaaatgaatcttttagctgattaactttcgctttgtaaaccaactggtcaccgatactggcaatgacagtgtaataaggaatgttttctcctgaattttttattttatatttaatattgtctttttcgctgataacctgcagacttactcctttttcagaagcttttggaagtgcgatagatttttgtaaaccattattatctgtaattacagcttcgtaaattttatctttctcagggattaatgagaaaacgccaacattttcgtcgaaacctttaaaagttgcgattttcttttcgggatggtctttttcaatgacatatccttcccattgagtgggagcagttccaatattatgcaggcgtacagcaattttagactgatttccggcaatcaaagaatttccttccggatgtactgtcgcagaccacgaagaagacttatctgcaactagttttttaggtgaagaaggattgtaaatggggatttgttttatatattgaaaatcttcactcagattgctcatcattggagtataagctctcacaaaataaatatcttcagtcagactttcaggaatctgaaaacttccctgaacaactccattaaaaacaggaaatctttttctcagaatctgctttttatttttatcataaagctcaataaaaaagttggtcgaaagatctgatatgctaaagtttctaaaaaccattgcattaaaccatagcgtctctcctgaaagatataaatctttatctgtaaggatatagatattttcctgtgaaagattttcactaatatattgaagagccttatcggcagattgttgtgagtggatgtggctgaaagatgccaaaacaaaacagaatgtaattattcttttcatgttctactacattaatattatgcaaattaagtgaaaactgtttgtcttataaaatatttaatacactttatgatttaataatttatcagagatgttttcaagcaattttataatgggtaaaattatttatactgaatattttaggtcattatatttgatttagcccctctttttaagctattattaaaatattttatcttttaatttactgtgaaataagctgttgtcaacagagtgattattaattagaatgatgcataaaattaaattcgttgattatgaatttgttaattaataaatatagatgatgattaattgattaaaaatcactaattttgcacccgtaaaaatcattcatgcaaaacattagaaatattgcgattatcgcacacgttgaccacggtaagactactttggttgataagattattcatgctacaaacattttcagagaaaatcaggaaagtggagaattaataatggataacaacgatcttgaaagagaaagaggaattaccattttatctaagaatatttctgttaactataaagacgttaaaattaacgtaatcgacactcctggtcacgccgatttcggtggtgaagtagagcgtgttttgaaaatggcagacggtgttatcttattggtagatgcatttgaaggaccaatgcctcagacaagattcgtattgcagaaagctttagaattaggtcttagaccattagttgttatcaataaagtagacaaaccaaactgtcgtcctgaagaagttcatgataaagtattcgatttgttctttgcgcttgaagcaagtgaagagcaattagatttccctacattctacggttcttctaagcaaggttggttcaatacttcattagaggaaacagacaatattttcccattattggatggtatccttcaatatgttcctgagcctaaagttgaggaaggtaacttacagatgcagatcgtatctctagatttctcttctttcttaggaagaattgcaattggtaaagtaatccgtggaagtcttaaagaaagccaatggattggtttagcacaggctgacggaaaaattgtaaaaggaaaaatcaaagaattatacgtttttgaaggtcttggaaagaaaaaagtaactgaagtattagcaggagatatctgtgctgtagtaggttttgatgctttccaaattggagactctttcgtagatctagaaaatccagagccattgccaagaacttcaattgatgagcctacgttgaacatgacattctctatcaacaattcacctttctttggtaaagatggtaaatatgttacctcaaaccacctgaaagaaagattaactaaagaattagagaaaaacttagcattaagagttcagcagactgatgatgcaaatacattcttagttttcggtagaggtattcttcacttatcagttttaattgaaacaatgagaagagaaggttacgaaatgactatcggtcagccacaggttatcttgagagaaatcgatggagaaaaatgtgagccttacgaatctttagttgttgacgtaccagacgaatttgcttctagagtaatcgatttggctactcagagaaaaggtgatcttcacattatggaaactaaaggtgaaatgcagcacatggaattcgaaattccttcaagaggtttgatcggattgcgttctcaaatgttaactgctactgctggtgaagctattatggcacaccgtttcacagaatacaagcctttcaaaggtgctattcctggaagaagtaatggtgtattgatttctaaaactcaaggtccagcaactgaatattctattgctaaacttcaggatagaggtaaattctatgttgatccgggtgaggagatctatgcaggtatggttatcggtgagcaaaacaagccaggtgacttggttgtaaacatcgttgaagcaaaacagttgaacaacatgagagcttcaggtaaagataaagatacaggtgttgcaccaaaaatcttattctctcttgaagaatgtatggaatatatccaggctgatgaagcaatcgaggtaactccaaacttcatccgtatgagaaagaaagtactttctgaagaagaaagaaaaagaattgaaagaggagcaaaagcgtaatctaatattcttaaatatatctaaagcctcgatttgtcggggcttttttgtttatataaaagcactgtacattctcttatatatttttttaactaaatttttcagtataagatttttgaaatagtctttatatcattagttttgtcttttaacaattca

SEQ ID NO: 1240 - DNA, 24251 bp, synthetic construct
  misc_feature 1..24251: note = Synthetic
  source 1..24251: mol_type = other DNA
tcgagttcggcacctactgcgtatgtagatgcattatcaacaagtctgacagcgatacctgcaccaccgtctgaaacgacaatattctttagcgaagttgagtttcctccgacctggtcgcttatcatgctagccttcatgtaaacctcagaagcgacggttccctcacccatcgatctgagttgggcacaagtgacataagtctttgttatacctgcagcttgtatcacctgaacatattcgtaaattgtagaggttgcaactttaattgtagctgtcctgtcattgccggtattaggcagacaagttacagtaacagtagtttcgcccttctttcctgtacttggtgaaagtgccacccagtcagcacctgttgaataggtaactgttgttgtccagtctctgtttgtattgacaacaaaggtagaatttccgccctccttggctacattaagtgtttctgtgcttatttcaagagatggggttccatcatcaacatcctctttactgcaagaggagataattcctaaagtagataggattactgtaaaacctaacagttttattaatttttccatttttaaattatgtaataaatattagaattctgtatttattacaaaaatagaaaaactttgtgaaagctaaaactttatacccaaagataatccggccctgaaacctccgaatggcccctttatgtttacggtcgccttattctgattaacttcaactgtttttgtatatggatcaatttccagttcattcagtttgtcacgcactgtgttttgctcttccgtcgacatcggagtggacgggattccggtaaaacttcccgagccggtgccgtaatgaggtccgagaaaccagaggtcaagacacaggtgtttgctgagtgcccattgtgatccaagcacaaatcccactgtgtgtgattttatgttacctttcatatcaacattgacagagatatcctcctcttcaaaatcagcatcaatgttatttgcgtcaaaatttgaatacctgtaaaacaatgaaacatagaaaccacggccataaccctttttcccaaggtaaaaacgcacttccggagtaatagcaaagttgctaagctgcgcttcattgaggatatctatgacttgctgatcatccggttctgcgtaatcgatgattttgtttttcaacggaattgtaccctccggcataaacctgtacgccacagcaaccgagacagatttgccgagcacacgctcatactgaatggaataattccggaacgctataggcagcaaattgacttttatcaggttcttctgttgaatctggtaaccctcctgagcagagataccttgaactaagaaaaggagcagactaaaaaacattaattttttcatgactaacctccaatatttttaagaacacttatatcttgtataaagttactattttatcaggattcaacaaatatttctaaattcggaaattgaattaattaaaaagagaaatgatgaaatttatcaaaccaagccttactgttatatttatgacaattgtatcgtctctgtttgcaagtaatttagccggcattattccggtccctgtttcaatgactccgggaaagggttatttcagaatcaccgcaaaaagttctttattagtaagtaccgatgacaaggctgttaaggatatagcactgcttctgaacaatcatcttaaagagttttatcatttttcaaatctctctgtcgagagcgggcagattgcaaaaaaaggctccataattctaaaacttgacaaagagtgcggtataaaacctgaaggttataaattatcaataactaaagagagtatagagatatgctccgccgatccaaatggtctgttttacggcgttcagactctttttcagatgatgccgcctgagaaaaaggctctctcaaaaatcaagataaaatctgtagaaatcgaggactatccgcgtttcagctggagaggacttcatcttgatgtttgccgccacttcatgccgaaggaatttatattcaagtatctggactatatggcaatacacaaactcaacaccttccacttccatttgacagacgatcagggatggaggattgagataaaaaaatatccccttcttaccgaaatcggctctgtaagaagcgagactcttgtgggccgctattcaaaagagaatgccgtatatgacggcactcctcattccggattctacactcaggaagagataaaggagattataaaatatgcggctgaacgatatataactgtagtgcctgagatagagatgccggggcatgccctggctgccctgtcagcatatcctgaacttggctgtaccggcggaccatacaagagtgcaaccaaatggggtgtttttgaagatgttatgtgtgcgggaaaagagagcacatttcaatttcttgaaggtgtgcttgaagaggtaattgcactcttcccttcaacctacatacatgtggggggagacgagtgccctaaggtcagatggcacgactgccctttgtgccaacaaaggatgaaggatgaatctcttgctgacgagcatcagcttcagagctactttgttcagaggatggagagatttataaatggcaagggaagaaaaataattggttgggacgagattcttgaaggtgggcttgccccgaatgctgccgtcatgtcatggcgcggcgaagaggggggcatttctgctgccggccagcagcactatgttgtaatgactccggggagccactgctatttagaccattaccagggagataaggagacagaacctctggcaatcggagggtttactcctttggaaaagatatacggttatgagcctgtgccggcggcgctcagtgctgaaaatgcaaggttcgtcatgggagctcagggaaatgtctggacagaatatatggcatcgccagcacatgtcgaatatatggtatatccacgcgccgccgccctttccgaggtgttgtggtcttcgaaggagtcgcgggactactcgtcattcatgaagagaatgaagactatggtcaaaagatataagagcataggtcttaattactgtccgaatgaattttcaaaaagcaagaaaaaacatgattaacgagagcattatgaaggaaaatccttttgaccagttcaacctgtggtacaacgaagagctggagagcaagagctatctgcccgatgccatgactctttcaactgtgggggccgatatgatgccctcttcaaggattgttttcatgaagattctcaccgaagagggttttattttcttcacaaactacaggagtaaaaaagggaggcagctcgaggagaacccgaaagcctccttgctatttttctggcccaggcttataagacaggttcgtgttgaggggttagtggagaggtgcagcgaacagatctcggatgattatttcaattccagacctttgccaagcagggcagcatcattgctatcaaagcagagcgagccgctggatgacaaggaggcgttcgacaacaacgtaaaaaggcttgcagaaaacgaggagatggtcacaaggcctgaacactggggcggatatgttctgaaacctcagttgttcgaattctggcaaaacagagagcatcggtctcatgaccgctttgcgtatacccttgaggggcccggatggaaaattaccagactctatccttgatccgcattttccttgttctcttcctctcttctcagacttctgaccacgcacttgcatactacaagcattgtaaacattatcataagtgcaagatagaggacaaattcacctgcagagactacccagtctgtattgggactcaaccctcctgaagcaatgaagagcagagtgaccaacatatgtccgcctgcgagtacagatataccccgccacgaaacatcccagtccctctttcttcccttgaacttcctgataaatgcagatgtgtagagaccaaaaattactaaaagatagagaattatcctgataagattttccgagtccatgacccatataagcagcaagagcaccaggaccagtattgtcagatatatatccagctttttcatgatttggatataattaatccaaatatactaaaaaagctcgtaaatcagaaatttataccggcaattttaccacggaaatattggaaatcaccacttccttggttccatgtggcggtaagcaaggcaggtattgatatatcgccggatttgatatactcccctatttccacagaccatctgaccttcttgaaagatccgtctttctgagtctggtatctctcatcagtagtaaaaccgacatattctcccttttcgttaaatgaaaacacgccgctgacctctatccctttgaaagaaatagttccccggacagtattattatcaatatattcccatttcacataagacttaaaacaagaggccggaatcataggcaactctgccagaacggtaaccagcgccgacctgtccatctcctctcccttcacgtcagctataataaacagtttcagaagcctgatcaacatattcccctttccatcctgaaatttgtctcgtccctcaaatggaatgagccctgcaatgcggcttttcatataaaccagacggcaaggctcataagagaagttgtgctgatagcacttcatagccataaatttccccttttcggacattttaatagcagcctcactccatacaagctcgataaagggagccaacaccctgccttcataaccgcattgtacaaaatatcttgccaatggttcgggaaccgttgacaacatctcctttgtaagaatgacaccattgtccgaagaggcaacctttgccctctcctgctcaacttcaagcctgtaaagagttttcattgcatttttttgtgcaaatatatcgattaaactgataatgatttccaaacaatgccggcaataaatgtcactgcaccgccgatgaccattgtccaatggatgccgataccacttgcgacagatcctgcgatgagatttcctataggttgagttcccatcagggccattgcatagaaactcatgaccctccccctcatccgctcttctgttgtagtttgcaataaggtattgattgaggagagggtaagtatcattgtaacacctcctaccgagagcgaaagaagcgcaagccacatcgaactggtaacgccggtaagggaaatcattgccgaaagaatcaatgtggtgacagttattatattctccaacccctttgtactttttcttgaagccatgtagagtgctcccacgagagctccggctccgagcgcggacatcaggaatccaagagtgtccgcgcccccgtgcagtatctccttggcatatgccggaagcagcactattgacgggaatgcggtaaggctcattactccgagcagaagtatgaggttgcgtatctcttttgttccgaatgtgtacctgagtccttcaaagaaactctttttaaaatccttttcgggcggggccactctctccttgagaatcttgatctgccacagggctcctatcacaaatataaagctgaaggcatttatcagaaaacagactccctctccgacaacggctatcagcattccggcaatagcagggcctacaagtcttgccccgttgaatattgcagagttcagggctatggcgttgccgaggtttttcgggtcgtcaatcaggtctatgacaagtgactggcgcgcaggtgcatcaaatgcgtttatgacaccgaacacgatactgagtgctattatgtgccagacctctatatgtcccgacaacaccaggaatgccatcacgaatgcatgtatcatgaatagcacctgcgcgcttctcatgattgccatgcggtcatatctatcggttattactccggtaaatggtgtaagtatgaatgtgggtatctgtgtggtaaaacccacgagtccgagcaggaaaactgatccggtgagtctgtatataagccagctgagtgctatgttctgtatccatgttcctatgagggatattccctgtccgtagaaatagagtctgtagttcttagacctcagggatgtaaatatctgtttcagtgtggattggtctactattcggaatggcatttttgagtctcttgtttggaaatgccatttcgctgcaaaaagtgtgctattattagtggcactgatttttctaattatctcatttttaggaataatgatttcatgaccatattttgctgttttgcagagttttgcaccgacctaaatagcagcaaattagaaaaatcagtgccacatattttaaattgaagtcataagcctcaaagacactgatttttcttaacgccgtttcttgcgggttttcagggtgctccggaacgcctcccttcggtcgttgaacggtcctcgcactttttcctgaaaaccacgcttcgaaatcggctaaaaaatcaaggtctttttcggccttatggcttcaattgctctcttaaatcccatttcaggctgaaatgccctgactcgattttttccacttatctgtaagcggctattgagcgtttgtacagattatcttgttattgcgaaaaaccttggcaaggtctcttccgttgagaaagacagagtaaattgccactctaaagattgaagcttaactttcaggtcttttatattctgtattaaatcttcgaaagttggtttatgctcttcgtatatcatatcttccatcattttagcataatcatattcccattcgccgattatctcagaggggggcatagggtcaagcgttattggattatgactgttataatttacaccaccaacgtggttaaatttgctcctgtgtgccacaattgtttcatataaatccttatccttaatggctctgtcagctattccagatctttccagataataaatgtcgtacaaatgtcggcttaatctgtcaacccttcgtttatctactggtcgatgaaactcttcgtgtagaagaaataatttttccaaaaaagtacgctctgcattaacagttggaattgagaataatggctcagcaaaattcttatcaatgtatacttcatcgactaaggacccaaatgttatcattgaacaaggttcatgcaacgctctgcaaccgatttcaacctgcactcgaggcaacatatactctgaaggcttagctatgacatttggatagaaaatttctataatgcgtggatcctgatcgctgtcctttacttcaacaatactaaattttaggtctttgactccccttgcttcgaatcccactttcaaattatcgaaaaattcccccgcaacatagactcctgcctgcttccttacatttgttatctccttttttgaccattccttttgaggctttagaaagaactccttgtcaatagccaaatcaatatcttccgaaaaccgatgtattaacttccatgctttgctcagagaagtgccacccttaaaaaccatatgtttggcaatttccatttgaaaaatgacttcgagcgttctactcacccaccagtctttctctactgcaaaggagctcatcccctttgctgcggcaatagcttgaaaaatggctattttctcttctttatcgatattatagaaattaattttctccatatcccaacgcctttttcattattttttgtatccaaacaggtgccagtgcgatatcatgctttaaatcacttttttcttctcttttcagtaagtctatgatctttttttcctcttcttcactcatttttccattaccaatttccttaagcgcctgtataaccagacggcttatttttccttttgccaacaggtttttaggagtggttttcttaagcttaatttttctttttcctactttaatctctcgtggcgagccatcggtaagtaaaactatattcaccgggacttgtgtgcttaatcccaaagaattcaatgcatagcttccggttggaagagttcttatccggtcccttttagcaatggcttcggctacttcctctgctgatggaataaggacaccaatgagactactttcttttgggcgtacataaataccctgagcgattctggttataatcccttctttctctagcctgaataatgatagtcgcactgcctccgaagatccaaactcactaaaatccgcaggaaataataactcccctttaggaagtgattcaatatgttttaatatttggtcttctatactcatagtcgctaattttgtaacaaatatagcatatttttgttacatggttgcttttgttgtaacaattttattcattatttgttacaagttaagtgtttttctgcatcatatccattctctggatagtccatcctcagtcgcattgaagtcataagccttaaagacactgatttttcttaacgccgtttcttgcgggttttcagggtgctccggaacgcctcccttcggtcgttgaacggtcctcgcactttttcctgaaaaccacgctgcgaaatcggctaaaaaatcaaggtctttttcggccttatgtcttcaattgctctaaaatccccttaaactaaaatattttatactggtctattaaacaattatatagttgacaaattcatataaaatatttattttagtacccgaattacatataaatgatttcgtcatgaaagatttattggttgttccgtttgtattcttattcctgcttgttgcatgttcaaagaatagcattgatggtccggctttacctgaggattccgttataaaaccgattccgaggactgaaaccgtaaataccattctactccttaaaatagattacctgacatacaagttcgaaggaggggctgaaaagttcattagtggtggccttgccaattctgattcgataccaatcgggatagtctataaatctccgagtgatcttggacgtatatcacttttttataagcctaccaatgatttattgtttgatggcattatgttatgggcgtcatctggtgttaaaggattaatagtaccggcgaaatttaatgttcctgaaacatattttaagacaatcattgagcctgcactgcctgatgattcaagatttcagaaaatctttcctgatactgattttaactattctaaactctggaaatcaatttctaatttgtgtatagtcacagaatatcttcagtgtaataagaaaatcgggcttttactttacatgcctagtgttggggtgggagacccacatgactgggattggtttgtgattatgagtaaataattttcctgcttttctcgatagccgttgtttactgtggaaaaataccgtctcagggctgtccatcctcagttgcattgaagtcataagcctcaaagacactgttttttcttaacgccgtttcttgcgggttttcagggtgctccggaacgcctcccttcggtcgttgaacggtcctcgcactttttcctgaaaaccactcttcgaaatcggctaaaaaaccaaggtctttttcggccttatgtcttcaattgctctcttacatcccatttccggctgaaatgtcctgacccggtatttttcaactaatttgtaagcggctactgagggtttgtacagattatcttgggattgcgaaaaactttggcaaaggcattcttaataaaaaagcccccgttaaggacgagggcaacctaaatgttttcacaacggaataatccttattgtgatttgctttcaaaatttgaagcgaatatatcaaattttttggaagaaaaataatattttaaaaatatttggaaatgtgcattatatttagttgatttggagtacattaatcattactaaaaatacatgaaacgcgttttaggcttagatctagggacaaactctattggttgggcattgatagagcaagactgtgatgctaaacaaagcaatattctgggaatgggaagccggataattccaatgtcgcaggacatattgggagaattcggaaagggtaactctgtttcacaaacttcagaaagaactgcttatagaagcactcgacgccttcgagaaagatttttattgagaagagagcggttacatagagtattaaacattctggactttttacctacgcactatgcttcacagatagattttaaaaaaagattgggtaaattcaaggagaataaggagcctaaaattgcatatgataacaaatctttcttgtttctagactcttttaatgagatgctcaaagattttgaacaagagcaacctaatatgcttattaatgaaaaaggagagaaaaagcttatcccatatgattggactctgtattacttacgtaaaaaagcgcttagagaaaaaatatcaaaagaagagctttcctggattattctaaacttcaatcagaagcgaggctattaccaattacggggagaagatgaagaggaaaatccaagtaaacttgttgagtttcattccctaacagttgttgatgtggtccctgacgagcccataaaaggcaaactagagacttggtactcaatcatattagataatgggtgggtgtacaggaggtccagtaaaacagaattatacgattggaaagacaaaataaaggaatttattgtcacaactgatctcaattatgatggaacagtcaaaaccgacaaagaaggtaatgtaaaacgaagctttcgtgccccaagtgaaacagactggactctaatcaaaaagaaaaccgaatatgagatcgaacaatcttcaaaaacaataggtgagtatatctataatacactactcaagtatcccgaacaaaaaatcagaggcaaactaattcgtacaattgaaagaaaatattacaaagaagaattaaagcaaatacttcttaagcagaccgaatttcacaatgaactaaaagacgactcactttattatgactgtttaagagagttgtatagaaacaatgagtcacatcaactcttcttagaaaaaaagaattttgcccagttattcattgaggacatcatcttttaccaacgtcctcttagaagccaaaaatctttaatcagtaattgccctttggaattttataaattcaaagattctgttggcaacgagaaagttcaacatttaaaggctattccaaaatccaatccattttaccaagagtttcgtatttggcaatggatatcaaatctatccatatatagtaaactcgatgacagcaactttacctcacacttttttgacagcacagacgactgggaaagtttgtttgaaatgctaaatggaagaaaagagattgagcaaaaacaactgcttaagtttctcttggaaaagaaagggtttaaaggcaaatctctttcctcagaaattgaaaagtatcgttggaattatgttgaagacaaaaaatatccgtgtaatgaaactcgctctttaatacaatcacgactagataaagtagccaatttacctgaatcatttttgacaaggcatgttgaacaagaattatggcatctgatatactccgttacagacaagattgaatttgaaaaagcattagatactttctctaaaaaatataagatagacacacctacatttgttgatgcttttaaaaagtgtcccccatttaaaagtgaatatggctcattttcagaaaaagcaataaagaaactattgcctctaatgagaactgggaaatattgggatttggacaatattgacaaggcaactaaacaaagaattgaaaagataatttctggtgaatacgataaagatattagagatcgagtaagagagaaagcaatcaatttattatctgaaacagattttaacaggctacaactatggcttgctcaatacattgtatacgaccgccattctgaagcaacctcactggacaaatgggagacaattgatgacatcgtcacttatttacactctttcaaacaacactcgttaagaaacccaatagttgaacaggttatcacagagactataagggtagttaaagatatttggtctaattacggcaatggatctaaagactacttcaatgaaattcatgttgaattaggccgagagatgaagttacctgctgaagagagaaagaggattcaggaaaaaaacagtcaaaacgaagacaccaatctccgcattaaggcattgttgtcagagatgcaaaacgatccaaatgtagaaaatgtgcgcccatactctcctgtacagcaagaaattctaaaaatttacgaagagggtgtgttaaattcaaatattgaaattgctgatgatatattgaaaattagcaaaacagcacaaccatcatcctcagatttgaagcgttacaagttatggcttgagcaaaaatatcaatcaccatatactggagagattatccctttgaataagctttttacccctgaatatgaaatcgaacatattattcctcaaagtaggtattttgatgatagctataacaacaaagtaatttgtgaatcggctgtaaacaaacttaaagacaacagccttggatatgaatttattaagggatacaatggccagatagtagaatgtgggtttgggaaaaaagtcaagatttttagcatagatgaatatgaagactttgttcagaaaaattatgccaacaatcgtagtaaagccagcagactgatgatggccgatatacctgaaaagatgattgaacgccaacttaacgacacaagatacataagcaagtacatctccaatatactatcaaatattgttcgatcggagtcaaatgacgatggcgtcaattcaaagaatctaatatcggtaaatggtaaaatcacaactgtattaaaaaaagactgggggatgaatgatatatggaatgatttgattttaccacgttttatcagaatgaatcaaatcacagattcagattcatttacaacttggaatgaaagattccaaaagtttattccgactgtccctattgagctatcaaaaaacttctctgcaaaaagaatagaccatcgtcatcacgcaatggatgctttagtaatagcttgcgctacccgagaccacgtgaatttgctgaacaatttatacgcaaagtcttcagccagatatgatttaaataggaaactgagaatttttgaaaagactacatataaagatattaaaacaggacaaataattgagagggagattcccaaagcatttttaaaaccttggcaaaactttacaaccgacgccaaagatgctattgaatcaataatcgttagctacaaacagagccttcgcgtaatcaataaatcaacaaattattaccaaaaatgggttgaaaaagacggaattgttaaaaaagagaaaattaaacaagaggggaaaaattgggcaataaggaaacctttgcataaagacactgtttcaggattagttcaactgtcctgggtaaaagtcccaaaaggaaaggtaatgaccgccactcgaaaaagtttagattcatcttttgacttaaagacaattgccacaataactgacaccggaatacagaaaatattgataaaatatcttgaaagtaaaggcaacaacccggaaagcgcattttcacctgagggtatagaggattttaacaataacatccatttatacaatgatggcaagaaacatcgtccaattacaaaagtacgcctttatgaaataggcagtaaattccctctaggagaaaaaggcaataaaaatgcgaagtatgttgaagcagcaaaaggcaccaacctattttttgctgtttatgcaaacaacaaaggtgaacgcagttttgaaactatcccactcaatttagttatagacaggttaaaactagggctaagtgctgtccctgaaacaaatgaaaagggagacaatcttcttttccatctctcacccaacgatttagtttatgttccttctgaagatgaaatggagaatcttaaacttattaatttagagcacatatcaaaagaccaacttaaccgtatttacaaaatggtaagttctacaagtaataggtgcttctttattaaaagtgaaattgctttatcaatagtgaataagatagaatattctccacttaataaaatggagaagagcatcgaaggtattatgattaaggatgtgtgtttaaaactacaagttaacagaataggtaatttagaaaggtacttctcttaaaataatcatttctgttaagtcttattatgataaaaaaaatcctctattttgagaatcctgcgtatttaagtttgaaaaacaaccagctggtagtcaaaatcccggctgtagaatttaataatactcttcctgattcttttaaatcagaaaatgtcagaacaatacctatcgaagatataggtgtggttgtactagacaacaagcagattactattactcttggactacttgaagcactattagagaacaattcagttgttataacatgtgacagttctagaattcccgttggtcttatgttgcctttatgtggtaatacaattcaaaatgaaagatttcgagaccaactaaatgcatccgaacctctcaaaaaacaactttggcaacaaaccattaggtcaaaaatcacaaatcaggctgccattttgaaacaatgccgcggtgtagaaattagaaatatgcttaaatgggcagatgatgttcatagcggggatagtgagaatatggaggcaagagccgctgtctactattgggccaatatctttccgaatttcaagcgttcaagagaaggattacctccaaatagtcttcttaattacgggtattccatattaagagccatcattgcaagagctttggttgcaagcggtatgcttccaacaataggtattcaccatcataacaggtataatgcatactgtcttgcagatgacataatggaaccttatagaccttttgttgacagattagtgcttcaaatgtttgataatggagaattggaactaacaaaggagaccaagataaagtttttgtcgataccagtaattgatgttcaaattgacggacatcaaagtccacttatgatagctattacattaaccacatcttctctttataaatgtttcaatggcagtaatagaaagattatatatccagaaatttagtggaaagatttttagaatacagaattatgtgggtacttgtgctttttgatcttccaactgagagtaagaaagacaaaaagcaatattctgaatttcggaagaatctattaaaggatggatttacaatgttccagttttcaatttatttgcgtcattgtccatcgcgagaaaatgctgatgtgcatattgcaagagtcaaatcctcactaccacctcttggagatattggcattatatgcattacagacaaacagtttggtcagatggaaatattctcttgtaagaaaatgattgaaaaaaaagatatacctcaacaattagagttattctaacaatatgtagctatatcaacagagcaatcgatgagaacttaaatgtttctacaaataaaaaacccactataaaagtgggttttatatacaaaaatagcaaatttattttatccaacacaccttgtcaaccatctgtatttaagctcattcagagcatcctactgtttctgatatgtcaaagataaaattttgaaagcaaatcacaactttacaaggcgaataaataaatgagatttaactgtttctgatatgtcaaagataaaattttgaaagcaaatcacaactaggctggtacttcaatctcggtatgtttactgtttctgatatgtcaaagataaaattttgaaagcaaatcacaacatgatttctacatagtctggatttgattgcactgtttctgatatgtcaaagataaaattttgaaagcaaatcacaactcgatttcttcatattgcgaaagtaactccactgtttctgatatgtcaaagataaaattttgaaagcaaatcacaacacctcttccgctatttgtatctggctttcactgtttctgatatgtcaaagataaaattttgaaagcaaatcacaacacaggggttcgagtcccctcacctccacgactgtttctgatatgtcaaagataaaattttgaaagcaaatcacaacggtaacatccccgtagcaacaaaagagtttactgtttctgatatgtcaaagataaaattttgaaagcaaatcacaactacatatcagaagtatatgcttctttccgactgtttctgatatgtcaaagataaaattttgaaagcaaatcacaacagccccctgaagataatcattgaacctgtactgtttctgatatgtcaaagataaaattttgaaagcaaatcacaacttctgatcaagggttgtgaagatgtattcaactgtttctgatatgtcaaagataaaattttgaaagcaaatcacaacggaatatgtgcaggaaagtagaagtaacaaactgtttctgatatgtcaaagataaaattttgaaagcaaatcacaacagaaacctttgaatatgaagcctatgagcaactgtttctgatatgtcaaagataaaattttgaaagcaaatcacaactctcaattctcagagactcgtcaggggattactgtttctgatatgtcaaagataaaattttgaaagcaaatcacaactaaacacacaataaggagtacaaacggagtactgtttctgatatgtcaaagataaaattttgaaagcaaatcacaacagggtctgcataatactcctgtactgaaaactgtttctgatatgtcaaagataaaattttgaaagcaaatcacaactgtattacctagcgatactttgaagttatcactgtttctgatatgtcaaagataaaattttgaaagcaaatcacaacaattttaaacaaatatagtaattaattctactgtttctgatatgtcaaagataaaattttgaaagcaaatcacaacactttattacttttctcttgactatcgtagactgtttctgatatgtcaaagataaaattttgaaagcaaatcacaacatgtctgttgttttcatatcggtaaaattactgtttctgatatgtcaaagataaaattttgaaagcaaatcacaacaggagacccgtattgtggtgctgagagcgaactgtttctgatatgtcaaagataaaattttgaaagcaaatcacaacagggtcgcttcattcaccccgttacaatatactgtttctgatatgtcaaagataaaattttgaaagcaaatcacaacgtaagattattatcgtaaaaaaagatatttgctgtttctgatatgtcaaagataaaattttgaaagcaaatcacaacgcataaaatattttgaaataagtaaatcaagctgtttctgatatgtcaaagataaaattttgaaagcaaatcacaactaaagatatccagccctgacgttgttcctcgctgtttctgatatgtcaaagataaaattttgaaagcaaatcacaactagtaaccgcaatggttgtaagggactggggctgtttctgatatgtcaaagataaaattttgaaagcaaatcacaacgatgtgtggaacggagtaaaagacgattgtgctgtttctgatatgtcaaagataaaattttgaaagcaaatcacaacttagggacagagtggtacatagccacaacagctgtttctgatatgtcaaagataaaattttgaaagcaaatcacaaccggaaaaccaagattgaaactacctgattcgctgtttctgatatgtcaaagataaaattttgaaagcaaatcacaaccaaggtctctgacgtgttctttttcaagaagctgtttctgatatgtcaaagataaaattttgaaaacgaatcacaacaaaaagccatctttgtaaaaactatttacatatttgtatatggagtaatctcagccgattcttaggattcgtgcaccgtaaagccacttttttgtggctttgctttttatatataagcaattcttcataagtcttatatgttaatgaaaaaatttaagctgaaagttgatgcttttttctgcctctgaatctgtcaagaggagaagggggcgttgggggcggggcgagaggttgcgccgacagcatttattagcaaaatgcgtctgtttgagccaaaggcgagtcagcattttgattagaaatgcttaggcaagcaacagccccgccgccactgcaccgcgaaccccttgacagatattttatgtggtagtaattatttttattacatttgtgaactgatattaggactttttcctattttcagtttacatatgacgaaaaacgatttcatattagagatttataaagatgaccgaactgtctttagattgtctgatattgcaatgcttttctcgcaagaggacattatttttctaagcgatcgtttaaattattatgtgcacaccaacaaaatattaaatccccggaaaggcatttatgccaagtcgggatataatccgctggagcttgctaatatcctttacaccccttcctatatctctttagaatatgtattacaacggtccggaattgtttttcaatatgactcaagttacacaagcataagttatctttcccgaagtatcgggataaatgggaaaacatatagttatcgaagaattaaggaggagattataatggatacgacaggaataatccgggatcaaaatataaatattgccattcctgaaagggcatttcttgacattctctatcttaataaggatttctatgtcgataatattaatcctcttgacaaacagttgatagaaaacatactgccaatttacaaatcagttgcgttagaaaaaagggttgctaatctcatacaaaatggttgacattaataagcataagtttttcctttttaaaatcctgaaggatatatacgaggataaagagctggccggcatccttgggttcaagggtggcacggctttgatgtttttttataatctcccgcggttttcagtagaccttgatttcaatctgttaaagacagagaaagaggagatggtatatgagaaagtaaaaggcataatacagaagcatgggacaattcataatgaagcaaaaaaattttacgggattatctgtgttttagattatggtataggtgagaggaaattgaaggttgaaatttcaaatcgcaattacaatgatgtttacgaaattaaaaatctattgggaataaatatgcaagttatgaccacaccgtatatgttctctcacaaactctgtgcattgcttgatcgtaccgcgatcacaaacagagatatatttgactgttggtttttcatgaacaataagaccgcgttgaatcaagaaatcatagagacacgaatgaagatgcctctttctgattatcttcaaaaatgtattgatatgttagaaggaatgagtgataagggaattttgaatggtctcggcgaactgatggatgatgatatgaaaaggtttgtacgaacaaaattgagattagaaactataactcttctaaagttctataaggaatatcctatattgtgtagcacagatttttctgaatctgtcaaggggtgatgcgggcgttggcggcggggcgaggggttgcgccgacagcatttattagcaaaatgcgtctgtttgagccgaaggcgagtcagcattttgattagaaatgcttaggcaagcaacagccccgccgccactgccccgcgaaccccttgacagatgaacaaagaaaagagcagaaacaatccgtgaactgatattaggacatattcctaattccagttcacagatttcataaagtcattttttatactcttgcatttcagtttttttatagcacgctcaagatctgctaattagaaaaatctgtgccactaatttttcttcagtacaatcttgcctttatacgccgtgttgacaacctcgagaaacttgagaaaatcgccgtattgaccgagagcatatcttcccgaaggcatgtaaaacgagtgaataatcttaatagtctgaccatccttgaggcaactcgacctgaaacaaccgaaagaggttttggcctcaaccccggaaggcattgactcaatctcataacccgcaggaatattgacaacaatcgtgtcaatatccttgaaaccttgttgaatgtcaataccatgagtcctctcactcacattaacagattcgaaggtgttcctgtaaggattaaccggaataaaaagcctggttccgcttttactaccatactggcgagtgttccagatataagagatatcgatatatggcaaaggaagctttacctcatttaccataatcttctccatcaccacattaggaattttgataattccggtcagatgctccgcctggtcagagaatttcagcttcgaaaaacctgcatagtcgtcataaatctttacaaaacaactctttttggcatcaatcctcgctccgccctctgccgcaagggagacattcacaacattagactctacattcagggaatcggagtagtcaggaagtctcactactttcccgccatcttcagatacaatcaaagcctcgtgacctgatatcccattgtggacaaatcctaacggaaactcaggatttgtgcactcaagccataatgtatccttctgcaaagggaccatcaggattgcatggttgaactgatggaaactcgggaaatcattaaaaaggtctctgtcatcatcgtccagacgaatcagagtgtagtatgactggaggccggcagctgccagcaaagatttcatgtagtttgaaagagccttgcaatctccgaatcctgttttaaacacctcggctgccggcatcggtttatacccgccgattccgagctgtatgctgacatatcttgtagttgaaccgagatatttatacaatgcctcgactttttcccggtcactgttcgcacctgatatcagttccaaaacttttgcctttgcattttcaggcaactcaccttgatctttgataagagagtagctccactgccccatctcactccagccggaaatattgccactcaccccgtcatacacaaaatccaaaggtttaatgtaaaggcgagggatatagtttaccagacttccgtccaaaggttcatctttaatggctttcaagccgttcaactcccatgtatattttaattctcccttctctgtggagactttcggatcatctgccatattgaagctcatgtgtgctatttttgtttcctcaggtacaataaggaaatagcaagatttctccacagacaggtcgtaaccgatttgaggaaaaaaaacgggaaatgagtttattccgttattccagtttatttcgtattcaaagacaatagtaaagggatatgtggggatgtcgggacttaaccagtatgtcttgctgtctgaggcaagtgcttctgaatattctgttgtcctgatatcctgcattttgtattttttgagttctgctccttgtgagttgtagatttttgcagaaaaggctgtaagtttccggaacttgtctcccgggtattcaaattctgcaaactcttttccgctctcattgagcacggttattacaagtttgtgcaactcttctgcatatataggagtatcgtaactaaatgttgtctcatcgtaacgaaccactgcatttgcattttttataagtgtgtcgggaatggctgatacgactatctgttggagatctgctgtttttgactgtgcctgcaaattcgttccaaaagatatcaggacgagtagtactgaaagatgtaagagtatatttttcacggcttttcttttaggttttagatctttttcaacactatcatctcactgttctttgtggctatcagaccgaaatagttctttatcgcctcataatctgtgaaaggatacagaatctggctcatgtcgaatatatagccgaggtttatagtcctgtctgagacattcaccgcatatgtgcatttgccaccattatccaaaagtgacacccttaccccttttggaacctcctctattgcataaccctccggaatcataattatacaatttaacctgtataaataagggaagctgaactctatcggcaatttacgttctgcctgggtaaagggattctcggttatatgggtgaacaccattggattaagataaatataatcgcccgatgtctctatgttttttgtaaatgtaagtgtctctttgacattaccatctgaggatgtttttccttctatccttatattttcgattttggtctgagtgttgttctgtattgcatctacaatctttacggagtcttttcccgcaacagatgctctgtatgtgtatgcaaactggtttacatagtttgtggttctttcacctttgagattaccctctttgtccagagttgcgacaactcgcgagataaattggtttttcacgaggttggtaaggtcaaccgatttcccgggattctttggatcatatactactcctttgtctaccaataaatctgtaggcagaatatttaaaccgccgtgatttgaggagccgtccatataaatcatctttccgtctttgagctctgccgccacaatgaaggtgctgattttattgatagaggggtttgttatcgggaatctgcctttggaccttctgctgatcaacaccggatagcacttgatatctgcatctctgagagcactcatgagaacgaaattgatctgagcgttgttacctactccctctttggcagcagttctcggatttcctccgtagaacgagtatacatcgttccatttgatcttgctttttataaagctgtagattttgcttattttttcctgttcgtctgtcaccccgttcatcaaaacggctgtttcatccttgaatggattggacattctgttgttggagctgaagtagttttgcttttctagcatttcgataatgtctttccatgttgatgtatatgatttgtacatttcgtaaggatattgagtgcctctgagttcgaagaccactgctgatttgtactcgttcatacaccagacgttatcctcatctttcagagcagggacatcggttgctgtgtatgtcatgatcttgcttgacactgcaagcatctctcccgctcctacccggagctgccctgattcgtccttttgtgtgaccgctatgtgttcataccctttggttctgatattgaagttgaaatactcaagtatgttaatcccgaacttgctgttcattaccgggatatctgactgaaaataccactccggaacgtctgtcacataccttgagactagtgtatatttgaactcaataacgcttcctgcttttacattcgggattgaaaactttatgcgctttgtcgtttcacttaaagcctcatcgaagatgtactttttctcaagttttgtttttataacctttccatcttcaagattatatgaaattgcctcaaggttgtttatataatccctgtcagaaccgtctccataatagtaaggaatatcaatattagcccggtcaacgccctccggcttcaatatcttgattttctgcttgaactctgtctgtaatacaaatccgttttcaggggtatagacatagtatgaataaccctcatcatacaaaacaaccgcctctgctgttgtatctttttgatataccctcattgtaagctcgtcgtttgtgatttttccgtacttgaagcttatctcctgaccccataaaatcacagttcccgctatacaaaatagcagaagtgagcacaaccttttcatttgattgatttttatttgattatgaacaaatgtacgatatttatttttagtggcactgatttttctaattttttgtactacaagcacataaaattttcacagctataatatattgtttatgaccactttgtaatgccttaatattctgcaaattagaaaaatcagtgccacataaaaaaatcacacgaggggtgagtggtgcgttgggggcaaggcgaagagttgcgccgtcagcatttattagcaaaatgcgtctgtctgagccgaaggcgagtcaacattttgatttgaaatgcttaggcaagcaaccgccttgcccccacgtcagcacgaatcacttgagtgatt

SEQ ID NO: 1241 - DNA, 24236 bp, synthetic construct
  source 1..24236: mol_type = other DNA
  misc_feature 1..24236: note = Synthetic
ttagaataaacaggaaaaaaactatggatttatataggatgaaaaatatgatgaaagagttctgataaaatatagaatccttcattattcaatcaggtacttctcatttttactgtgatcaatttccagctgtggaactccatcagtaacccggaaagcaaaaccttctatccatttttctttaggaagatcaatatcttcaccgttgagaatatgtttctgaaagaaataagagatgtcctgatccaggtacttttgaacaaactcaataaaaagctcgtctgtaaactttattttcttctctttacaggttttcagcaaatctcgcatcaaatcatctaaagattttttatagcgggttttcagtatgatttgattatcaagccaaagggcaaaaatagcgcctcgtctgtaagggattttttctacatttctgcttttccagaaatcatcctttattttataattaggaatatttctctcaggattcttccaatgggccttaaggatttcatgattaaacaatttttgccactcatccattgagaggttctttattcttaacctgtttttgtaggtataataatcagtaaagccttcactgaaccaataattcagttcttcatgtttgttttgaatcgtatttccgatccactcatgcattaactcatgatgaaagagatacagataagaatccttgtcattgaaaggattattggttccttggattataaatgcatttttaatagcggaacctgtagtgctgtaacctttatataaactgtctttttgtgaaacagtgggagtcatgataacagtaaaataatcctgatcatagtctttccagaaatccctttgagaatgtatggccttcttcaggttagaaaacaggaaatcatcggtgaaaccgttactccattcatctctcaaagcaaaatagacaggcttatcatgtattgtaaaagaataaaacctgtaatcaccaccaataaataaagaattataaaagccgctccaaagagcagtcttaattttctgttgttgaacttgagatgcaaaattattatggagtgtgaatttttttgggaaatctatccattcaataacgaattgaaattcctgctcatccggcatctctgtaaaagagaccggaaccataaaaagattcttacctaaaacatgaaagaaagtgttgttgattctcggtcggttaaagattttatagctgggatcagtaaaatcctgcttaatatgatacaccagagaaaagtgagttccttttttctgacggatctttattttgttgtctttaggtttactctcaaatataatatcaggattgtccccctttaacaaaacaaggtttttaaaaagctcaatctcgccccagttttcatttgcataatagaaagataatgtatctgatgctttttttaatgtataatctacccgcacttttaaaccattttttgaaaggtcttcatcataatatactttatagctgattttattttgagaataagcaataagcggaagtataaatatcaggaaaattaattttttgaacatggattaagtcgttttcccaaatttaacacaaaaatctatagctgagattccgttttgaagtagaaaagataaaaccgtcagtacaggttatccatacaatagcaattaatacaaaaaatgaatgaaggaggaaggggataaaatttggtttattaaggcttacaacggtttttttatgaaaattatagggcaaaaattgataaaaatcggttcaaggatagaaatatgctaaaatttcagtcattttgcccaaacttttttctttgctactaggctggaattaccataaaacctatatttgcagcctaaatttttaaatataatgaaagaactaattgaaaaaatcaacgcggaatttgaagcgttcactactgaggcaaaccaacaagcggaaaaaggaaacaaggcagctggtacaagagctcgtaaagcagctttagaattaagcaaattgttcaaggatttcagaaaagtttctgtagaagaatctaagaagtaattcaacctttagccggcttttggagccggtttttttgtgcattgaattgaggtcctttatactgaatccaaaattagcgttaaatagtattaaattgttttaaaaatttatctttctttatacttctggtatatatttgtgctgtttattttaaaaactaataataccaataaccatgaagttcttttattttttatttattttctttttttatgctgtttctgcacagaaagtaagaattgtagatgccgaaaacggaaacccggtttcaaatgccaggatcatactccgggatcagatcatttattccaatgaagatggttttgcacctcttggtcaggatgcaggagattttgaagtttcagcctcaggatttcaaacagagaaagttcctgtttttattgcggagatcaagcttaaacctatttataaaaatattgatgaaataaagatcatcaatgtggatatcagaaaaatctttgatgatgtaagcaagaactatgataaacgctactacaacgggccttccctttatgatgtcgtttataaagaaaaaaatcttgataatgataaactgtttttcctggtaattgcagaagccaaattatggagcaaaaataatcgctataattttaaagatggtatccgcaagaattatgatgatatccttcagatgcagctcaataatgtaaaatattttaaaaatgataaatcaggtactgtgctttcagggagaacagatgaattttctcacgaacaactgggcaattttttcttgaattatgagctttacagaatgcagcagcacctgaaaatgaaagagtgtaaatactcaggaaggctgctctttgaagaaggagatgagcaggtgattgcctttaaggttcaatccgggaacggtgcgcagatggaaggggaatttaaatataacaaggcggataaggtgattacttattttgaaaatcattatttccagagcgattatcctaccatgaaaaaaacgggaacagatggccgggaatttatgtataagctgggcgatgccactcttatctttgacttctacaagaaagacggagtatatgttcctgcacttaccagacttgaaggagataaatttacctttttctacaaagatgaagctcatgtcagaaagttcagccgtgaaatcatctataacacttttaacaaaaccgataaaggacttgatccgaaagtgaattttaaagtggggatctgggaaaatgtacctgtgaaagaagaaaaaacagaaacaacattactttctgcggaagaacaggcatttgttaatcaaaaataatttttcctcagagatatacggtgaactttacaaatggattgataatttaatttataaatgaggaaagtgttcagaatatccttctgtacgtacttttttatgtctgatttttcattatctccttaaattcttttatctttaagcaatcaatatatattatgaggataaatagattttttgcagtgcctgcaataatgctggctgcccagttttcatgggctcaggtaaaggtagacccgaaagagaggcttgatcctatcgtaaaaagttttgtagatgaagtaaacaacaattcacagttggaaaaaatggcttacgagctgctggacggcataggtccccggcttgtaggaacccctgaaatgttggctgccaacgaatggagtgcggctaaactccgttcctggggagtagatgcccatcttcagcagtttggaacatggaaaggatggcaaagaggaactactcatgtagatatggtgtatccaagggtgaaatcattagctgcaacgcagcttgcctggagtccgtcaactaaaaaagctgtagaagcagaagtaatcattcttcctaaggtttctactaaagcggattttgacaaatggcttccttctgtaaaaggaaaaatagtgctgatggcacaataccagaaaatcggacgttctgatgagcagatcaaggaatttgcaacccctgaactctacgaaaaactgaaagcagaaaaagaacaggctgctaaagatttcagttcctatataaagaatatcggctatgataataacacccttcccgaagctttagaaaaatccggagctgcaggaattgctatttcaaactggacaggaattatgggagccaacagaatttttggagccaaaacaacaaagattccgatgattgatatcgatgttgaagactatggaatgctttacagaatggctgagaacggggcacagcccaaaattaaaattgatgcacagtctaaagttcttccggaggctaaaagcttcaacaccattgggatgatcaaaggaaaagagaagccggaggaatatgtcatcctttctgcccaccttgattcatgggatggagcacaaggagctacagataacggaaccggaacaattacaatgcttgaagccatgagaatcctgaaaaaatattaccctaacaataaaagaacaattgttatcgggctttggggaagcgaagagcagggactgaacggttccagagggttcgtagcagataatcctcagatcataaaaggggtacaggctgctttcaaccaggataacgggacgggtcgtgtcgtaaacataagcggccagggattcgtaaaagcatatgattatataggaagatggctggacggggttcctaaggcggtaagaagtcatatcaaaacagatttccccggaatgcctggcggtggaggttctgatcatgcctcatttgtagcggctggagtaccgggaatttctttagggtctttgaactggggatatttcggctatacatggcatactacaaaagatacctatgataaaattgttttcgacgaggtaaaaaacaatgtagttttgacagcagcattggcttatatggcctctgaagatccggaatttgccaatagagaaaaaagagtaatgcctcaggatgataaaggggaaacgataaaatggccggaagctaaagagccgagaagaagctcaaaagattataaataacaattaaatagtaatgattcatgtccgcggctgcttctgaacagaagcagccgcggtcactttaagtatattttacagtaaaaatccgtgttacaattaaacgtgaagcttaatttctgaaaactgtgagataaaaggctggtaatctgcagtatttaattgtccgaaaccatagctgcagaatataaacggcagattattatagagagcggaagtataatccgtttgagtatcacctatatataccgagttttcagggttcatatcattcctttccatgatcagcctgatattttccgatttcggttttccggtccggccatgagactcaaagtctttgaataaagggttaaacttataatagtctaaaaaggcttcaatatatccatcctggcaattgctgacaataaaaagattatgggtaccggcaagaagctgaagcgtttctccgactccggggtagagaacaccaccgtgttgacgcaatgcgatattttcatatcccgaaacttcagtaagaatacgctctgtctgctgatcggaaataccgggaacaatatccctgataatatcttctgtaagaagtcccatatactgattcagatcttcgggtctcatctcttcccgtagcaggttatgtttagctaaaacattattccatattttgatgatggtcgctcttgaatcccataaggttccgtccagatcgaaaattaaattcttgtaattcaatatatttttgtttaggtgttatgttcttgtttgtaatatttaataataggctcacttttttaaggaagctagaattgagtttcttttatttttcttgatgatgaaagaatagtgattagtgttttctcatgacggttgatgtactccattgttttatctgtaataacccggataagctccggtaatttaaatgggttatcatacaaaaactgaagaaaatcaatatcggaaaaatcaatattataagattcaaaatttccgatgctctctatacctctccaccatccattgattttcatatcgggaaaatattctttaaagagtatctgataactattgtaaaaatccagtattccaatgaacaggtcattttgattattgctatagccactgaaagattccagtccgaagcagataatttgtttatcatcttccttgtaatcttttaaactaaaccaaatgtgtgagttcttttcttctgctctgttatggttttcaaagaaatagtatctgtcttcatatattttttccagctctttttttagcccgtctctgattttattaagaatgatagcttttgcagaatgaaaattatctgagatttccttggcgctttttaaatcgcttaataataaactttttatttcatcactcatatcattattgatggtctggttggttaacttttttaccaaatgtaaatattgcttaatggtttctctcaagacaggttgattaacaacctgctggtggcattcttcaagccagtttttaatatgacttttataagttatcaaataaaaatctttattgacttctaattgtcccttacttttaccggagggttcattcccataaaggttcaaatacagcagtactgcctgtttgtaatgatttttatatctttcaagttgagatacctgatcaacggcataaattttattttcaatgatgatcgtattgttaccatcttcaataataatatctatatatccgcctgtttttctttcaaggtctatacttccaaggtatttttcaaccgttactttagcattttcaaaattaaattgatggatgggctttaagcattctatctccttaaaaaacaattttagaaagacagaaccctgtccatgagagcctctaggatttaataattcaccaatcattgcagaatgggtatatctttcattggtttccatactcatgattgaaaaaatgttgaaattttctccacggatttgagctatatcatggtatttttttgaaattacagataccttttccaataaaccttttatttgtgatagctgcgtattactcatatttataaaatcatgctcaactgtactctttttcttgcctcatccacttctgttacctttaccttaacgtgctggtggagcttcactacttcattcacatcagatacatatccgtctttcagctgggaaatatgaaccaatccgctttctttgattcccaggtccacaaaacatccgaaagctgtaatattgttaacgattcccggtaagatcatgcctgctttcagatctttaatactttttacattgggatcgaattcgaatattctggcagcttttctcgggtctaatccaggtttttcaagttcctttaaaatatctttaatgcccaggattccaatgtctccggtaatatagttttccggttttatcagggcgattttttctttattggctatcagttcattggttgtaatgcccaggtctttagccattttttctacaataccatacgcttcaggatgcaccgcagaattatccagcggattttttgcattggtaattcttacaaacgctgctgcctgctggaaggccttttctccaagtctaggaacctttttcagttgttttctgtcttcaaaagcaccgttttcagtcctgtaattcacgatgttttcagccattttttctccaattccggacacatagcttaataatgatttgctggctgtatttaaattgatgcctacagagtttacacatttcatcacggtagaatccagttcgttttttaattgagtctggtctacatcatgctgatactgtccgacaccaatagatttaggatctattttcaccagttctgccagcggatcagagagtcttcttccaatggaaaccgctccacgaactgttacatcataggtgggaaattcttctctcgcaattttacttgcagaatataccgatgctccggcttcagaaaccacaaaaacctgaatgggcttatcaaaagcgatctttttaataaagaattcagtttcccggcttgctgttccgtttccgatagaaatggcttcaatattataggcattgaccattgaacggatctttttcatggccattccactttcgttctgaggagcgtgagggtaaagcgtctcgttgtgaagaagatcacccttctcatccaggcaaactactttacagccactcctgtagccaggatcaatagccagaattcttttccctcccaacggcggagccaaaagcagctgactcagattctcagagaagatctcaatcgcttttttatccgctttttctttagcttcctgtaaagcttcattggaaatagccggctccagaagtcttttatagctgtcttttatggccagggcaatctgtgtagaactttcgttatcagatttgatgatggctttttcaataaaatcaatagcttcttccttgtcaattgccacattggtttttacaaagccttccgcttccgctctcaacattgctaaaagcctatgagaaggagttctgttgaggttttcttcccattcaaaatattgagagaacttctgagcgtcttcttcatcttttttcgcctttaccactttagagctaataaccgccttacgttggaatagacgacgcagattcttacggacatacatattttcattgatccattcggccataatatccctggctccctgaagggcatcttcctcagaagggacatcattgttcaggtattttgaagccagaaactgcagatcattgtttttttgactcataatgatctttgccagaggctcaagacctttttccttggcagcgtctgctttggtctttttacgctttttataaggcaggtataaatcttccagttcctgaagatcaaagctctcttcaattcgctgctgcagctcaggagtcaagactccttgttcttctatggattttaaaatagattcttttctttttacaatctcttcaaactgcttgctgatctttgaaatctgttcaatctgcgtttcatccaggtttccggttttatccttccggtaccgggcaataaaaggaatggtgcagtcttctgctaatagttgtaaagtattgttgatgctcttctcagaaatatcgagctgcttctgtataaatgctacggttgtcattgtttggttttcggatagctaaaatagggttttgggatgagaaaaagttgaatgtttaggcaaaattgaacagaacaattgctgaacaaaaatcccccgtattggaagacgagggggcttaaatgttttcacaacggaataatccttattgtgaattactttcaaaatttatatgacaaatataatataaaaaattttatagttgtttacggaaacccgtaattctcatagtttttttcttactatttttatatagtttcaaaaaggtggttgaaattagttagaactaaataaagaggctactgtaaaagtagcctcctgaaagtaattcacaactaactccgcacatctagatttatcttagacttgttagtaatttattgaataggctaaatattgttggcaataaataagttaagtttggacctcaacaaattcgactcgtcagttcgaattacctattctattatgcaaatataaataaaaatatttaaatttgtacggagttataaaatgaattataaactattattagttatcggtagttggctagctatacgttaagtttggaccttaacaaactcaactcgtcagctgaattactataattataatgcaaatataaaaaaatatatatataaattgtgcggagttataaaataattttaataatattatttaattagttgataatcaatatgaggaatatacttggcttagatttaggtactaactcaattggctgggccttaatcaaatatagttttgataatagacagggtagcatattgggaatgggtacaagagtattaccaatgtctcaggatattttaggtgattttggtaaggggaactccgtttcacaaacagcaatcagaacaggatatagaggtgtaagaaggcttcgtgaaagatttttattgaggcgtgaacgacttcatcgtgttttaaatattctaggctttttaccggaattttatgcctcacagatagattttgataaaaggtttggaaaatttaaaacagaaacggagccgagattaccttataataaagagggatttatctttaaaaaatcctttaatgaaatgctttcggattttgaaagattccagcctgagcttttatcaggtaataaaaaagttccttatgactggactatttattatctgaggaaaaaagcggtttctcaaaaaattgagaaagaagaactagcatggattcttttgaattttaatcagaaaagagggtattatcaattaagaggagaggatctcgatgaggagagagagaaagtatttgttacattagaggtagatagagttgttgactctggagaaaaagtaaaagggaaaggtctttatgaagtttactttaccaatggctggaaatacgaaaagcaaatagctaagccagaggattggattggacgtaccaaagaatttattgttacagaatccgttttgaaaaacggagagataaaacgtacttttaaagccgttgactctgaaaaagactggattgccattaaaaccaagacagagcaggaaattgaaatatcccataaaacagtagggtcttatatttatgatgaaattcttcaaaatcctaaacaaaaaataaaaggaaggcttgtaagaacaattgagcgtaaattttacaaagaagaattaaatgaaattcttaaaaaacaaaaagagttccatcctgaacttaacaatgaggatttgtatgccgattgtataagggaactgtatagaaataatgaagcacatcaattgagtctttctaaaaaggattttgtgcatttatttttagaagatatcatcttttatcaaaggccattaagaagtcaaaagtcttctgtttcaaattgtacactggagtttaggaaatataaagatgaaaatggtaaagactatacgcgctatctaaaggttattcctaaatctaatccgtattatcaggagtttcgtatatggcaatggatgtttaatttatctatttacagaagagaagacgatattaatgtgacttcggaatatttaaatacaaaagaagattatgaaaagctttttgaatttttaaataacagaaaagaagcggatcagaaagcacttttgaaatattttaaacttaatgaaaagacccatcgatggaattatgtagaagataaaaaatatccttgtaatgaaacaagatcgataattgtttccagactggaaaaagttgaaaatagtattactggatttttgacaagagaaattgaacaggagttgtggcatctcatttattccgttaatgataaaacagaatatgagaaagccttaaaatcttttgcagaaaaaaagcatctggatgagaatttattctttgaatcattcagaaattttccaccttttaaaagtgaatatggagctttttcggaaaaggctattaaacgtttacttcctttcatgagattaggaagatattggaattgggaaaatattgatgagaaatccagacagagagtgcaaaaaattatcgatggggaatatgatgaaaggattacggataaggtaagagaaaaaacggttttattacaaaaggaaagcgattttcaagggttgcctttatggttagcgcagtatgttgtgtatggaagacattcagaagctttattgactggaaaatggaattcggttgctgacctggatgaatatctgaaagattttaaacaacattcacttcgtaatcctattgtagagcaggttataacagaaacacttcgcgtggtaagagatatatggaagaaatatggaaacggaaccaaagacttttttgatgaaattcatattgaacttgcccgtgaaatgaagcttccggcagatgaacggaatagattgaccagaaagattactgagaatgagaatacgaaccttcggattaaagcgttattggcagaaatgatgaatgatactgatgtagaaaatgtaaggccttattctccaatgcagcaggaaatattaaaaatttatgaagatggtgttctgaattctgatatttcagttgacgatgatattcttaaaatcagcaaaacagcccagccttcttcatctgacctgaaaaaatataaactttggctggaacagaaataccggtcaccctatactggagaaattataccgcttaataaactttttacatcggaatatgaagtagaacatattattccccaaagtcggtattttgatgatagtttcagtaataaagtgatctgcgaatcttcggtcaataaattaaaagataattatatagggctgggcttcatcaagaagtttcatggatataaaatttctgataaaattaaagtatttgaagtagaagaatatgaagattttgttaagaaaaattatgctaataatcgcagtaaaagatcaaaattgttgatggaagaaattccggaagagatgattgagcgtcagcttaatgatacgcgatacatcagtaaatttatatcgggagtgctttccaatattgttagaaaagaaaaaaacgatgatgggataaactctaaagatcttattcctggaaatggaagaattacttcacaacttaaacaggattggggttttaatgatgtttggaatgatctgatattgccacgtttcgaaagaatgaacttattaacaaattctaatgactttacggtatggaacgacaaatatcagaagtttttgccaacagtacctattgaaatgtctaaaggattttcaaagaaaagaatagatcatcgtcatcatgcattagatgctttgataattgcctgtgcaacaagagatcatatcaatcttcttaataatcagtcttcaagatctgagataaaacggtatgacctgaaaagaaagcttatgaaatttgaaaaaaagaattataagcatccacaaacaggaggcagaattgaaagagaaattcctgttttgttcttcaagccttgggaaagtataactgttgatgctaaggaaaatctggagaaaatcattgtgagttttaagcagaaccttagagtcatcaataaagctacaaatcattatgagaaatggactgaaaaagatgggatcaaaatgaaagaattggttaaacaagagggaataaactgggcgattagaaagccattgcataaagatactgtttcaggaaaagtagacctgccatggataaaaattcctaaaggaaaaatactaactgctacaagaaagatgcttgattcttcttttaatctaaaaacaataagttctattacagatacaggaattcaaaagatcctgaagaattatctggaatataaaggaggtaatccggaagatgctttttcacctgaaggaattgaagatatgaatcaaaatatcaagaaattcaatgatggaaaagctcatcaacctattaccaaagtgagggtttttgaattgggaagtaagtttccattagggcaaacgggaaataaaaagcataaatacgtagaagcagcaaagggaacaaatctattctttgctgtttatgaaaataatagcagtaaaagaaactttgaaactattcctttgaatgaaattattgaaagacaaaaacagggattagatcctgtttccctcaataataaaaatgatttttatttatgccctaatgatttggtatatgtagccgcagaaggagaatctgttaataatttaaacgttcaggaactttcaataaatgatgtaaataatatttataaagttgttagtttttcaggcagtcagattttttttgttagacaggaaattgctgcttcaattgttaataaagctgaattttctaccctaaacaagatggagagagcaattgatggaaggatgattaaagaaacctgcgtaaaattgagaatagaccgtttagggaatattattaacgcttaattatgataacccgttcagtttatatcggtaatcctgcatatcttaaagcaaaagatgagcaaatgaaaatcctttgtcctgaaactaagacagagaagggaagtgttcctattgaagatctgggactgctgatgttagatcattttcagataacactttcccatcagttgatacagaaaatgatggggaataatgtagtagtgattagttgtgatgcacagcacttaccacatgggatgatgttgccactttatggtcatacagaacattctgaccgggtgaaagatcagcttgaagtaagtgaacctttaaaaaaacaattatggaaacaaactgttgaatgtaaaatagaaaatcagaaagaagtacttgtgcgattgggtaattattttgagccaatgttggaatatcagaaaaatgtaaaaagtggtgatgttaccaatatggaaggaattgctgctcagcattattggaaatatcttattagtctcgactttttaagagaaagatatggagattctcccaatcagttttttaattttgggtattcagtactaagaagtattgtagcaaggtctattgtagagacaggtttacttcctgtattgggaatttttcataagaacaaatataatccctattgtctggcggatgatttgatggaaccatatcgtccgtttattgatattctggtaatggattggttgtcgaaaaaccctgaaacggaagatttgacaaaagaatttaaagctcacattctgcagattgcaacaaaagatgtgagaatagatggcaaagtaagacctttgctagtggcagtaaaaacaacaacaatttcactatacaaatgttatacaggtgaaaaaagactgatttcttatcctgaactgatatgaattccgaaaggtttaatgcttacagaattatgtgggttttagtattatatgatctcccgacagaaacaaaaacaaatatgagagatgccaatcggtttcgtaaggggttgatagatgatggatttacgctttttcaattttctatgtatgtccgccattgtccaagtcgtgaaaatgctgaagttcatattaaaagggtgaaatttatgctaccgaaggcagggaaagtggctattatgtgtattacagataagcaattcggagatattgagattttctttgccaggaataaagaagaacctcctccagcatttcagcaacttgaattattctaattttttaattctaaataaataataaatccgttgaaattcaacggattaaattttgaggctgtgactaatcacgaagataataaattttgaaagcaattcacaaccatattttcaattcaaaaaagcaggggttagctgtgactaatcacgaagataataaattttgaaagcaattcacaacatggagcatggtcactttgggtaaaggattgctgtgactaatcacgaagataataaattttgaaagcaattcacaactcatataagaacgaacagaactcaccgaaagctgtgactaatcacgaagataataaattttgaaagcaattcacaactaatgagaattaatataaacttcctgcaaagctgtgactaatcacgaagataataaattttgaaagcaattcacaactaaatatggaaatgcctgtgccgtgccccagctgtgactaatcacgaagataataaattttgaaagcaattcacaacgaattattacaatcaaactcagattaattcgctgtgactaatcacgaagataataaattttgaaagcaattcacaacaaggcgctacaactgatcggagagattccagctgtgactaatcacgaagataataaattttgaaagcaattcacaacagaaccttgtctcctttcacatatttcctcgctgtgactaatcacgaagataataaattttgaaagcaattcacaactgcgatttgtagcttatcatctacgctattgctgtgactaatcacgaagataataaattttgaaagcaattcacaacaaatcaagcagaaggagcagattggttaatgctgtgactaatcacgaagataataaattttgaaagcaattcacaacccagctttagaaattccttcaccatacatggctgtgactaatcacgaagataataaattttgaaagcaattcacaactgccggtccttcctcttgcacatccaaattgctgtgactaatcacgaagataataaattttgaaagcaattcacaactattttgacggaagacccagcggcgtattagctgtgactaatcacgaagataataaattttgaaagcaattcacaactaagtcctaagccttccatatctgtaatgagctgtgactaatcacgaagataataaattttgaaagcaattcacaacataaagctctttgatattacgatgtgccttgctgtgactaatcacgaagataataaattttgaaagcaattcacaactgattcataccattgttttttaaaatcagtgctgtgactaatcacgaagataataaattttgaaagcaattcacaacagcgttttcgctatcctctacaccgtttacgctgtgactaatcacgaagataataaattttgaaagcaattcacaacctgccattaaatggataccccttgagatcggctgtgactaatcacgaagataataaattttgaaagcaattcacaacaaaatacctgttttattgagtttatcgactgctgtgactaatcacgaagataataaattttgaaagcaattcacaactcatggcgtcttctcccatcgatttgattcgctgtgactaatcacgaagataataaattttgaaagcaattcacaactcatggcgtcttctcccatcgatttgattcgctgtgactaatcacgaagataataaattttgaaagcaattcacaacacataaacgaaatggagtatggaaagggatgctgtgactaatcacgaagataataaattttgaaagcaattcacaacaattatgtcaattttttcaaaagtgtcgatgctgtgactaatcacgaagataataaattttgaaagcaattcacaacacactttttctttgtacctaatcgtatcctgctgtgactaatcacgaagataataaattttgaaagcaattcacaacatgttgatcaggtaggtaaagcaagtattggctgtgactaatcacgaagataataaattttgaaagcaattcacaaccaacctaatcaagtccaatttgatcttgaagctgtgactaatcacgaagataataaattttgaaagcaattcacaacccaactggtacccgccagtagaaggcgatagctgtgactaatcacgaagataataaattttgaaagcaattcacaacagatgcaatcaacaataatatgtcttctccgctgtgactaatcacgaagataataaattttgaaagcaattcacaactgcgattgacttcgggtggactgcgccgacgctgtgactaatcacgaagataataaattttgaaagcaattcacaacaatttgctttgttgataaactggtcttcaggctgtgactaatcacgaagataataaattttgaaagcaattcacaactgataacattgcgaaaagtacgcctgtagagctgtgactaatcacgaagataataaattttgaaagcaattcacaactataaccaatacaaggaggacattcacaatgctgtgactaatcacgaagataataaattttgaaagcaattcacaacttcatgctccgagttcataattcagaattagctgtgactaatcacgaagataataaattttgaaagcaattcacaacaggttcgaatcccgtattctccacaaatatgctgtgactaatcacgaagatagtaaattttgaaagtaattcacaaccgactgttcttttgacaaaaagtgatttctgctgtgacaatcacgaagatagtaaattttccggatgcagagtgaatttcaacccaataaagtccccagctcaaagcaagggacttaactcttgctgatacattcgaattattctctgtttttaacaagtacccagccgttgtacctgactgaggtgttggcattgttattttcattccatgagattgtgtaccaataggtggcagtaggaagcttcttgccaaatgcggtgccgtcccatttgaagtttcttattttaccggcctcataaagcttatttccataccggtcataaacttcaaaaataaggtttctcttgtaagccagggctgaataatcaatattatcatttttaccgtcttcgtttggagtaatggcatttatcagattaggaactgtaatttctgctgctacgggaacgcagttgtattgatcttttacatagaagatatgttgtcctctcgtaagattcgtgaaaatattgacatcctgccaattaccggtctggtctgcagcgtactgatacggaggagttcctccggtggcattgattgtcgctgtattattgacaatgtcaattgatttgataacaggattaggagaagcatggacttttaccgtttgtttagtggtacattctcctgattttaaattaacccaatacgtaccaacccctacattggtgatctgctgggttgtggctccggtactccataaataggcattgaatccggggccggcatcaagactggttttatcttcaatacagattgttttatcaatcaatacagatgaagtgttggccgggataacctctaaagttacttttgctatcgaaaaacatccgttactgttggtgaccctgatgtaaattgtgctattggaggcaatatacgaggcaggatttgcagtaatttcattcgtcccgttcgtggcatctgccagtgatgggaaataccgtttggtaactcctgtctcagacgttacattggccgttgtaagattaaaagaagctgtagaagggttattttcgatataacatgatttcacggtagtatcattgactttcggaaggctgcttaccgatacagtggttggctggctgattgcattgcattgtgagtttaagacagagccctgagggcctgctttaaacctgattaaataattaccggcaggtaatcctgcagaattgaatgtgtaattaggattatgagtcggcgttccctggtctatccatgttgttccaccatcactgctatattgccactggtattccacggggttgtatgagcttcccgtaagggtggccgtaaaatctacagtagcattcttgtttggacacaacgtggtgctggagccgggtagtgcttgcatagtggccggaatacagggctgcacagtaatgtcatcaatcgccaggtcattaccacagccattaccaacagagttgttgataaactgaagttttacggatgtgctggaagcattgttgaaaataatagagtattgtgtccaggtttgattggtcggaatatttcctgtggccgaagtacccagcgtgttacctgtggccggatcaattgcccggagtgtaacgttgggatattgatatcctgtaccgcaggtgccgggagggttaacattgagaatccaaacagctaattttaaagtagtgtttggacaaaggttgctcattgtatattcaaaaaaaatggtagctgctgtagacggtgcattaatcagcatcatcagcccattgggattcccggtatgatcagcggaatttaaaaagccattgcctcctgtacttggtgtttttaccaatccggaatagccatccgccaaagcgcttccaccgggagggcctgccgtacctacaaaaatagttgaggtagtggcgcctggagcataagtggataatggaccataccatttatcagttgcgttgccctgtccgaaagtttgattcacaatcgggggtccccatgttccggcacaggttggaggagcttgcgcattaagttgcaaaacgctaaaaatcgaaaataagaaaaccaatatagaaccggctttctttcctgaaagtaatgttttcttcatatcttaaaatgtgtttttttaatggatattatatcataatggttatgtatttaattgatttaatattgaaattttaatacttaattaaaagttgtagtaaattttcaaggaagttgatgtttttagtttttatttgtgtttttattatttattttagttaattatttgaaatttaattatatttaaggtgttttatttgtgaatttacataaaaataatgatattttttaattaattatctttttgaaacttctatgtcaggatggtgattttaaatgaaaatagatttaattagaaagtaaaaagaaataaaaaatttcatttcttgatatatgttaagataccggacaatagctttctctatttttgtacccggaaacaacaaaaatttcgataaacttttaaaacaattcaataatatgaaaaaacttagtgtaattgcattagtaggagtaggattgctggcagcatcatgtaatagcaaagaaaaatcagatacggctgtagctacagaacaggctgttgcagaaagcaaaggtgaggtattggctgtagatacaacggcttcagtagtaaactggaaagccttccacaaaggtggtttcgcgcctcgttggggaactttaaatataaaaacaggtgatctaagtatcgaaggcgggcaggttaccgctggaaattttactattgatatgacctcaattaaagtagatccggcttcagtaacagaaaaagataaaaagcctgcagatcttgaagcccacctgaaaaaccctgacttctttgatgtagagaaaaatcctgtttccgactttaaaattaccagcgtagccgatttaaaagaagctcctaaagatgcagttgcaggagcaaacaaaacagtaagcggaaaccttacactatcaggaaaaacaatgaatgtaagcttcccggctaaagtagatgtggcagataatacagcagctattcaggctaaatttacagtgaacagagcagattggggaatcaaattcggaacgtcagaagcagatcctgctgaatggatgatcagcaaagacatcgaaattgcaattgatgtaaaagctaaaaaataaggtattaaacaaaataagttataaacccttaataacaattgagctgccctatgaggcggctcttttactttttcagattcatgactaaattaagtagacaaaaatcaattcaattcccatgaatcctgaatacggacaccgtattcacttccaaggtacaaaggatttccatgtttttcagaccagaatccatcgaggatatctttactcaggcaacggtatacggcaactcctttgtagattttggaatcgtctccttcataattgaaattaatgactaaaatatggtctttgtaaaatcctgtaccgttttggatgtgatttccaataatccaccgggcaataatacggttgttttcatcaacggataatgttaatatgccgcggtaagtagcttcggaagtgtcttcctgattgcttccctcaatagaaaaggttccggccaggtcatgtattgtcattggtttattgtatggagaagcaaaattaaaaaattcctgctcatagtaacatgcaatcgtgtcaatatctgaaacatctctgagggaacttttcattaaaaactttatttttgctgcaaattaattgtagatgattccttttctgctgatcgctaactttattacattcggggtttttggatttgacaaatggcaagccaggaaacaccagtggagagtttctgaaaatgcccttttaggactttcattcatcggactgttaggagcagcttcgggaatgattatttttaaccataaagtttccaaaaaatcatttcttgtgaaatttgttctcgttgccgtcattgatgttgttctgctttacaggctgataagacattaatgagtacgagcctagaacccttttttgatggatcttaactttttttagcaatctataacaggcaggcggcattattttttctgtgttattaagataacaccttaaatcataatatcatgtcaaaaaagattgcaattctggccacgaatggctttgaggaaagtgaacttcaatcaccaaaagagtatctggaacaacaggggtggactgcacacattgtaagtccaacttccgggacaataaaatcctgggctgaaaaagattggggaaaagaatataacgtagacaaaaccctggatgaagcatctgcttctgactatgatgcactggtacttccgggaggagtaattaatccggatcaattgagaaccaatgatcaggctttatcatttgtgaaagatttctttatacagaataaacctgttgcagcgatttgtcacggacctcaggttttaatcaatgcagaagttgtcaacggcaggaatatgacttcagtaaagtcaatcagcaaagaccttatcaatgccggagcccattgggaagataaggaagttgttgttgacaatggattggtaacaagcagaacgcccaaagaccttccggccttcaacgccaaaatggtagaggagttcaaagaaggaaaacatgcggaacaaggcgtatagcccacgctgaaataataaagcccggatatcagatccgggctttttatattaatttttatccattgtctgaacaggcccttgaaaatgaaccgtactacatttttatttttaataatgaatgtgatatattggtgcaggaattatattgaaacaaagtacaattgaacattctgcagaaccagatgtagctcgtttttttcaatatcccaaagtagtcgtatctaaaattctcattatgaaattgttaaatattgcataaactttttaattaattcatttaaaatcactatttttgcacccgtaaaaatcctatatgcaaaacattagaaatattgcgattatcgcacacgttgaccacgggaagacgactttggttgacaaaatcatccacgctaccaacattttcagagaaaatcaggagagtggagaattaattatggataataatgatcttgaaagagaaagagggatcaccatcttatccaaaaatatttctgttacctataaagacactaaaattaacgtaattgatactcctggtcacgccgatttcggtggggaagtagaaagagtattaaaaatggcggatggagttattttgttggtggacgcgttcgaagggccaatgccacaaacaagattcgtacttcagaaagctttggaactgggactaagaccacttgtggttatcaataaagtagacaaaccaaactgccgtccggacgaagttcacgatcaggtatttgatttgttctttaaccttgaagctaccgaagaacaactggatttcccaactttctacggttcttccaaacaaggctggttcaatacttcattagaacagactgaagatattttgccgttattagatggtatcttacaacatgtacctgccccaactgtaactgaagggaatcttcagatgcagattacttcccttgattactcttctttcttaggaagaattgcaatcggaaaagtaaccagaggggagcttaaagaatcccaatggatcggtcttgcccaggcagatggtaaaatcataaaaggaaaagtaaaagaactttacgtttttgaaggattaggaaagaaaaaagtaaccgaggtacaggcaggagatatctgtgctgtagtaggtttcgatgcattccagatcggtgattctttcgtagatcttgaaaaccctgaaccattggaaagaacggctattgatgagcctaccctgaacatgacgttctctatcaacaattcacctttctttggtaaagacggtaaatatgtaacttctaaccacctgaaagaaagattaaca

SEQ ID NO: 1242 - DNA, 24236 bp, synthetic construct
  source 1..24236: mol_type = other DNA
  misc_feature 1..24236: note = Synthetic
aagatcctgaatttacaagcagagaaagaagaataatgcctcaggatgataaaggtgaaacggtaaaatggccggaagcgaaggagccgaggaggagttctaaggagtataagtaagagttaagaattaagaattaagaattaagagtcaagaatcaagaatcaagaatcaagaatcaagaatcaagagtcaagagtcaagattttagatttcagacattagattatattaggaaaaaacaggggctgtacagattattgtgcagcctttgttttttgtggatagagaaggttttttatttccgggattttactttttttgacgatgtaggttttacagattttgttgttcaggttcatactgaaattcatctgagtagattcattttcccaagtatggttgggcggaggaatatagtccgtaaagatcggtctgagattcgcaaggcataataagtttctttttaaagatagtaagagtcttggattatttccaaaatcatcaattacttttattttaaacatactctttcctaaagtgcttccccaatacatttcgcatatagttcctgaaataataacacacagaatagagtagagaaagccaacgatggctattttttcaaaaagaaataaagaaataagaaagaagggaagcatatcaataagtttagcgaaaagcctttctctctcattgcctttataagtagcatcataagggaaatcatactcaaaagaattataaatcctgtatcccaatttatcaaactgccgggtgggtcagcgaataattcttctgtctttaagctcagatattttcatggatatcttttatttttccgatcattcaaaaataaaaataatagttcaataaaacacgtcaggttctgtcgtatcgcgtatctacatttgtgtcagtaaaatgactgcaggaatttttaccaattaatataaaccaaaaaacaaaattttatgatttacgcaaatgcttttttcacatcgggtaatagctatcctaatgaagacattgtagaactggcagataattatacgcaccaggctgtcacttacaaaaaggtaggaactgctgttgaagatggagtgatctatcggaaaaaggataatgatttttatgaaagacaatggtcaggctacgtgaatgcattgtggtggaatatcaaggaaccgggtatctcagttacaaccgttacagaacgtattaacaaggctctggctccgggatatgatatcttttttgatgaaatgtctattgagattgatggaacactttatctgcaaagtaatcaaaagatcctgtcgaataactgtaagataaagcagacagcagaaagcaaggaaatttttaattgcgaaaataaagaaaatatctcgattaaaggttttagtttagaaggaaagaaaggtgaatatgtagccagttccagttccaaaaatgtagggattatggctcacaatgctaagaatcttattatcgaaaagaataggtttaaaaatttcacttattctgcagtatcaggatggggtggagttaaacattttattttcagattcaacagggttaccaatgaatttcctgatggttgggcaacagcaggttccagttacaaaaaggataatatgggtattgtagtagccggagaaaatctgaccatttttaaaaatcactttgaaaattcgtcacagggtatttacattgctgaaaactccaattttgtcagtatttcagataatgatgttgaaaataccattctggaacacgggatgtatcttgattccggtatttcaaatcttaccgtgataggaaacagagtgagaaataccgtgaaagttgggatcaagcttcaaaactctgataaggcaggttatgtcagcaataatatagtaatttctaataatattgttgaaaatacaggcgagggaggcgatggtattttgatcaataatacaacagcgccagaggttccgcagctttatgcaaaaaatgtggtagtttcaggaaatgtagtcagaaatgcaggccagcatgggattaatgtaagatttgtagatctgggagtggtctctaataatgtaatcaatgatatccgctatgcaggaatttatatttctgatacaaaaggagttgaaattgccaacaataatattaaaatgacaaaggaaaatggaattatgattgaagccaataattatttactgtctgccaactttaataccattgaaaatccgggaatgaaagattcaggtttggaagatctgttaacaggaattacccttcgcggaacaaaaaataaagaaatttcattgaggtataataaaatgatcggcaacggaactgctatgagatacggtgtttttgtagagttcgtagaaccggcaggccctaatcctcagcagcagacttttcaggagacctatgaaatggtaggaaatacagtgctgaatgtttttcgcagcgaatacaggtttttaaatgtcattaaaaaacttagagtgttccgtaataattatataaatttatcaagctttcctcctgtagagcaattctaaaaaatctataagaataataaggccgtcaatttcggcagccttattatttttgcgatgaatttttcgtaaattaatttagtcttttcatttttaccggttcttattataaagaattagaccgggaacaaggcaaattaatgcaacgccaatcaatggccaatcgccatagagaaacaagaagttggtttcctttgcaggtcccattttgagaattaccaccaaaatgaaaccgatcagaataaggataatacccagtgtttttttcatatatattatttttttgaacctacatactgcaccccggaaagtgcttgtttggcattcacacttactccttttttccctgttttggtaccgccagccgatatctctccattggcacctactttcacgcctccggctttaatacctccttttcctacagaaacattgccgtaatctaatggtgacattccgagacaattacttttgttattcagagcaatagatatctgctgctcttctttgtcaaaaacaatgcatcctatattcacagcatagcctgccatattttgtggcggaatattatacacttctttatcttcgttggccgcgtttcttaccgcataaaaagtagttttcccaataagattgctgatccatatttttttggaagagcttttatcttgggtaattactacatcgttctgcatcatatttctaaccttatccggagctatgatagctgattctgcatattttccaataatactttgtccgaaacaaatggcaaaacctcctagaagtgttagtgttaaaattgtctttttcataatcctaaaatttatgtattcagtatttcttctaattcattgtacagttgctgtattttccttttaccaaaggattgtgccagcacatggcgcttactggtttcacctgtaccgaaccttacaaaaagctctgtattgatgggcagacgcagataataaacagtttccagctcaaatcctgaaaaatcggagaaggggtattgtatcggttcttttccccggactcctgtatctatttttatcatcttttcttcagggaaaagccttgttttggatgatctcaacaacatcaagactatgattaacactgtaaaagcaataagtgagagaccggttttgaaatacgcgctatacactacagtagcgatacctataaacagccatgcaaccagaatgatatgagctaaggaaacaaatgttgttattttataagcttttccgtccggaataagatatttataggacatcattaattttttgtatttatctgtttttgtataaccggtaatacttcttcttcaaatatccggcacctctttttatgagtaagaaacggacttatctgataagattttccataaggactgcttttgtctgcaatggcaaaatagggctttccattcagggaattctgtacaatctctgtttcattttttgaaatgaaattccgtttgaaataccctccgaaactcatggttattttaccctcaccagctggtatcataatccggatatctgcactgaaaattttatataaaagtgccattacagacaaacaggagccgatcgccagtggcagttgccagaagtctccaaaacgaacggcaagaaaaacggacaaaatccagaagcataatcctgcaatgattacccgtacggctctgggtgcataacatttattaggagtcagcaccagattacctccttgccaatacatcatctgttctttcatcgtatgcccagtattttttcggtctccaacaagagcacttccgtgttttttgaattcataaggctttgccccagcaaaacagatttttgcttatttccgtccataaccacggcaaaagctgatgaaatgagtatgagcacataaatacggttattaatgctaaagctttgaatatctgaaaaggtaatttgctgtgtagctgataaaagacctgctttttgaacaacagtctgtctgttcatatcaataactacgctgctgaacatccgggagagaaaaccacagccaaacaacaacacaatgcctgcaaaaatgtaggcttctgcttgaggtcctcttttaatgaaaaaccacaaaccaacagcaaagagtagcaatgccataataatgtattggttgttgagacttttacgttggtaaacattcggacttgtttctttgtaaaatcggtagtctttcatactgtttattattgtttttttttaatttttataacatcaacttttatcatagcgaaattattttcctgacacgcgttatgcaaaattatgatgacgtcaaatcgactacagtcaaatataccccgactacaaagtgactacagtttttctgttttcatttggttttcaatgttttaaagtgtttttgtcaagtcaaaaaaatggacaattccgattaaaccgattacagaatttatacatttgttttatgataaaaaatttatgtttcgttcttctgctgattggcagtatgctgtatgcccaaaatacctatacggacagcctgatcaataaactaaaaacagagaaattatccattgctgaaaaattgaaactttacgaacttcttattgaaatatacagaagtgaacagttgtacgataaagcctcgggctacaacaaagaatttctgcaatttgcacggtctgttaatgatcatttggctataacaaaggcttatacttatcagggtattatcctttgtaaccttgaagagtatgataaggtgcgtccatatatagattctgccacagccagttcatccaaaaacaataataaaatagcacaggcttacgctgattttttgccggcttattatatgttctccctttatgaatataaaaaatcaactacctatctccttaaaagtatatcattattggaaaaaacggaaggtgacccaatgcttgaatttaaactctattacctgttatacggcacctatactacctggagcgatctgaaaaacagctttaaatacgctcgtaaatgcatagaacaagcagaaaagtcgggaaataaaaaccagttaagtaatgcttacactgcattggcaaccgcttatacttatcaatatgaaaaaagcaacaaaaaggaagatctgaaagccattatggataattctgaaaaagcagccatgctgtataaagagtttcctgggcaggtatcaggtaatacctatgctattgcccggaataatattgccagttatattctgaaatattcctctgatttaacgccggatttgcggaaacaaatacaatataatataagtgaagcacttaatgcctcccaatacattgcaaaaccacaatctataaaggctgggagtcttgggatgctggctaatttggcaacaagagataatgatctggacaaagcggaaaaatatttactgcaggcagaagcgggattactaacccaatcaccggtttactattacataatgatacaaatcgtaagtgatttggcagaattatatgaaaagaaagggaacctggtaaaagctattgaatatcagaaaaaagtaacaaaatatactattgaccaattcaaccaggacgaagcatccaatgtaaaaagactggatgcacaataccaggccgagaaaagtgagcaggaagtaaaatcattacaaaaacaaaagctgctgtatattatcctcgggattataggagctatcgggtcattctttatgttccgttcttatcacttcaagctaaggttgtccatagaaaaagagaaaaagttgaatacggaaaaacatgaagccgaaatgcagatacagcttgaacaagaagcacaggcaaggctgaaagcagaacaggaactcctgattctgaagcagcagaagctgaatgatgaagtgcttgccaatcagttgcatttacagcataaagacaatgttctgttgcagttaaaggaaaaactggccacagaagaaccgatcaatatacagcagatattacgggaagaaacgcgtgccaataacgaatttgaaaaaactaaataccagatacaggagatacaccctgattttttcagaagtctgaacgaaaaagccacccagaaactgactttactggatcagaaatactgtgcttatttatacctgggaatggacacaaaacaaattgccagccttctcaacgtagaacccaaaagtgtacggatgaccaaatacagattaaagcagaaatttgctctaaaccccgaaactgaccttgtaaactatctaaaggggataggttaacaggatcatcattaagtctaggctattatagataaagattattttaaatgattaaaagtgataaggctgtccttttgggcagccttattatggttatgatgataattttcttaaactaaacataggattccagatctgaaaacgtagaaatagaaggttgataatcacttatgctcaaatttccgaagccaaattcacagaaaataaaggacaggttatttacttttgcagcattataatctgtttgggtatcaccgatgtaaacggagttttcaatgcttaattgattcctttccataatcagttgaatgttctctgacttaggttttttagtccggccgtgagattcaatatctgtaaaaagatcattgaattgataatagtctaaaaaagattcaatatatccgtcctggcagttgctgacaataaaaagtctgtgggtttttgctaaattctttaatgtttcttcaactccgttataaaggattccgccttcaacatgcaacactttattttcactgttcacgatttcggaaagaacttcatttacctgttgatccgaaatgccgggaacaatcgctcttaaaatgtcatcagctaaaagtcccatgtactgatccatgtcttcaggtttcagatccttttggagtaactgatattgatttaaaacattattccagattttgataatcgtaagtcttgaatcccaaagcgttccgtctaaatcgaaaattaaatttttatagctcaaaatggattgttattttgtttgtaatattgaacagatttcagatccttataaaatcatgctcagctgaattctttttcttgcttcatctacttctgtcactttcacgcggacatgctggtgaagttttaccacttcattcacgtcagatacaaacccatctttaagctgagaaatatgaacaagaccgctttccttaattcccatgtctacaaaacatccgaaagccgtaatattattgacaattccgggaagaatcattccgggttttaaatctctgatgctttttacattaggatcgaactcgaatactttggctgcttttctgggatctaatccgggtttttccagctctttcaaaatatccttaattcccaaaatcccgatttcttctgtagtataattttcaggttttactaaagctatcttctccttgctggcaatcagttcatgggttttaatgcccaaatctttagccattttctctacaattccataagcttcaggatgaacagccgaattatccagaggattttttgcatgagcaattcttacgaaagcggctgcctgctgaaaagctttttctcccagtctcggaactttttttaactgtttccggtcttcaaaagcaccgttttccgtgcggtaattcactatgttttctgccattttctccccaattccggaaacgtaactcaataatgatttacttgccgtatttaagttgatccctacggagttaacacatcgcatcaccgttgaatccagttcgtttttcaattgggtctgatctacatcatgctgatactggcccacaccgatagacttggcatcaattttaaccagttctgccagcggatcagaaagtcttcttccaatggaaacggcacctcgtacggtcacatcataagacgggaattcatccctggcaattttactggcagaatatacggaagctccggcttcagacaccacaaaaacctgcaatggcttatcaaaagcgatttttttgatgaaaaattcagtttcccggctggcggttccgtttccgatggatatggcttcaatattataggcattcaccatagaacggatttttttcatggccattccgctttcattttgcggggcgtgagggtagagggtctcattatggagaagatctcctttttcatccagacataccactttgcatccgcttttgtatcccgggtcaatggcaaggattcttttttcccctaaaggaggtgccagaagcagctgacttaggttttcggagaatatttcaatggcttttttgtcggctttttctttagcttcctgcaaggtttcgttggaaatagcaggttctaaaagccgtttgtagctgtctttaatggcgatggcaatctgttcagaactttcattgttagatttaatgatggctttttctataaagtcaatggcttcttctttatcaatgccaatattcacttttacaaaaccttcagattcagctctgagcatggccaaaagtctgtgagaaggtgttctgccgaggctttcttcccattcaaaatactgcgaaaacttctgggcgtcttcttcatcctttttagctttaacgactttggaagtaatcatggctttacgctggaaaagacggcgaagatttttgcggacgtacatattttcattgatccattctgccataatatctctggctccctgaagtgcatcttcttcggtaggaacctcattgttcagatatttagaaaccagaaactgtaaattattgtttttctgactcatgataatcttggccaaaggttccagacctttttctttagcagcatctgcttttgtctttctgcgctttttaaagggcagataaagatcttccagttccaggatatcaaaactttcctcaattctttgtttaagctcaggagtcagcgcattttgttcttcaatggattttaaaatactttcctttcgtttcacaagttcctcaaaatgtttactgatcttggaaatttcttcaatctgaacttcatccaggtttcctgttttatcctttctgtagcgggaaataaatggaacagtgcagtcttctgctaataattgaagggtattgttaatgctcttctccgagatattgagctgttgctgtatataagttacaatcgtcattgttctgttttcgaaaagctaaaataaggttttggaatggaaaaaggcgagttgccccgccttaaatgttttcacaacggaataatccttattgtgaattgctttcaaaattataaacaaatataaatgaaaaaatctttttatcatgtatgggaaaccataatctgaatattttttttatttctatttttatgtagtttcaaaatataaaatgatgattaagaatatacttgggttagatttaggaaccaattcaattggctgggctttaattaaacaaaatgctgaagagaggcagggaagtattctgggaatgggaacccgagtattgcctatgtcacaggatgttttaggagattttggaaagggaaattctgtttcgcaaacagctgccagaactggttatagaggaataagaaggctgcgtgaacggtttttactaagaagagaaagactgcaccgggttttgaatattttaggttttctgccgtattattatgctgctcaaatagatttcgataaaagatttgggaaatttaaagcagaaacagaacctaagctgccctataacaatgaaggctttattttcaagaattcttttgaagaaatgctttcggactttaaaatatctcaacctgagcttttatcaggaaacaaaaaagttccttatgactggactatttattatttaagaaaaaaagcagtctctcaaaaaatagagaaagaagagctggcatggattcttttgaattttaatcagaaaagaggctactatcagctcagaggagaagattttgacgaagaaaaagataaaacatttgtgacgttaaatgttgataaagtgattgattccggggaaaaagtgaaaggaaatatcctttttgatatatattttaccaacggatggaaatatgaaaaacaaacaacaaagccggaagattggctcgggcgttcgaaagaatttattatcaccgaatccctattaaaaaatggtgaagtaaggcggacttttaaagccgttgattctgaaaaggactggattgccattaaggcgaaaacagaacaggagattgaaacagcccacaaaacggtaggatcttatatttatgatgccattcttcagaatcctaaacaaaaaataaagggaaaacttgtccgaacaattgaacgaaagttttataaagaagagctgagaaagattcttgaaaaacagaaagactttcatcttgaactgcaaaatgaagacttatacagtgattgtgtgagagaattatacagaaataatgacacccaccagttaagtctggctaaaaagagttttatacatcttttcttagaggatatcattttttatcaaagacctttaaaaagtcagaaatcttctgtttctaactgtactttggaatgtagaaaatacagagataaaaacggagcggaaggaattcaattcctgaaagttatccctaaatcaaatccatattatcaggaatttcgcatctggcaatggatgtctaatctgaaaatatacagaagagatgatgatgtgaatataacttcggagtgtttaaaaacagcagaagactatgaagatctttttgtatttctaaatatcagaaaagaagttgaccagaaagcatgtttaagacattttaaattaagtgaaaaaacacatcgctggaactatgtggaagataaaaaatatccctgcaatgagaccggaacaatgatttcggaaagacttaagaaagtaggggatagcccggataatatctttacaagagaaatggagcaacaaatctggcatataatctattctgtgaatgataaaacagaatatgaaaaagccttgaaatcctttgcaaagaaaaatgagctcgataatgattcgttctttgaagctttcagaaaatttcctccgtttgatagtgaatatggctccttttctgagaaagccattaagaaactattaccattgatgagaatagggaagcactggaactgggaagctgttgatgaaaaaataaaaaacaggattcagaaaataattatcggggaatatgatgaaaatattaaagataatataagagaaaagactctttctcttcagaaagaaagtgattttcagggcttgcctttatggttagctcaatatgtagtatatggaaggcattctgaagcttcagtcgcaggaaaatggaattctgtggatgatattgaagagtatttgaaagaattcaaacagcattctcttcgtaatccgattgtagaacaggtgatcatggagactgtccgggtcgtgaaagatatctggataaaatatgggaatggagcagcagatttttttgatgaaattcatattgaacttggcagggaaatgaaacttcctgcaaaggagcgaaataaaatgactcaaaaaatatcagaaaacgaaaataccaaccttcgtattaaagctttactggcagaaatgatgaatgatagtgaagtgcagaatgtaaggccttattcccccatgcagcaggagattctgaagatatatgaagatggagccctgaattctgagatttctgtagatgatgatattcttaagatcagtaaaacagctcagccttctccatccgatctgaaaaaatataaactttggctggaacaaaaataccgttcaccttatacaggagatattattcctcttaataaactttttacaactgaatatgaaattgaacatattattcctcaaagccgatattttgatgacagttttagcaataaggtgatttgtgaatctttagttaacaggctaaaagataattacattggtcttggatttattaaacagtttcatggctataaaatctctgataaaactaaagtctttgaagtagaagaatatgaagactttgtgaagaaaaattatgctaataatcggtctaaaagatcaaaactcctgctggaagaaatcccggaagaaatgattgaacgtcagcttaatgatacccggtatatcagtaaatatatttcaggtatcctttctaatattgtaaggaaaaaggaaaatgatgagggcgtaaattctaaggatatcattcctgggaatggaaaaattacatcacaacttaaacaggactggggattgaatgatgtctggaatgatttaattcttcctcgttttgaacgaatgaacgagcttacaaagtctagctattttacggtctggaatgaaaagtatcaaaagtttttgccaacagtacccgttgaattttcaaaggggttttctaaaaagagaatcgatcatcgtcatcatgcattagatgctttggtaattgcctgtgcaacgaaagatcatgttaatctacttaataataagtctgcgaaatcagaaatgaaacggtatgatttaaaaagaaagctgatgaagtttgaaaagaaaacctatcagcattcgcaaacaggagaaagaattgtaaaagatgttcctgtagaatttttgaaaccgtggaatgattttactgttgaagctaaagagaatcttgagaaaattattgtaagttttaaacagaatcttcgtgtaattaataaagccacaaatcattatgaaaaatggattgaaaaagataatgttaaagtaaaaggcttagtggaacagcaaggtttaaattgggcaatcagaaaaccattgcataaagatacggtttccggaaaagtagatttaccgggaatcaaagttcctaaaggaaaaatactaactgctacgaggaaaagtattgatacttcttttgatttaaaaacaataaattctattacagatacaggagttcagaaaattttaaaaaattatcttgaatacaaaggcaatagttctgaagaagccttttcgtctgaaggaattgaagatatgaataataatatcgagaaatttaatgaagggaaactgcatcagcctattactaaagtgaggatttttgaattaggcagcaaatttcctttaggccaaatcggaaataaaaaacataaatatgtagaaacagcaaaaggcactaatctcttttttgccatatatgaagatgacaaaggtaaaaggacatacgaaacgattcctttaaatgaggtgattgaaagacagaaacagggattggcgcccgttacattaaaaagtaaaaacgatttttatttatgtcctaatgatttggtatatgttgccgcggaaggtgagtctgtgaataagattgattttaagtatgcttctcaggagtttatacataatatttataaagtggtaagcttttctggcagccaaattttctttgtaaaacaaaatattgctgtttccattgtaaataaagctgaattttctactttaaacaagatggaaagagctgttgatggcaaaatgattaaagattgctgtataaagttaaaaattgaccgtataggaaatataactaaatcgtaatcatgatcacccgctctatctacattggcagtcccgcttatcttaagctcaaagacgaacagatgaaaatcctatgtcctgaaactaaagtagagaaaggcagtgttcccgttgaagatctgggcctgctcatgctggaccatttccagatcaccctttcacatcagttgatccaaaaaatgatggggaataatgtagtggttatcagttgtgatgcacagcatttaccacatggaataatgcttcctctttatgggcatacggagcattcggatagagttaaagatcagcttgaagcgagtgaacctttgaaaaagcaactttggaaacagactgtagaatgtaaaattgaaaaccagaaaaatcttctgatacggttaggaaactattttgagcctatgatagagtatcagaaaaatgtaaagagtggtgatatcaccaatatggaaggtatagcagctcagcattactggaaatatctcataagccttgactttttgagaggacgttttggagattcacccaaccagttctttaattttgggtattcagttctgagaagtatggtggcaagatcaatcgtagaaaccggtttactgcctgtgttggggatttttcataaaaataaatataatccctattgtttggctgatgacctgatggaaccataccgtccttttgttgatctattggtgatggattggctcaagaacaatccccaaacggaagagctgacgaaggaatataaagctcatattttacagattgcaactaaggatttgaggatagatgataaaacaagacctttgttggtagcggtaaaaacaacagctacatcattatataaatgttatacaggggaaaaaagactgatatcttatcctgaactgatatgaattccgaaaggtttaacgcgtacagaattatgtgggttttagtattatatgatctcccaacagaaacaaaagccaatatgagagatgctaatcggtttcgtaagggtttgattgatgatggatttactcttttccagttttcaatgtacgttcgccattgcccaagccgggaaaatgcggaagtgcatatcaaaagggttaaatttatgcttccaaaagcaggtaaggttgcgattatgtgtattaccgataaacagtttggggatatcgaaatcttctttgccagaaataaagaagagccacctccaacctttcagcaacttgaattattctaattttaaaattctaattaagcaataaacccattgaatttcaatgggttaaattttgaggctgtgactaatcactaagatagtaaattttgaaagcaattcacaactgctcatatgctgttatctgtctctttaaaactgtgactaatcactaagataataaattcatccttaaagaaaatgttctgactgaaatttaattgacaatagcgattgccattccgtcgtattctttttcccctacggtttgcataatggtagcagtcacttttgggttgttggcaagggtctgattgaaacgttgtacgcctttcactctttcatcagtggtattttcatcaagaactttgccttcccggattacattgtcacaaataataatggttcccggatgcgaaagctgtagcgctaattcaaaatactcggtataaggtggtttatcagcatcaataaaaataaaatcgaaagtttcttcccctttggaaataagttcgtttaatacatctattgccttgccgccccgcagatctattttatctgaaagtcctgctttttcaatattctgacgggcaacacggaggtgatgcggatcaaattctacggtgattactttgccgtccgcgggaattgctctggccatccaaatcgtactgtaagctcccaaagtacccagttccaggacacgtttagatttactcgtgagcagcattaactgcagaaacttaccctgagtaggggttacactgatttgtggcatagaagcatcatccagagactgaataacctcttgaagaataggatcctctggtgctagcaaattaccgatatacctgtctactttttcaaatagctgctgattcatatttttaaattggtttaatgattaacaattttctattgacattaacaaccatcatcagcaagtcagaattgattcgaaattataattattttctaagctgctgtgaaagtttaattcgcttaaagatagtgaatttgaaatcggttattttacctctattattaattattgaacaataaaacgagatatttttcatttcttgatgtatgttaagtttatcattaataaggttttctaattttgaaattcttaaatttaaagttttaaacaattttctaaacaaataaataatatgaaaaaacttagtgtaattgcgttagtaggaataggattgcttgcggcatcatgtagtaaagagaaatcggcagagactgctgctacagctacggaacagaaagtagcagaaagcaaaggagaagttttagcagttgatgtagctacttctgtagtgaactggaaagctttccataaaggaggaatggctcctcgttggggaacacttaacgtaaagtcaggagatctgagcattgaaggaggtcagctggctgccggaaacttcgtaattgatatgaattcaattaaagtagatccagcttcagtaacagaaaaagataaaaaacctggagatcttgaagcgcacttaaaaaatcctgatttctttgatacaacaaagaacccaacttcagatttcaaaattacaagtgttaccgatttgaaagaagcacctaaagatgcagtagccggagctaataaaactgtgagcggaaaccttacattatcaggaaaaacaatgaacgtaacgttccctgctaaagtggatgtaacagataattcagcggctgttcaggctaaattcacagtaaacagagcagattggggacttaagtttgggacttcagaagcagatcctgcagaatggatgatcagcaaagacattgaaattgctgttgatgtaaaagctaaaaaataacttgttagatacaatagtgagagctgctttcgtaagaaggcagctttttttattcggtaaactcaggttatatgagtaaattttatgtttgagaaaaactgaaggtggcttcgagagcctcagccaccttttggtgggtagttgtgatgtttttttaattaataaaattgagaagtaaaaagataacttttaaatcaaaaggcgaatagtaggtggctgaggctctcgaagccaccgcatcaaaaaacatcttatatttataaaaacacaatatgaaaaacgaaattaaaggctggatgtatattttgctgtgctctgatggcagttattatacaggaagcacaaatgatctcgaaagaagaattgagcagcatcaagcaggaaatggttcgaatcatacgaagaaacgattacccgtaaaacttatttattttgaagaatatgatagaatagatctggctttctacagagaaaagcagattcaggggtggagccgaaagaaaaaggaagctttgattaatggtgagccagaattactgcccgaactggcgattgcatgtagagatttgagggattagtaatggtggatttgagaatggagagctgcaggtggctgaggtttccgaagctacatttttttgaataattttgatgtgtttttgattaatgagtagaagtacttattaaattgaacaagaaatagaaggtggcttcgagagcctcagccaccttttgtgggtagttgtgatattttttaactaataaaattagaagtaaaaagacatctttttaaatcaaaaggcaaatacaaggtggctgaggctctcgaagccacctccaaattccttacttttgcacagatgatatacattttgcttataatcaatctcttcactttcgttgtttttgggctggataaaaggttggcggttaaacacaaaaggagagttccggaaatcacgcttttaggtcttactcttacaggaggaagtgtgggagccgctttagggatgctgatattcagacataaagtttcaaaagtatcttttttattaaaatgggtggcgattattttaattcaggcggcaggtatttatttttttgaaaaatataggtgatattaatcattaaagtctaatgcactattcttaaacttatcattaattgtaattctaaaatattcaattttaaagctttaacagggaaaagtagtgaaagtgctcattatgaatttgttaattaattgatattcttgcttattattcattgaaaatcactatttttgcacccgtaaaaatcattcatgcaaaacattagaaatattgcgattatcgcacacgttgaccacggaaagaccactttggttgacaagatcattcatgctacaaacattttcagagaaaatcaggaaagtggagaattaataatggataataacgatcttgaaagagaaagagggattaccattctatctaaaaatatttctgttacctataaagacactaaaattaatgtaattgacactcctggtcacgccgatttcggtggagaggtagaaagagttctgaaaatggcagacggggtaatccttttagttgatgcctttgaaggaccaatgcctcagacaagattcgtacttcagaaagcattggaattaggccttagacctttggtggtaatcaacaaagtagataagccaaactgccgtccggacgaagttcacgatcaggtattcgatttattcttcaaccttgaagctactgaagagcagttggatttcccaactttctacggatcttcaaaacaaggttggttcaatacttcactagaacaaactgaagatatcctgccgttattggatggaattttacagtatgttcctgcaccaaaagtaactgaaggaaaccttcagatgcagattacttctttggatttctcttctttcttaggaagaattgctatcgggaaagtaacaagaggggagatcaaggaatctcagtggatcggtcttgcacaggcagacggaaaagtagtgaaaggaaaagtaaaagaactttacgttttcgaaggattaggaaagaaaaaagtaactgaagtacaggcaggagatatctgtgctgtggtaggtttcgatgctttccagatcggagattctttcgtagatcttgaaaatcctgaaccattggaaagaactgctattgatgagcctacattgaacatgacgttctctatcaacaattcacctttcttcggtaaagacggtaaatatgtaacttctaaccacctgaaagaaagattaacaaaagaattagagaaaaaccttgcattaagggttcagcagacagatgatgccaatacattccttgtttttggtagaggtattcttcacttgtcagttttaattgaaaccatgagaagagaagggtatgaaatgactatcggtcagccgcaggttatctttagagaaattgatggagaaagatgtgagccttacgaatctttggttgttgacgttcctgaagaatatgcttcaagagttatcgacctggcaactcagagaaaaggtgaccttcacattatggaaactaaaggtgaaatgcagcacatggaattcgaaattccttcaagaggtttgatcggattgcgttctcaaatgcttacggctactgctggtgaagctattatggcgcaccgtttcacagaatacaagcctttcaaaggtgttattcctggaagaaacaatggagtactgatcagcaaaactcaaggtcctgctacagaatattctattgctaaactacaggatagaggtaagttcttcgtagatccgggtgaggaaatctatgcaggtatgatcatcggtgaacaaaacaaacctggagacctggtagtaaacatcgtagaagcaaaacagttgaataacatgagagcttcaggaaaagataaagataccggtgttgctccgaaaatcttattctcactggaagaatgtatggaatatattcagggtgatgaagcgattgaagtaactccgaacttcatcagaatgagaaagaaagtcctttctgaagaagaaagaaaaagaatggaaagatcagcgaaagcttaattaatttctatataatatacaaacctccggattttttcggaggtttttgcttttataatgggcttcatacttaaaattgttactgtatatttttatgaaatattgtctttttaatttttaaaattaaatcattattgcgtttttaatttattttaatattgaattaaatctatttgtttaaactaattgattttcatctgtttaaatgatattaattgtatgtttgttcctacgcatcgcgtaattaaaaacacaaataatgaaaaaaaagaccttacaattagtttgttctctatccttgttgtgccctgtattaggggtagcacagaatactacagacaagaaaaatgattctttatcattaactgttaatcccgtatcatcaaaagaagtaaaagatctttccgtaaaggttagtttttatggctttctgagaaactatatattttacgataccagacagaccattggtgccggtgaaaatctggttccgctgtatccaaaagatagacagttggatgtaaaaggaaacgacattaatgatgctcctaaatttcatatgctttccgtattatcaagagccggaattaatgtaaaaggccccaaagtattaggagcagaaacggccgggattttagaagctgaattcttcggatctacagaagcaggtatcaacgaactaagacttcgccatgcctatgtaacgtttgattgggaaaaaacacagctgggaatagggcagtactggaatcctattgttattctggattgccttccgaacgttgtcaattacggatcaggttctcctacttttgctttaaaccgtaatccgcaggtaagacttacccaaaaactggacgaacattttaaaattattgctgccgttacttcacaacgcgatttcacccccaatacttctccgtacagagacagcggaatgccttccactcacttacagcttcagtacaaatcgcccaatttcatagccggaatagccgggcagtatgaggtactcaggcctcagttatcctcggggaatcctccggtagttaatcacaataaagtaaaaagcattactgcagtattgtatgcaaaagtgattaccaagcccttaacaatcagtgcttcggcaataatggctcagaatgcagcaacatttgttatgctgggtggttttatggggtattctgctcccggggaagctgatattttcagaaccatgaatacaagaagcgcctggatagatttccaacaggttacagacaaaaaaatagcactgggtctttttgcaggagcagtaaaaaatctgggagcaaatgatccggtacaaggcagaactcccacggcatatggtgtcacggcagcttggggtgctgtttctgggactcccggtgcgcgtagcgtagatcatctgtggaaggtcgtaccgcgggtagactggatcctgaacaagaacatcaagtttagatttgaggtggaaaatacctttgctacctggggagatgctcaaattagtggtagaggggttggaaatgagtttaatgccaaaaacaaccgtttccaccttgctacattttttatgttttaaacagatacacaaataatttaaacacaataatgatgaatacagaaaacaaaaccactaaaaatagcatattaacagtaattattgcatcatctgcaggaacacttatagaatgggatgacatgtttcttgcaataattcttgcaggaaccctttctttaaatcttttcccggccgatggatcacattttctcgaaacattaggagtagtggcctcatcctttatgtttcgtccgataggttcacttatttttggaagtatcggagataggattgggcggaaatattcttttattctgtctttggttttaatgggagtatctacattctttattggttgtattcctaatttttccagtataggatgggcggctcctgttttattattaatttgcaggttgatgcaggggctggccatcagtggtgaatatgccggtgcagtgatctatgtggcagagcatgccccggtaaacagaagaggattttataccggatttattcaggctaccgtacctataggtcttttaatctgtcttagtgtgatattcattacaaggagtgctatgtctgaagctgattttaccgattacggatggcgaattccttttcttttaagctccgttcttgtcattttaagctattctgtccgaagaaaactgcatgagagtcctgtttttgaagctctgaaacaggccggaaaaacaagcagatctccaattaaagaggcattcagtacaaaaggaaatattaagacgatgctgaaagcaatttttggaggcaatgcagcccaaagttcggtaatgcaaaccagtttgtttgttaccctttttttatgcagcgtgccgtaaagcttgaagatactacggtgctcttaattacgggtactgttactcttttcagttcttatttttatcagtattttggcgcattaagtgatcgtgtgggccgtaagaaagtccttcttggagggcttatttcaagccttattatgattccggtttctttttatcttttcatgaaaattggaaacccggacgggcttacagaagtacattcaatcagtaatatggccattttaaaaattatgggagtcagctttttactttcggtggcgggagccgccacctatggccctttaggagcttttatgctggaaatttttcctacaaaaataaggtatacaagcatgggatttgctcagaatatgggaaacggatttattggtggtgcaactacttttgttactgaactaattaaatcatcatttgttgtaagtgctgtactttcaccatatactggtttaatttatcctttacttttagtgattcttgctataattatcaatatcatatacattccggaaacttataaaaatgatcttacagaagaggaaagtattgaaaaatagattttaaacctttataatcagacagataagcttcaaatttattggcaataactaaggcagtatgaataaaaatatgcatactgcttttgttttaactttttttactttccaaattcggataaatggtctttatattgttagttttgtatttttaaaatcgaaagcaaatccttttcagaccacaacgtatgaaaatcaataccataaaattaatttatcttctgggtgcatcagcctttgtaagtacttcatgtgcagcaaacaaaatacctgctacggaagtgcctgcaaaaaatacagcaaaacccaacaccaactcagcaaaaccaaaagaccctgtaaagcctatagcagcaattcctccggccgaagaaaatttcagaaccactcttcctgaagttaaaagagaatttcgcggagcctggatcgcaagtgtagccaatatcaactggccttcaagaaataatttaaccgtcgatcagcagaaagcagaagccataagcatgctggatatgcttaaagacaataattttaatgccgccatctttcagatcagaccttctgcagatgcactttatacaagcaacatagaaccctggtcgtacttcctgaccggacagacgggaattgctccttatcctaattatgatcctcttcagttctggattgaagaagcccataaaagaggcctggagctgcacgtatggctgaatccttaccgtgcccatcataccaacggaggttctgtaaacagcctttccatggcgaataagctttccgatatcgtgattaaattaaaaaacggaatgtattggtttgatcctgccaatcccaaaac

SEQ ID NO: 1243 - DNA, 24233 bp, synthetic construct
  source 1..24233: mol_type = other DNA
  misc_feature 1..24233: note = Synthetic
tatgcaaaaataagctaagaaatatccagttgaattttaaaagacaaagtaaaaattacaaaaatcaaagatttaaaatgtgtttttaaattttaacggcgaaacctcagcatgttttttaaagaaattattgaaatgggagggttgttcaaatccaagtgtatatccgatctcagcgatatcccagttcgtatattttaatagatttttagactcttcaaacaccctttctttaatgatctgggtagtcgtaaggtgggtgaccgattttactgacgaattcaaatgattgacgtgcacattcagatgctccgcaaagtcagaagccgttttcagagccagcggataagccggagagtccaagggaaactgtttgttaagaagctcatcaaacaagcggtaaaggcggatgttggccggaagctcattagggttgatatcatccacgcgattctccaaagccagatgcatcacagaggccagatgactttttatactgctgcatcggaaaggataggctgaattattcagtttatacatctgttcaaagtaaagcgtagcaagctgggtttgttcatccgttaaaaaaacaatgggcttgctccattctttgaataaagaggtctttttaaataaattgaattcagtatttccattaaaaaactcctgattgaacagacagaaatacccttcctgaagatctccgtcacattcccatgaatagggaatatgaggggaaggaaaaaagagggcaggacggtcaatatacaggtcatgggccccatactgaaaagtgccatttcccaaaataaagcttactttataataatcacggcggttgtaagggcttttaaaactgcagtatttccgcatagacacattgaaatgcgactttcctgtttcaaaatcatccgaatcaaacatcttcatctgattctttctgagacgtttgtaataatcttcaatggtttccagctgatcactcatgatatagaaattataaaaatcaaagatacggaaactgctgttaatccaaatctattttctgttctgtaatgataatctgcaaaatagtttttctcaatttcctttgaaccgcttttatcattactttttgcaatttacatctatcaatttacattatttaaatttcaaaaaagtctactcaatctacgtgattttcgagggctttaaaagtcacaaaacttttcaaactaaagtgttataaagtgtttcaaaatcttcttaatggttgaaaaattacttagataccaatctttgctatccgggaaatctgtggtaaactaaaaatatcaatcacaaaagtatttagcatttttttaaactttcgtggtaacaaataataaggccagaatgttttaaaaggatcgaaaacctgcacttttttcttggaaatctagcttttactgatttccaattttaatatatgcgacggaagttggaaaggtcccgctgtagcatcaatagcgacagaaaaccctgactcttttaaaaactctaaaagtggatcatgtgccagtatattgatccagacgatatctgtgaagctggctgcggatctgctttttttccaaagtgatgttctggtttccggtgaatcaaattccgggagtatcacaaagctcatctctgtggctcttttcccctccggcaacgcagggtgagtcaatccgcttttaagagtgctgtagcctacaggctgatcatctgcataagtaataataagctgattggaaaggtcgttcagatcattgatcatctttctgggatcaatatcatcttcaatgtattttttgatatccttttcaggaataagctctttgtataatgcgtaaacagaagcatcgataatggttataagatcagaaattccctcttcagaacctactgtaaattttgaaattatattcatgaatctttttttattcaaaattagaagattatagcattcaaaaaggatacagttattattaatttaatcggtacagtttggttattttgtaaatttgttcagtacagattagcaaaattaaggatggggtcatacaaatatgaaattttcacttcagttattgaagaacaaattaaaaatagaattctgaggaaaggacagcgattgccttccgtgcgggagattaaaaatgcataccatttgagtacaagttctgttcaaagtggttttgatcatcttgtgatgaaaggactggtggaaagccatccacgctcaggatattttgtagccaatactttagatattcatagctctccatccaaagcaaatctgcctccagtggttagggatgctgtattcgcaaaaaacatcatgctaacctcagccagaaacaagccttcggaagtgagttcattcaatgcaacagcacccggagatcttttaattcctcaaaaactgattctcagaacgatgcaggaagtcatccgcgagaaaggagccgtattgttaaggtattatccttccaatggcctgccggagctaagggagcaaatttcccaacaaatggcagttcatggatgtttattcaacccggatgaacttattattacagatggagcgctgcaggcattaaccatagctttgagcgctgtaacccaacccggagatattgtagctgttgaaagtccatgtgtcttttcaattcttgaagctattgctaacctcgggctgaaaactatcgaaattcctgttcattatgaaaacggtttcgatatggattattttaaaaacgtatgtctgtcgaatgatatccgtgcagtggtgctaacgcctaatttcaacaatcccacaggtaccgttatgagtgatgatgctaaaaaagaggtgttggagattgcaacaaggtttcaggttccgattattgaaaatgatatgtatggggacctttattttggtgataaaagaccacagtgtattaaaagctttgatcgttcagggctggtaatgacctattcttccttttcaaaaaccctggcgcctggcatccgtttaggctggctgaataccggacgtttttattcccgttcggaaaaggcaaggtttgttttgggaagatccgtttctccaatttatcaggaactcatgctgaaacttcttcagggaaacagctacgagagacaccttcgttcattccgtaaaaaactcaataagcaggctgttgaactgctgggtgcattacgtcggcactttcccgaagattcctatttccacaaccctcagggagggtacagcatttggggtaaactgccggaaggaattgatatgcaggtattctttgattactgtgatcaaaacaggattctatttactcctggcgatacattttcgctgacggatgagtacaggcatcattttcggattatatttgcagaccggattactgcggaaagcctggttttattagaaaatgcggggacacaagcaaaagaactgctttcttaaatcttctgtctttctagtgtgctgttgtagtaaagagaatatcacctttagagaattttggaataagaataaatgcagaagagataaaggagaaatgatgttgtaataatggcttaaaagccccaataagcctaataaactcccaaaatttttaacataaacgtaaaaaataatagttcggaggacgaaaagatgaaaaaaatcacattttaacctaaacttttttatccggagttaggctggaattaccataaaacctatatttgcaccctaaattttaaaaataatgaaagaactaattgaaaaaatcaacgctgaattcgaagcgtttgcaagtgaggctaaccaacaagcagagaaaggaaacaaagctgcaggtacaagagctcgtaaatctgctttagaacttagcaaattgttcaaagaattcagaaaagtttctgtagacgaagctaaaaaataatttgttcccgagccggctcactgagccggcttttttttatgcccgaatcttacgtaatcattctttaggattttcctttttgaatatctttgttaccgtatgtatttaaagaggggggtgattttttcacacatcactgcattatttcattgtcaaatcagcacacggatccttttaccattccgttttcttctttattcccacaaattctattatctttaagcattcaatatgtgttatgaagataaataaattttttgctgtgcccgcagttgtgctggctgcccaattctcatgggctcaggtgaaggtagatccgaaagaaaagcttgatcctattgtaaaaagctttgtagatgaaatcaacaacagttctcagctggaaaccatggcctatgagcttctggacggtataggtccccgtcttgtgggaactccggaaatgctggctgcgaatgaatggtctgccgctaaactccgttcatggggaatagaatccaaccttcagcagtttggaacatggaaaggatggcagcgtggcattacgcatgtagatatgacgtatccacgagtgaaatcattagctgcaacacagcttgcatggagtccggcaacgaaaaaagccgtagaagctgaggtggtagcccttccaaaagtttcttccaaagctgaatttgatgcatggctaccttcggcgaaaggaaaaatagtacttatcgcgcaataccagaagatcggacgttctgatgagcagatcaaagaatttgcaactccggaactgtacgaaaaactaaaagcagaaaaagaacaggccggaaaagacttccgtgactatgtgaaaaatataggctacgataataatacacttccggaagctttagaaaaggcgggagtagcaggaatcgctatttccaactggaccggcatcatgggagcgaacagaattttcggtgctaaaacttcaaagatcccaatgatcgacattgatgtggaagattacggaatgctttacagaatggctgaaaaaggagcgaaacctaaaatcaaagtagaagcacaatctaagattcttcctgatgcgaaaaactttaatacgattggagtcattaaaggaaaagaaaagcctgaagagtatgtaatcctttctgcccatcttgattcttgggatggagcacagggcgcaacagacaacggaacaggcacacttactatgcttgaaaccatgagaatcctgaagaaatattatcccaataataaaagaacgatcgttataggactttggggaagtgaagaacagggactaaacggttcgagaggctttgtagcagataatccacagattatgaaagggacacaagccgtattcaatcaggataatggaaccggacgtgtgatcaatatcagcggccagggattcgtagactcatacagctatatcggaaaatggctgaacggagttccaaaaacagtaagggatcagattaaaacagatttcccgggaatgcctggcggtggcggttctgatcatgcgtcatttgtagccgctggagttccaggattttctctgagctctctcaactgggggtatttcgggtatacatggcacacgacgaaagatacgtatgacaagatcgtttttgatgaggtgaaaaataatgtggttttaacggctgcattggcctatatggcatcagaggatcctgaatttacaagcagagaaaggagattaatgcctcaggacgataaaggtgaaacggtaaagtggccggaagctaaggaaccgaagagggattctaaggagtataaatagaagtgctagactaagactaagactaagactaagactaagactaagactgctgttcaatagtaatcctgtttttgtaataatatctttaagatagaaaaggttgtacagattattgtacggcctttttttgtggataaagtaggtttcttatttcttgccttttattttctttaacgatataggttttgcagatcttgttgttcagattcatactgaaattcatctgagtgccttccttttcccatgtgtggttcactggaggaatgtaatctgtgaaaattggcaagacacaaaaagtttctttttaaagataataacagcccgggactatttgcaaaatcatcaatcacctttattttaaatacactctttcctaaagtagttccccaataccattcgcatatggtccctgtaataatgacacacggaatggaatacagaaagctgatgatcgctattttttcaaacaggaagaagaaaataaggaagaagggtaggatgtcaatgagtttagcaaaaaacctttctctttcgttgcctttataagtggcgtcgtagggaaaatcatattcaaaagaattataaatcctgtacccgaattcatcaaactgacgagttggcctgcggataattcttctgtccttaagttcggatactttcatgggtgtttttatgattttggttatttcataacatcaatggtttccaaataatctaaatactagattaaatatatagtgcaagatctgaaaatttcgaaacaaaaggtttataatcatttgtactcaatgttccgaaaccatatgtacagaaaataaaggataaatgattagacattgcagagttgtaatcagtctgcgtatccccaatgtaaacagagttttcaacgcttaaatcattcctttccatgagcagttgaatgttctctgatttcggttttttagtccggccgtaagactcaaaatcggtaaacaggtcactgaacttattataggctaaaaatgcttcaatatatccgtcctggcagttgctaacgataaaaagcttgtgatttttagcaagacttttcagtgtctcttcaacgccgtcataaagaataccgccgtagatatgcagaacctgattttcactgcggacaatttccgaaaggacttcctgaacctgctgatcggaaattccgggaataatatcttttaaaatatcatctgccagcaaacccatgtactgattcatatcttcaggttttaaatcctttttgatcaattgatatttatttaatacctcattccaggttttaatgatggtagctctggaatcccaaagcgttccgtctaaatcgaaaattaaatttttatagctcaaaatgtattgttatttttttgatttttagtattcaagaagtttaagagcaattataaaatcatgctcagctgaactctctttctggcttcatctacttcagttacttttacgcggacatgctggtgaagtttgaccacttcattcacatcagatacaaatccttctttcagctgtgaaatatgaacaagtccgctttccttgatccccatgtctacaaaacacccgaaagccgtaatattattgacgattccgggaagaatcattcctggttttaaatctctaatgctttttacattaggatcaaattcaaatactttagccgcttttctggggtccaatcctggtttttcgagctcttttaaaatatccttgatgcctaaaattcctatttcttccgtaacataattttcagcctttaccaaagctgttttttctttgctggcaatcagttcattggttttaatgcccaaatccttggccattttttctacaattccataagcttccggatgcacagcagaattatccagaggatttttagcattggaaattctcacaaatgctgccgcctgctggtaggctttttctccaagccttggtactttttttaattgttttctgtcttcaaaagctccgttttccattcggtaattaacgatgttttccgccattttctccccgattcctgaaacataacttaataatgatttactggctgtatttaagttgattcccaccgagttgacacacttcatcaccgttgaatcaagttcgtttttcaactgggtttggtctacatcatgctgatactgtcccacaccaatagatttagcatcaatttttaccaattctgccagtggatccgccagtcttctcccgatagaaactgcaccacgcactgtcacatcataagatggaaactcgtctcgtgcaattttactcgcagaatagaccgatgctcccgcttctgaaaccacaaaaacctgcagaggcttatcaaaagcaattttcttaatgaaaaactctgtttcgcggcttgctgttccgtttcctatagagatcgcttcaatatggtaggcattcaccatcgaacgaatctttttcatagccattccgctttcgttctgcggagcgtgggggtagagggtttcattgtggagcaggtcgcctttttcgtcaatgcagaccactttacatccgcttttgtatcctggatcaatggctaaaattcttttttctcctaaaggtggagcgagaagcagctggctcaggttttcagaaaatatttcaatggcttttttatctgctttttctttagcttcctgtaaagcctcattagaaatagcaggttctaagagccttttgtagctgtcttttatggccagagcgatctgttcagaactttcattattggacttgatgatagctttttctacaaaatcaatggcttcatctttatcaatacctatattcactttcacaaaaccttccgattcagctctgagcatagccaaaagcctgtgagaaggagttctgtttagattttcttcccactcaaaatactgcgaaaatttttgagcgtcttcttcgtcttttttggccttgactgctttagaagtgatcacagccttacgctgaaacattctacggaggttcttgcggacatacatattttcattgatccattcagccatgatgtctctggcaccctgaagtgcctcttcctcagatgaaacgtcactgttcaggtatttggaagccagaaactggagatcgttgcttttttggctcataatgatcctggctaaaggttccagtcctttttctttggcagtatctgctttcgttttcctgcgttttttgaagggtaggtataaatcttccagctccagaatatcaaagctttcttcaattctctgcttcagttccggagtcagggcattttgttcttcaatggattttaagatgctttcttttcgctttacaatttcttcaaactgtttgctgatcttggagatctgttcgatctgaacttcatccagatttccggtcttatcctttctataacgggaaataaacgggatggtgcagtcttctgctaataattgaagggtattgttgatgctcttttcggatatatcgagctgttgctgtataaaggttacggtcgtcattattttgttttcggaaggctaaaatagggctttagaatgaaaaaaacggaatacatattaaacagaaattattggcgcaaaaaaaatcccccgtattataagacgagggggcttaaatgttttcacaacggaataatccttattgtgaattactttcaaaattataaaacaaatataagcgaaaaatttttaatgaaattatgggtatccgtaattcgagtattttttttgtttctatctttatattgtttcaggattataaagaataatgtaaaatagtatgattgaagaaaaaagagactatccatattagatagtctctgaaagtaattcacaactaactctgtacggcctaaattaagaactcttagacatggttagtttacattgatgtagttacatgttgttggcaacacataggttaagtttggaccttaacaaatttgactcgtcagttcaaaatacttactcaataagttacaaatgtataaaaatatatttaaatttgtacagagttaagaaatgaattttaaaattattgatcttgttatttctacttgggatagtaataagttaagtttggaccttaacaaattcaactcgtcagttgtattacttaatcattaatctaatacaaatgtataaaaaatatttatatttagtacagagttataaaatattattaataattttaacttaattaattgataatcaatatgaaaaatatacttggactagacttaggaaccaattcaattggttgggctataattaagcaaaactctgaatcgaggcagggaagtgttctgggaatggggaccagagtattgcctatgtcgcaggatattttaggggattttggtaaagggaattctgtttctcaaacagctgcccggactggttacagaggagtcagaaggctccgagaaagatttttattaagaagagaaaggcttcaccgagttttgaatattttaggttttttacctaaatattatgcttctcagatagattttgataaaagatttggaaagtttagagaagagacagaacctaagcttccatataataatgagggtttcatctttaaaaattcgtttgaggaaatgcttttggattttaaaatatctcaatctgagctcttatcaggaaataaaaaagttccttatgactggacgatttattacctgagaaagaaagctgtctatcaaaaaatagagaaagaagagctggcatggattcttttgaattttaaccagaagaggggatattatcagttaagaggagaagattttgatgaaggaaaagataaaacatttgtaacgttagacgttgaaaaagttattgattctggagaaaaaataaaaggaaatgtactttttgatgtttattttactaatgggtggaaatatgaaaagcaaataacaaagcctcaagattggattggtcgtaccaaagaatttattattacagaatctatattaaaaaatggtgatataaaacggacctttaaagccgttgattctgaaaaagactggattgccattaaggcgaaaactgaacaggaaattgatgcctctcataaaacagtgggatcttacatttatgatgctattcttcaaaaccctaaacaaaagataaacggaaagcttgtcagaaccattgaacgtaaattttataaagaagaactgaaacaaattcttgaaaaacagaaagagtttcatcctgaactggaaattaatgatctgtacaatgattgtgtgagggagttatacaggaataatgaagctcatcagttgaatcttgccaaaaaggattttgtacatctttttttggaagatattatcttttaccaaagacctttgagaagtcagaagtcttctgtttcgaattgtactttagaatttagaaagtataaagatggaaatggagtagagaggattcaatttctaaaagttattccaaaatctaatccttactaccaggagtttcgcatttggcagtggatgtttaatctgagcatttacagaagagatgatgatataaatataacctcagattatttaaaaacaatcgaagattatgagcgtctttttgaatttctgaataatagaaaagaagttgaccaaaaagcattattgaaacattttaagcttaacgataagacgcatcaatggagatatgtagaggataaaagatatccgtgcaatgaaacaagagcaatgataatagcatgtttaggcaaaacacaaagtaatatggctgaatttcttacaaggaaaattgagcaggaaatatggcatatcatctattctgttaatgataaaacagaatatgaaaaagctttaaaatcatttgctaagaaaaatcacctggatgaaaattcgttctttgaagccttcagaaaatttccaccatttagtagtgaatatggctcttattctgaaaaggctattaagagattgcttcctttgatgagaactgggaaatattggagctgggaagatattgatacaaaatcaaaaaacaggattcagaaaattattactggtgaatacgatgaggatattaaagataatataagagaaaagactcgtactcttcagaaagaaagtgattttcagggtttgcctttatggttaactcaatatgtggtgtatggaaggcattctgaagcttcactcactggaaaatggaactctgttgataatattgaagaatatttgagagaattcaaacagcattctcttcgcaaccccattgtagagcaggtgataacagagacactccgtgtggtaaaagatatatggatgaaatatgggaatggggtaaaggactttttcagtgaaattcacatcgaacttggaagggaaatgaaacttccggcaaaagaacgaaataaaatgacacagagaatatcagaaaatgagaataccaaccttcgcattaaggcattgttggcagaaatggcgaatgatagtgaagtaaagaatgtcagaccttattctcctatgcagcaggaggttctgaaaatatatgaagatggagttttgaattctgagatttctgtagatgatgatattcttaagatcagtaaaactgcacagccttcctcatccgatctgaaaaaatataaactttggctggaacagaaatacagatcaccttatacaggagggattattccacttaacaagctttttacaccggagtacgaaattgaacatattattcctcaaagccgttattttgatgacagttttagtaataaggtgatctgtgagtctgcagtcaataaattaaaagacaattacattggtcttggattcattaaacagtttcatggatataaaatttccgataggattaaagtatttgaagtagaagaatacgaagactttgtcaagaaaaactatgctaataacaggactaagagatcaaaacttcttttagaagaaattccggaggagatgattgaacgtcagcttaatgatacacgatatatcagtaaattcgtctcaggtattctttccaatattgtcagaaaagaagtcaatgatgatggaatgaattctaaagatatcattcctggtaatggaagaataacatcagaacttaagcaggactgggggttgaatgatgtttggaacgacttaattttacctcgttttgaaagaatgaatttaattacagagtctaacgattatacagtatggaatgagaaataccagaaatttttaccaacagtcccgattgaattttcaaagggattttcaaaaaagagaatagaccatcgtcatcatgcattagatgctttagtaattgcctgtgcaaccagagatcatattaatctgcttaataatcaggctgcaaaatcagaaatgaaaaggtatgatttgaaaagaaagctgatgaaatttgaaaaaaagatttatcaacatccacaaacaggagaaaggatcgaaagggatattcctaaacagtttttaaaaccgtgggagaatttcacagttgaagctaaagaaaatctcgataaaattattgtaagctttaagcagaatcttagagtgattaataaagctacaaattattatgaaaaatggattgaaaaagataacattaaagtgaaaggtttggttgaacaacaaggcttgaactgggctataagaaaaccattgcataaagatacggttgccggcaaagtggaattaccttggattaaagttcctagaggaaagatcctaactgctacaagaaaaagtcttgacacttcttttgatttgaaaaatatcagttcgattacagatactggaattcagaaaattttaaagaattatcttgaatataaagggagttcagaagatgctttttcacctgaaggaattgaagatatgaataagaatatcgagaaatttaatgatgggaaaccgcatcagcctattgccaaagtacggatttttgaattaggaagtaaatttcctttaggtcaaatcggaaataaaaaacataaatatgtggaaacggcaaagggtactaatctcttttttgcagtatatgaaggtgataaagataaaagaacgtatgaaacgattcttttaaatgaggttattgaaagacagaagcaagggttgtcccctgtagctttaaaaagtaaaaatgatttttatttatgccccaatgatctggtgtatgttgctgcagaagatgagttggtggatagcttagattttcagaccatttccaaagagaatatgaataatgtttataaagtggtaagcttctctggtagtcaaattttcttcgtaagacaaaatgttgctgtttccattgtaaataagactgaattttctactttaaataaaatggaaagagcaattgacgggagaatgatcaaagagtcctgcgtgaagttaaaaattgaccgtttaggaaatataacaaagtcataatcatgataacccgttccatctatattggcaatccagcgtatctaaagctcaaggatgaacagatgtgtattttggagccttcatcccgtgaattgaagggaaaagtacctgtagaggatttaggattactgatgctggatcattttcagatcacgatttcacaccagctgattcaaagaatgatgggaaataatgtggtagtgataagctgtgatgcccatcatcttccccatgggatcatgttgccactgtatggacatacagaacattcagatcgcataaaagaccagcttgatgccagtgagccacttaaaaagcagttatggaagcaaacgatagaatgtaaaatagagaatcagaaagaggttcttttaaaattaggcaattattatgaacctatgcttgaatatcagcgaaatgtaaaaagtggagatattacgaatatggaaggaattgctgcacagcattactggaaatatctcattagcctggattttttaagacaacgttttggagattctcctaaccagttttttaattttggatatgcagtgttaaggagtatagttgcaagagcattggtagaaacgggattgctgcctgtgttggggatttttcataaaaataaatataacccatattgccttgcagatgatataatggagccatatcgcccatttgtagatttcctcgtgatgcaatggctgatgcaaaatccggattccgaggatctcacaaaagagtttaaagctcacctattgagaattgcaacagtggatgtcttgattgatgataagactagaccattattggtggcagtgaaaacaactgcttcctcgctttataaatgttatacgggagaaaaacgtctgatttcttatcccgaattcttatgaatgccgaaaggtttaatgcataccggattatgtgggtgttagtactgtatgatttaccaaccgaaaccaaagcgaatatgcgtgatgctaatttgttcagaaaacggttgctggatgacggatttacgttgtttcagttttcaatgtatgtaaggcattgtccaagtcgggaaaatgctgaagtgcatatcaaaagagttaaaaatatgttgcctaaagcagggaaggtagccatcatgtctattacagataagcaatttggagatattgagattttctttgccaggaatagagaagaacccccaccgacctttcaacaactcgaattattctaattttttaatcgtaaataacagaaaaatccattgattttcaatggattaaattttgaggctgtgactaatcacgaagataataatttttgaaagcaattcacaacccacgccttcaggcttaactttcagcacagctgtgactaatcacgaagataataatttttgaaagcaattcacaactaattgtccgatgtttacgtttttttccatgctgtgactaatcacgaagataataatttttgaaagcaattcacaactaccatttacccgcttctaattttttaacagctgtgactaatcacgaagataataatttttgaaagcaattcacaacagtagttttcattttaaattcccaaccttcgctgtgactaatcacgaagataataatttttgaaagcaattcacaactatttcttaaatgcttgtattcaaactcgtgctgtgactaatcacgaagataataatttttgaaagcaattcacaacaattattatgattgagccacaaaaaggccagctgtgactaatcacgaagataataatttttgaaagcaattcacaacatcatttttataaggaccatctttatcaaagctgtgactaatcacgaagataataatttttgaaagcaattcacaacgtatggagttcgttcctgtaaaaggtataggctgtgactaatcacgaagataataatttttgaaagcaattcacaacacagatagatccagatattaagtgggaggagctgtgactaatcacgaagataataatttttgaaagcaattcacaacttatgatccgaggctatgaggccggggatggctgtgactaatcacgaagataataatttttgaaagcaattcacaacggcaaaaccaatttattatatgcaacaaatgctgtgactaatcacgaagataataatttttgaaagcaattcacaactgtcctttctattaatatagaattatatggctgtgactaatcacgaagataataatttttgaaagcaattcacaacagctcttcaaaactgttaaccattttgtaagctgtgactaatcacgaagataataatttttgaaagcaattcacaacgggattattgatactgtcatacgttttttggctgtgactaatcacgaagataataatttttgaaagcaattcacaacttgatcattaaaagaacactgcacgctagcgctgtgactaatcacgaagataataatttttgaaagcaattcacaacgtggctggctgttaaaaacggtgttgaatagctgtgactaatcacgaagataataatttttgaaagcaattcacaactgtgacaaaaggaccttgatcatatggatggctgtgactaatcacgaagataataatttttgaaagcaattcacaacggtctgcaacaccatctacagcggttcgagctgtgactaatcacgaagataataatttttgaaagcaattcacaactggttttggctcttcgattctgattaaaacgctgtgactaatcacgaagataataatttttgaaagcaattcacaacgatatagacggtaatgtagccgaccccgacgctgtgactaatcacgaagataataatttttgaaagcaattcacaactgattcaatgtttctatcataaaccctttagctgtgactaatcacgaagataataatttttgaaagcaattcacaactgatctctatggccttgatgaacggaaatcgctgtgactaatcacgaagataataatttttgaaagcaattcacaaccatatgctttgcaagctcttccctccattcgctgtgactaatcacgaagataataatttttgaaagcaattcacaacgcaaatcccaacctcgataattgatagaacgctgtgactaatcacgaagataataatttttgaaagcaattcacaacagtattgggcgatctttcgggaaaccttacgctgtgactaatcacgaagataataatttttgaaagcaattcacaacgaacagaggcagagctgtacagcgaatacggctgtgactaatcacgaagataataattttgaaagcaattcacaactgattgaaggtgatgtaacaaagacaggtcgctgtgactaatcacgaagataataatttttgaaagcaattcacaacagtagcaagctctttcatcattttcgcaaggctgtgactaatcacgaagataataatttttgaaagcaattcacaacaatagctccgccaagtgctaaaactgccctgctgtgactaatcacgaagataataatttttgaaagcaattcacaacgagcttctgctatttctttattttcagtttgctgtgactaatcacgaagataataatttttgaaagcaattcacaactaaacggttttctgtgtttactgcgccaatgctgtgactactcacgaagataataatttttgaaagtaattcataacctaatatatttgtaatcaatcattaagatagtaattttactatacaatgaaatactttagattctccattttttactatttctcttccacaatagagcgtaaaaaataaaaattatgatttcttgatgtatgttaagggaatatctgagaaggtttttatacttttgactcttcaaatttaaaattttaattaaattttttaaacaataaaataatatgaaaaaacttagtgtaattgcattagtaggagtaggattgcttgcagcatcatgtaataaagataaatcagcaggtactgcgtctacagctacagagcagacggtagctgaaagcaaaggagaagtattgccagttgatgttgcgacttctgtagtaaactggaaagcttttcacaaaggaggaatggctcctcgttggggaacacttagcgtaaaatcaggagatttaagcgttgaaggtggtcagctttctgcaggaaactttgtgatcgatatgaattctatcaaagtagatccggcttcagtaacagaaaaagataaaaaacctgcagatttggaggctcacttaaaaaatcctgatttctttgatacggcaaaaaatcctacatcagacttcaaaattacaagtgttacagacttgaaagatacacctaaagacgctgttgcaggcgctaataaaacagtaagcggaaaccttacattatcaggaaaaacaatcaatgtaactttccctgctaaagtagatgttacagataattcagctgcagttcaggctaaatttacagtaaacagagcagattggggaatcaagtttggtacttcagaaacagatccagctgaatggatgatcagcaaagacatcgagatcgctgttgatgttaaagctaaaaaataaattgttagataatacaaatactgagagctgctttcttatgaaagcagcttttttattgtgggagaggtatccaaatagaggcactcgaagccacgggaatgataaaaaattttatatttacaaaaacacaaatatgaaagagaaagtcaaaggctggatgtatattttattatatgcagacgggagttattacgcaggtagtaccaataatcttgaacgcagaattcttcaacatcaatcaggagaaggttctaatcatacgaaaagaagacttccgttaagctgatctattttgaagaatatgaccgtatcgatctcgctttttacagagaaaagcagatccagggatggaaccgaaagaaaaaagaagcacttatcaatacatcctgatttgcttcctcaattggctgtggcatacagggatttattttccgaagagttagatgactgagagataaggtggcttcgagtgcctcagccaccttttggaaatacagtcagaaataattttgttaagattaatgatgaataaatagaaagacaaatttctcatcaaaaggcaaatacaaggtggctgaggcactcgaagccaccgcttaattcactatttttgcaccaatgatatacattctactcataataaaccttttcaccttccttatttttggctgggacaaaaggctttccattcaacataaaagaaggatttcggaaagtacacttttaggattcgcttttataggtggaactcttggtgctattttaggaatgcttatcttcaggcataaagtgtcaaaaagatcttttttgctgaagtttgttggagcggttttgcttcaggtattgtttatttatatagtttggactactggtctctgccataaatttcttggatagaaaaatattcatgtgaatgtaattgaagattggtgtatgaaattaacgtaatatcttaatgttcattcataacaaacacctcaaaatgaggtgtcttccgttatacaataagctgtacatttccctgaatgatatagctgagattaggttcattgaatcctgttattttaataaccagaaacccgttttcgttttcaatagaggttatctgtgaatttccaacatcttttgcagacaggtttttgccgaaaatatcaccataaaaccatcttcccaaagagtaggttgctacatagatattgtacttggcaaacatcatatattcctggaatttaattttagttgtgatttttattccaaaattagaaggatcatttcccatcagctcatgagtacagtctggaatatagccggcctttccgtctccgacatctccgcttctcgttaccggaataacaccgaattgtctttttacattgccgattgccttagtatgggtagcttttatttgtccgtaagatgagataatattatgatctccaaccgtccagttgggtggaaggaggccatctccctctacgataggaagtgaataattaatataatttcttggttgggaaatatccattaaaccacgataggtattatatccgatggtatggccattgctatcagtaataggtaattgtctgtcagcaatgatggtattgttattccattcacctgtaacctgtccatagtttacgggttcattaggttgggccagatttccagggcctattaacggtctatctacataattaaaataaccgcctgtgatttcaaatgtgccattgtggacttcagaaagatcaatggcattgaatatagcttctgcatatattcctttaataacgatgcctagacaatcacctttgaattttaatccaatttgtcctccttctgtggtaggcgagattaaggtggtagctgtagttcctccgtcaaataagaatccaaagtctttggtagccgatactctttctaatagaagtgcattgttttgccctaaaaactgatacgcatactgattgctgtttttaccagaagacataatgtttttcatgctggtataaaaacagtctaaaaatttccacgaaacctcacagtctgtaaatttaatattttctaaacttgaaccatggcaaaaattaaagaaatctaaacctacagcacagtcttcaaaattagcatcttttatatgagagaaagttataacatggctttctgtattagtaccgtgattaccttttagactgttattatccaggtaggctgttttcaaaatagtatttgtcccgtctcctttaaaagtggaaccattacaataaaaacagacattatttgtaatgaatatggattgttttatataatattttttattatttccaaataataatatgcctccgcccttagaagctaaatataagacagctttgttaatattttccgtatcgtctgcagttccattgccttttactccgaaaatagccacatttaaaggttttgtgctttcggagactgtcctatttaaataatataggccatttctgtttctgtgtacaatttcgtcaaaatacacacttgtagaaggtgtatatattctatcataaatatggggttcataagtaaactcatcaatcagttctattctgtctgcatcagggatggtactagaaggtgagaaaaattcattggtaaaaatcataaattttgtttttttgatgttaataatttatttcctgcaggaaatctataaagcaaaagtagggttgcatgacgacagaactcgtcgtattatttattgtttcaaaaaatatggagatgattactcatttaaacttaatcttatatttttaatttatcatgtggaaaatatcataaatgattctattttaaggctttaacgaatgtttttgtttaacgctctcattatgaatttgttaattaatttatattcttgcttattattcattagaaatcactatttttgcacccgtaaaaatcattcatgcaaaacattagaaatattgcgattatcgcacacgttgaccacgggaagacgactttggttgacaagattattcatgctacaaacattttcagagaaaatcaggaaagtggagaattaataatggataataacgatcttgaaagagaaagaggtattaccattctatctaaaaatatttctgttacttataaagacgttaaaattaacgtaatcgatactcctggtcacgccgattttggtggggaagtagagagagttttaaaaatggcggacggagtaatcttgttggtggatgcctttgaagggccaatgcctcaaacaagattcgtacttcagaaagctttggaattaggacttagaccactagtagtaatcaacaaagtagataaaccaaactgtcgtcctgaagaagttcatgataaagtatttgatttattctttgctcttgaagcaactgaagagcagttggatttcccaacattctacggttcttctaagcaaggttggttcaacacttcattagaacaaacagaagatattttcccattattagatggtatcttacagtatgttcctgaaccgaaagtggcagaaggaaacttacagatgcagattgtttctcttgatttctcttctttcttaggaagaattgcaattggaaaggtaatcagaggggagatcaaagaatctcagtggattggtttagctcaggcagacggtaagattctgaaaggaaaagtaaaagaactgtacgtctttgaaggattaggaaagaaaaaagttacagaagtgaaagctggagatatctgtgctgtagtaggtttcgatgccttccagattggagattctttcgtagatcttgaaaatcctgaaccattgccaagaacttcgattgatgagcctacgttgaacatgacgttctcaatcaacaattcacctttctttggaaaagatggtaaatatgtgacttctaatcaccttaaagagagattgtataaagaattagagaaaaacttagcattaagagttgagcaaactcaggatgcaaatactttcttggtatttggtagaggtattcttcacttgtcagttttaattgaaacaatgagaagggaaggatatgaaatgacaattggtcagccgcaagttatccttagagaaatcgatggagaaaaatgtgagccttatgaatctttggttgttgacgttcctgaagaatttgcttcaagagtaatcgatttggctactcagagaaaaggagatcttcacattatggaaactaaaggtgaaatgcagcatatggaattcgaaattccttccagaggtttgatcggattgcgttctcagatgttgactgctactgccggtgaagctattatggcgcaccgtttcacagaatacaaacctttcaaaggagctattcctggaagaagtaatggtgttttggttagcaaaggtcaaggtccggctactgaatattctatcgctaaattacaggatagaggtaagttctatgttgatccgggcgaggagatctatgcaggtatgatcattggtgagcaaaacaaaccaggcgatttagtcataaatattgtagaagcaaaacaattaaacaatatacgtgctgcaggtaaagataaagatggtggagttgctccaaaaatcttattctctcttgaagaatgtatggaatatatccagggtgatgaagcgatcgaggtaactccaaactttatccgtatgagaaagaaaatcctttctgaagaagaaagaaaaagagtggaaagatcagcgaaagcttaagaaattcttatatattagaaaagcctcgaatttttcggggctttttttatgagactatgtcttaaaatgtttattttggcataataatctcttagaaaaaataaatttaaagtagtttgcagacgatgagaatgaatattataaaacttactgttttagccggagtttttgcatcatataccagttgttccgtacagagcaatacagtaaagccaacaccgactaagaatacagccaaaccaaacagcaatacctcaaaacctaaagagcccgttactacaaccaaacctgtaacagcaatacccccaactgaagaaatcttcagaaccacacttccggaagttaaaagagaattccgtgcagcctggattgcaagtgtagccaatatcaactggccgtcaagaaatgatttaacggtcgaccagcagaaagcagaagccataagcatgctcgatatgcttaaaaacaataacttcaatgctgcagtcttccagatcagaccttctgcagatgcgctgtatacaagtaatatagaaccatggtcatactttctgaccggacagacaggaatggctccgtatcccaattatgatccccttcagttctggattgaagaagctcataaaagaggcctg

SEQ ID NO: 1244 - DNA, 24221 bp, synthetic construct
  misc_feature 1..24221: note = Synthetic
  source 1..24221: mol_type = other DNA
attgatctttcaaatacgtttttaattcgtttgaaacataacagggaccgttatctgataataattttggcttctgtttagtttttaatcgagcctttgcaatagctgtgttcactgttctttttacatcttcaaccttcatagaatcacacaactcccagtgaatgatataacggctataatcatctaaaactgtacttaaataataccatccccatccaataattttaaaataagtaaaatcagtctgccacatctgatgaacaaattgtgttttatctttaaattcgttggacgcagctattaagatatgatttggagctggaatcaatccacgttgctttaagatacgatatacactggattccgataaataaatcccttgttcatcggtaattttaaatgccaattctcttgatgataattcgggatactctaaagctaattcaacaactaaatctttttgaatctctggaatactattccattgacgattggttaatctttgttttggttttaagccatcgaatccattttcaagataactttggtaccatttataaaaagtacttcgagaaattccatattcttttaaagttccttttacaccgagttcacttcgcattacctgctgaataatttcgtgtttttcagtagctgttaatctcatataacgtttgaattgttttgctaatctaacatatccaaacttttttttacaatgtcgtagcgtagaactaagtctgctaccatttcttttaaacgagcgttttctctctttaattcagctacttcaccgctggttgcttctcgtgttacatcaccagataaacgttttttacctgcctcaaggaattctttattccatttataaaattgagattgagtaatggtgtattttctacataattcggctatagaagtttctgcacgtaaagcttccattacaattaaaatcttctgttctgctgtaaaaatacgacgggtattattacgaatgtcttttacaaaagtttctgcggattttttctttggtgttcccataattaaaattacattttttttagaaaacactatctaagtttttaaatataaatgtccactttttgctgacgatttacattttctagttgaagttttttctaatgattatcctttaaaaaaatggggagaagtttgcgaatttgttagaggacctttcggaggaagcttaaagaaagatatatttaaagaaaatggatatgttgtttatgaacaaaaacatgcaatacatgaccattttaacgagctaagatattttattgatgaagaaaagtttcaagaaatgaaaaggtttgaagtttttccaggagatataataatgagttgttcaggagtaacacttggtagggttgcagtggtaccacctaatatcaaacaaggaatcataaatcaagctttattaaaacttactccgaaaaaggtaaatgtacattttttgaaacattggcttagaagtgatcactttcaaaaaatcattcacgaatactctggaggtgctgctattccaaatgttccttctgctaaaattttaaaagaaatattgttgccatgtcccgattcatcaaaacaggatgaaattactaatactattgaggaatataaaataaaaatagattcattattaagaacataccaacaaaaactatctaacatagaagaattacgtaagagtatattagaaaaggcatttaaaggcgagttaactaattagtttattagcttttttaaaaataaggagttaatgtttagacaagtcctttactatacaacaaaaaaaacttacagaatgtgaaatacattttgtactaagatttatgaaatatgagaaatgaatctgaaacacgtgccgagcttatcgatccattactaaccaccaaaggttggggagtaaacaatagtgtagtaaaaagagaatttcctatcaatttaggtcgtttgttgggtaatggcaaacgttctaaagcagataaggcagattacattttacaatacaaatacaagaatgtagctgttattgaagccaaagcagaaggaaaacattttaccgaaggtttagcacaagcaaagcattatgcaaccatgctaaatgttcgttttgcgtatgctaccaatggtttaaaatactatgaggtagatacgcttacaggtaaagagcaagaagttgctaccatacctacgcctgatgaattatggtttagattgtttaatgaggagcaaaaagaagctcctaaagtttacgattggaaacaaaagttagcttccacaccctttgagtcgaaaggaggtgcatggcaacctcgttattatcagcaaaatgcaatagataaagccttagatgctatagctgaagggaaacaacgtattttactcactttagctactggaacaggaaaaactgctgtagcttttcaaatatcatggaagttgtttcaaaaccgttggaacatcaatggtgatggcaaacgaagtccaagaatcttatttttagccgatagaaacatacttgcaaatcaggcattcaatagcttcagtgcttttgaagaagatgctttggtacgtatttcggtaaaagaggtgaataaaagaggttcagttcctaaaaatggttcagtattctttaccatatttcaaacatttatgtcgggaccgaacgacacgccaaatttcggtcaatacccagaagattatttcgatttaatcattatcgacgaatgtcacagaggtggagctaatgatgaaagttcatggagagaaatcttagaatatttcagtcctgctgttcaattaggtttaacagccacacctaaacgtgatttaaacggagatacgtatgcttatttcggaaagcctgtttatacctattcgttaaaagaaggtataaacgacggtttcctaacaccattccgagttaagcaaattgataccaatatagatacgtacacttacactcaagatgatattgttgaggttggtgaagttcaagaaggtagagaatacggtttaaatgactttaacagaactctagttataactgagcgtgaaaagcatttagtaaaagtatttatggatcaaatgaaccataacgaaaaaactattgtattctgtgctactcaagaacacgctttagatgttagagatttaatcaatcaatatacttctgtaaagaaccctaattattgccaacgtgtaacagcgaatgatggaaaattaggagaacagcatttagatgattttgtagatgatgaaaaaacaatacctacagtattaaccacatcacaaaagttgagtacaggtgttgatgctacagaggttaagaatatagtactcctaagacctgtaaattctatgattgagttcaaacagattataggtcgtggaactcgtttacatgctagaaaagattactttacaatctacgattttgttaaagcatacaagcactttaaagaccctcaatgggacggtgaccctgaagatgtaattgacatagaaagtacagataaaccgtctaaagagaagaaattatgtggttattgtggtaaatcaccttgtgtatgtgaaaagcaaccaaatgaagcatgtgaattatgtgaattatgtggatatacagaatgtagatgtaatacggaacctaaaaaagtagtaaagattaagttgagtgatggtaaagttcgtcaattacaatctatgactacagttactttttgggatgcttcaggacaaccaattactgatgtagaatttttacaatcgctattcggtgaattacctgcattattccaagatcaagaaaaacttcgtgaactatggaaagatgtgagtacacgtaaaaagttgttagaaagtttatctgagaaagggtacacttacgaacaattgaaagagtttcagaaagtaatacgtgctgaaaatgctgatttgtatgatgtacttacttatgttgcttacaattcagatattgtagatcgtaaagaacgagctaagtttgttaaagacaatctttctaaatacacagataaacaacaagaattcattgattttgtcttaggtcaatacgttgagcatggagtttctgaattagatgatgccaaattaggcgatttgttggtattaaaataccactcgattaaggacgctaaaaacgtattaggtgatataccaaccattcgaaacacgtttatgacgtttcaacagtatttgtattaactaaaaactttatattatgaaaaaaattttgattttatctgctttcattttaacggctaatttatcagctcaaacacaagagtcaacaactaggaaatttatagatgatgcgcaatttactttgatagagaaagactggaatactacagcggaattttactcaggattaggggagtttgtgaagttttttcccgtagaaataacaaatttgaaatctaaaactaaggtaaaagctttacaattagatatggatattaaaaaacctgaagtttttaaaacagcttgggttggtttagatgaaattgatgagtttatttattttattgaagaaaatgtaattcctaatttggatctaaaatttaaaaaacaatcagctgaatatatttttaaagctaaggaaatgacattttcatatcttgtagatgaaaaaagaaagagggtttctattaccttaaataattatgataatgatggaataccaaactattatttttggacagaatctcaagttaataagataccatacttattggaagttttgaagaaaattaaataaaatttaaagaaatgaaaaaaatatacttatttttattattagtttcgttaaatgcatattcgcaatcttgtagtgatttgattgattacttaaaagaaaattactacggaactacttatacatcatataatagtgatgctatttcgaatgttactttttacgaaatctccaaaaattatgaaacaagttactttgctatagtttgttttaaacccaataaatattctataaattgtagagaatatatttatcaggtagcttataacaccaaaatgaattattcttacaaatatttgaatagtgcaggtgaggctttttgggaatatattcaaccatatagtaaagttctaaattgcggtcctaactttgactaattaaaaaaataaactttggatatatttatattttctatacctttggaataaaaggcgtaaaaatcggtttacaatattactcatatacctcaaacctcttgtgaataaaggaatcacagtccctggttcgagcccaggtgggaccacaacaataagcctttacagaaatgtaaaggcttattttatttctatttataaaaaatagatatttgaaatgattttatttgtaaacatcattatatcattttttgaggattctttcttatttgagaaaattttttttgttgtattgtttttcgctaaaaaaaatctagttttgaacaaaaaacacaatgaaattatttgacatagctatcatcggaagtggacctgcgggggcttctgcagcttttgaactttctagcaaaggattctctacagttataattgaaaaagaaattttgccacgctataaaacttgtggtggcggattggtatatcgaggtcgtaaatatctaccttttgatatttctactgttatagaaaaagaattttttgaggctgatgcctattttgcaaacacagatattaaattaactttaaagaaagataagccattgattactatggttatgcgtgaatcttatgataatttaattgtagaaaaggcaaaagaaaatggcgtaactttacttcaaaatcataaagtaattgatatttcttttggtgatgttcaaattattcatacttcgcaagttgatattgctgcaaaatttatcatttctggagatggagctttaagtcctgttgctaaaatggcaggatggaaagaatctcgtacaatcattcctgcattagaatatgaaataaaagtacctgaagctgacttcgaaaggctttctcaaaatgtacgatttgatattgatgttttgcctcatggttatggttggtgttttcctaaaaaaaatcatttgtctgttggagtagctgcttttgtaaaaaataacgaaactttaaatcttaaaaaatattatacagattatttaaaagttcttggaatttcaactgttttaagtgaacaatcgcacggttttgtaattccaattagtccaagaacagattcgtttgttaaaaacaatgtttttttgattggagacgcggctggttttgctgatcctatttttgcggagggaatttctaattctattttaagtggaattttagctgcacaagcaattgctgaaagtaatttggatccaatcaaagctgaacaattgtataacgataaattagaagtagagattttacctcaattaagaattggaagaattgcttctaaatacgtttacaaacgaaaaatgctgcgaaatgttctagctaaaaaattcggaattacattgactaataaattagcagatgttttcatgggcgattctttactaccgaatgatattaaaggttctataatgcgaaagtttaaagaagcgttaattaaataatataaatcacctattttagtttatacttgataaagctatctcataacgagatggctttttttatttaaaaaaaatatttacaaataaataaaatattttttagtttaatctaaatttatatttttgtaaataataaaatttaaatcagtatgaatagaaaatatattttagcttcatttttgtttactttacaatgtttttcgcaaacaggaaatctaaaagggattatttcttcagataaaacattcttagaaaacgctaatgtcaagattcaaaattcagaaattttgattttttctgatcaaaatggatattacgaaatacaaaacatacccgtaggaaaacaaatcattcaagtaaattacatcggttttcaatcccaatcgcaaaccatagaaattttagaaggacaaaccatcgagttaaattttgaactacttgatgattatttaggtcttgaagaaatggtgattacctccactcgtaaacaagttccagtgtataaagctcctgttgttgttagtaggataaattcaaaaacatttgaaacaacgcaatctttagcgctttcagaaagtttgaatttcagtcccggattacgcatggaaaccaattgtcaaaactgtggattcacccaagtaagaatgaatggacttgaaggtccttatacacaaatcctcattaatagcaggcctattttttctgccttaatgggagtttatggattggatatgttgccaactaatatgattgatcgtgtagaagttattcgcggtggtggttctgcactttatggcggaaatgccattgcgggtactattaatatcttaaccaaagatccgataaaaaatagtttttctataggttctaatttagcttttacagattataaagttcctgatagaactataaatgttaacggaagcgtggtaagtgaagatttaaataaaggaatgagtttttacgcctataaccgtgatcgtaaaccttgggatgccaatggtgatggattttctgaacaaacgcttttaaaaaataccacttttggatttgatgctttttggcaaacttctgatttaagtaaattaaaaataaatctttttaatataaatgaattccgtcgtggcggaaataaatttgaacttccggctcatcagacagatataacggaacaattagatcataaaatcttaggcggagccatttcgtttgaacaagcttcagcagatttaaaacataaattttctgttttttcttctgcacaaacagcaaatagagatagttactacggcggtggcggaagaatattagaaattggagatcaacttacagaacaagatattacagcaattaatgcttacggaaattcaaatgatatttcgattgtaacaggtgctaattatggttatgaaatcaataataaatataatattttggcaggtgttgattataatttcaatcaagttgaagataaaatgccaggttacaatcgttcaatagatcaaaaagttggaacactaggtttttacggtcagattgaaatgatgcccttagaaaaatttacctttttggttggtgctcgttatgattatgtaaatataaatgggaggtatgattttgatattgaaaaatcagatgaccaaaaaactttaaatgcatttgttccacgaattacagcaatgtacgaagtgacagattatttaaaaattcgtgcttcctattcgcaaggttaccgcgcacctcaagcttttaacgaagatttacatatcgaaacagttggtggagcagcttctttcacagttttatcaccagatttaaagaccgaaaaatcaaacagtataaatgcttctttaaacttctctaaaaatttaggagacgtacaaacaaacattattttagaaggatttacaaccaaacttaacgatgtttttatcactgcagatgcaaaagaattgccaagtggtgtttcggttttaaccaaaagaaacggttctggcgctcgagtaacgggattgaatctcgaagcgagttttgctttaagtagagcgtttaatttacaacttggaggaactgttcagaatgcaaaatatgatgaaactgaagaactttggaaatccaaagacgaaactgaaattgtgggaacaaaaaatatgttacgcacaccaaatacgtacggatattatacgttgagttataatccaataaaaccgttgactttatctttatctggagtttatacaggtaaaatggatgtgacacacatggttgatccagaaacagaacgcacagtaattaaacgtaccaaagacttttttgaaaataatattcgcgtagcttatgattttgattttaaagataattgcattcagatttataccggaattcaaaatatgtttcatgcataccaaaaagattttgatcgtggagctttgcgcgatgcaaattttatttatggaccatctcgcccgcaaacatttttctttggtgcaaaatacacgcttaattaatcaatgaaaaagaagtttttgaataagaaatacatggttttgttttgtatttggatgaatttcggtttcagtcaagtacaaatgttcgatataaatcaaatcgattcgttgatgcagcttaaagcaaaacctattttaatgttactttcaaccgattggtgttcgtattgtaaagttcaaaaacaattggttcagaaaagtgaagtgtttaaaaaacaagcatctaatttttattattcagaatttgatgccgaaagttttgatgttattatttttaataaaacccaattcaaaagcaacaacaaaaagaaacgaaaaaccacgcacgaactcgcaatggctctaaacggaaacaacaaacctgtttatcctatgtggattcttttagacgaaaattatcaaatcctatacaaatattcaggttttttaaaacctaagtttctggatgagttggtagagaaaatttagtaaaatcaaaccttacagaaatgtgaggtttttttcttgaatatttacgaaaagaaaaagtataaaaaaagccccacagataggcgaggcactaaatgttttcacaacggaataatccttattgtgaattcctttcaaaaaccaaatatacgtaatttttttttgttacactaagggttttcactgatatgtgaatttttttttatttgtatcttgtgttttcttaatcaatttaaacattatgaaacgaatattagggttagatttaggaaccaactctataggttgggctttggtggaacagaacttcgataataaagaaggaaatatattaggaattggtagtagaataataccgatgactcagatgtgttaggagaatttggtagaggtaactctgtatctcaaactgctgagcgaacaggttatcgtggtgttcgtagattgcgtgaacgtcatctgttgcgtagagagcgattacatcgtgttttaaatattcttggattcctgcctgagcgctatgcaagtcaaattgattttgataaacgttttgggaagtttaaaaaagaaagcgaaccaaaattggtatatcataataatgaatttttatttaaagattcgtttaatgaaatgttggaggatttcaaaaaacatcaagctcattttttgattaataaaaatggtgaagaaggtttagttccttacgattggacgatttattatctacgaaaaaaagcattatctcaaaaaattggaaaagaagaattagcttggattattttaagttttaatcaaaaacgtggttactatcaattaagaggagaagaggaagaagaaaactcaaacaaattagtcgaatttcattctttgaaaataattgatgttgttcctgataatgatataaataaaaaaggagaaacttggtattccttgcatttagaaaacggatggatttatagacgttcgagcaaaaattcattaaacgattggaaagataaagttagagattttattgttactactgatattaatgaagatggctcagaaaaacttgataaagaaggtcaagtaaagcgaagttttagagcgccgagtgctgatgattggactctattaaaaaagaagacagagcaagaaattgataattctcaaaaaacagtaggtacttacatttacgaaaacctgttattggacccgaaacaaaaaatcaaaggtaaattggttcgtacgattgagcgtaaattttataaggctgaattagaacaaatattaaaaaaacaaagtgagtttcattcagagctgataagtgaagatttattgtcagaatgcgcacgtgagttgtataaaaataaccaaaatcatcaacaaacgataatagccaaagatttcgttcatttgtttttaaacgacattattttctatcaacgaccgttaaaaagtcagaaaaatctaatcacaaattgcactttagaatctcgaaaatcaaaagatggcattacatttcctataaaagtaatttcaaaatccaatccatattttcaagagtttagaatcttgcaatggttgcaaaatttggcaatttataccaaagaagatgataaaaatgtaactcaagaattctttgattctaatgaaaaatgggaggatttgttgcgttggctaaaatctagaaatgagataaaacaagaagcacttttaaaatttttattagaacagaaaggttttaagtcgaaagcattaaccgctgaaattgccaaatatcgttggaactatgtacaagataaagattatccagcatatgaaacacggactttgattcagtcccgtttggataaagtagtagatattggagtagattttttggatgatgaaatagagtataaactttggcatttgatatattctgtaactgataagatagaatacgaaaaagctctaattaagtttgcgactaagcataagcttgatgaaacaagttttgtagattctttcaaaaaagtgccaccatttaaaagtgagtttggttcgtattccgaaaaagcgattaagaaattattgcccttgatgcgatttggttcggtttggaattatgagcaaattgatgataattcaaaagctaaaattgataaaatattgacaggtgaatacgatgagaatatcaaaaatcgtgttcgtgaatttatcgaaaagcgaattattacgaatgaagaacaatttcaaaatttaccattatggttggcacaatatatcgtttataatcgtcattctgaatctgcagatataaagaaatggcaatctgtagaagaattgaatcagtttttacaagattttaaacaacactctttgcggaatccgattgtcgaacaagtaattacagaaacgcttcgtgtggttaaagatatttggatgaaatatggcaaaggagttaaagatttcttttccgaaattcatgtcgaattgggacgtgaaatgaaaaacacggcagacgaacgtaagcgtttaaccaatattgtaactgataatgaaaatacaaattttagaatcaaagctttattggctgaattagctaatgatgcaatggtagaaaatgttcgtccgtattcgccgatgcaacaagatattctgaaaatttatgaagaaggcgtactaaattcagttgaaaatattgaagatgatatcttgaaaatcagtaaaacggcacaaccgtcaagttctgatttgaaacgttataaattgtggttagaacaaaaatacaaatcaccttatacagggcaaattatcccgctgaataagctatttacgcacgaatatgaaatagagcatattattcctcaaagtcgttattttgatgatagtttgagtaataaaatcatttgcgaagcggcagtcaataaattgaaagataaccaaattggtttagcatttatcaagaaacatcatggcgaagtggtttcgttaggtaatggtaaaactgtaaaagtatttgaagttgccaacttcgaggaatttgtaaaacaacattatactaaaaatcgcacgaaacgtaataaattgttgatggaggaaattccagaacaaatgattgaacgtcaactcaacgatacgcgttatatcagtaagtatatcagccaaatcttatctaatattgtaagagatgaccaaccagaatcgacagatgatggaattaactctaagaatgtattgcctgggaatggaaaaataacaaccaaactaaaacaagattggggcttgaatgatgtttggaatgatttgatattgcctcgatttatacgaatgaatgagttgacttcatcgacagattacacatctaaaaatacaaatggtaagttaattccaactgtaccattagaacaatctaaaggattttctaaaaagcgaatcgaccatcgtcatcatgctatggatgccctagtgattgcttgtgctacacgtgatcatattaacttattaaataacgaggctgcaaaatcaaataccaaacgttttgatttacaacataaactaagaaagcaagaaacgtatagaacacaagaaggtaatgagcaaaaagcttttaaggacttctttaaaccttggaaaacttttacagaagatagtaagaatgctttagaaaatatagtagtgagtttcaaacaaaatacacgtgttattaataaagcaaccaattattatgaatcgtataaagacgaaaacggaaatattcgtttagatacaaatggtaatcctaaaaaaggtgttttggttcaaaaaggaacaaactgggcggtaagaaaggcattacataaagaaactgtatctggaaaaatacatttagatagaatcaaagtagcaaaagataaaattcttacagcaagccgtaaatctttagatgcttcatttaacgaaaagacaattttatctattactgataccggtattcagaagattttgttgaattatttgaagttcaaaaataatgattcagaaattgctttttcatcagaaggaattgatgaaatgaataaaaatgtagctcagtttaacgaaggtaaaaagcatcaacctattttgaaagttcgtgtttttgaacaaggaagtaagtttgcattaggcgaaacaggtagtaaaactaagaaatatgtagaagcagccaaaggaacgaatttgttttttgctatatatcaagataaaataggtaagcgttcttacgaaacaattcctttgaatattgtcatcgaacgtcaaaaacaaggtctttcttcagtcccagaaaccaacgaaaaagggcattctttattaatgtctttatcacccaacgatttggtttatgttcctctagaaggagaaaatggtgatttggataatattgattctaatagagtttacaagatggtcagttcaactggtagtgaatgtcattttattaaggtaaacatttctacattgattaagggatatgatgctaagtctaagataggagaattaggtagtttaaataaattagaagtaacaattgattctttatttagaattaaagaggtttgcaccaaacttaaagttgatcgtttaggaaatatttcaaaagcttagattatgctcaaacgtaccatttacatcggcaatccttcttatttgaaattgaaagataatcaattgaaaattgaagatacaacgaccaaagaaacgaaaggttctgtgccgattgaagatttaggctttttggtattagatcattatcaaattacgatttcgcatcaattgattgtagctttacaacaaaataatgtagcaattatcagttgcgacgaaagtcatatgcctttgggtttgatgttgccaatgagtggtcatgtggagcatagcgaacgtttaaaacatcaaatcaattgttcggagcctttacgaaaacaattatggaaacagacggttgaagctaaaatttatcagcaaaaggaagtgctaagaaaaaataaattaccttttgatgctatgattggttatatgaatgacgtcaaatcaggtgatgttactaatatggaaggtatagcagcgcagcattattggaaatttttgtttgatgattttattcgcgatcgtaaaggagatgcgcctaataattttttgaattttggatatgctattttgcgaagcatggttgctagagctttagtttcttctggattaaacccaacaattggtatttttcataaaaataaatacaatgcgtattgcttggcagatgatatcatggaaccgtatcgtccgtacgtagatttgttagtttttgattggttagaacaaacagatagttatactttagataaaaaggctaaagcacatttgttgcaaatagctacttttgatgtgtatatcaatggtttgcaaagaccattaataacggctttgagcattaccaccagttcgttgtgtaaatgttttatgggtgaaagtagagtgattcattttccgttacttaaatgagttttagtagatataatgcctatcgaatcatgtgggttttagtttttttcgatttgccaaccgagaccaaaaagcaacgtagcgtagcttcaaaatttcgtaaactattaattgacgatggtttcaatatgtttcaattttctatttatttgaggcattgtccgagtaaagaaaatgcagaagttcatataaaacgaaccaaaaaaaatttaccacctgaaggtaaagtaggtattttatgcgttactgataaacaatttggacagatggaattgttttttgcaaaaaaagaaacgcaactaccagatataccacaacaattagaattgttttaatagaattaaaaaagaacgatttttcaatagaagaatcgttctttttttagtttttttctaagattaaaaatctaaagaagtcaataaaatcaacattttaagttgaggttgtaattctaaagattaaatctacaaaatttgaaaggaattcacaactatcctcattaaatgaaatgttaaccgtgcgttgtaattctaaagattaaatctacaaaatttgaaaggaattcacaactaggtcctgttctttttttgaaattttcgtgttgtaattctaaagattaaatctacaaaatttgaaaggaattcacaactgtcttcgttaaatgaaatgttaactgtacgttgtaattctaaagattaaatctacaaaatttgaaaggaattcacaacctattgaatgattaataattctgtattcttgttgtaattctaaagattaaatctacaaaatttgaaaggaattcacaactttatcattctctatgctttttaaaattatgttgtaattctaaagattaaatctacaaaatttgaaaggaattcacaacctagtcgctactattataccgaaaaaagcagttgtaattctaaagattaaatctacaaaatttgaaaggaattcacaactgtttgtttgcgtaatagtttttgaaaatagttgtaattctaaagattaaatctacaaaatttgaaaggaattcacaacaacttccaaatagtggtcctatcgttggatgttgtaattctaaagattaaatctacaaaatttgaaaggaattcacaacattgataatttttaaaagcacttttggatagttgtaattctaaagattaaatctacaaaatttgaaaggaattcacaacgatttgttattccttgtgttatgctatttagttgtaattctaaagattaaatctacaaaatttgaaaggaattcacaacaactgccgaataatggtcctattgtcgggtgttgtaattctaaagattaaatctacaaaatttgaaaggaattcacaacagtttttcttctatcgtttctccttcttgtgttgtaattctaaagattaaatctacaaaatttgaaaggaattcacaacgatttgttattccttgtgttatgctatttagttgtaattctaaagattaaatctacaaaatttgaaaggaattcacaactgtccttcattacatgctatttgagaaactgttgtaattctaaagattaaatctacaaaatttgaaaggaattcacaactgttgattacatttgccatttggtcacgttgttgtaattctaaagattaaatctacaaaatttgaaaggaattcacaacgcggttgcccgtactgccttatatcggtctgttgtaattctaaagattaaatctacaaaatttgaaaggaattcacaacgtttttctctttatcaataacctcagagcagttgtaattctaaagattaaatctacaaaatttgaaaggaattcacaactaaaatcagcagttatttgttgtggggctagttgtaattctaaagattaaatctacaaaatttgaaaggaattcacaactaacgtctagttaaggtcataaacatctgagttgtaattctaaagattaaatctacaaaatttgaaaggaattcacaactatcggtatgcgatgttttgcgacttaaaggttgtaattctaaagattaaatctacaaaatttgaaaggaattcacaacttgttaaattagtttcatttttaagacgtagttgtaattctaaagattaaatctacaaaatttgaaaggaattcacaacagcatagagggtatgtttgcaatagtaaatgttgtaattctaaagattaaatctacaaaatttgaaaggaattcacaactgtttctccccaatttttaaagatgctcgagttgtaattctaaagattaaatctacaaaatttgaaaggaattcacaactgaccgaagctgaaaaactagatttggcaagttgtaattctaaagattaaatctacaaaatttgaaaggaattcacaactcatcactatatatttttttttgtaataggttgtaattctaaagattaaatctacaaaatttgaaaggaattcacaaccccattgcaccaattcacatttaacatcctgttgtaattctaaagattaaatctacaaaatttgaaaggaattcacaaccagaactcgcaggtttattatttacaaatagttgtaattctaaagattaaatctacaaaatttgaaaggaattcacaactttcttctgtttgtaagttgtttaatatacgttgtaattctaaagattaaatctacaaaatttgaaaggaattcacaactttggaaatcaacaatatcaattatacgatgttgtaattctaaagattaaatctacaaaatttgaaaggaattcacaactaaaattttcagcgttcagtgaaacactgagttgtaattctaaagattaaatctacaaaatttgaaaggaattcacaacatggaagcttcgcttcagctccaagccattgttgtaattctaaagattaaatctacaaaatttgaaaggaattcacaactgaagatcaagaaaacaaaacagatttgaggttgtaattctaaagattaaatctacaaaatttgaaaggaattcacaacatgtttttacagatttaaattcaatttcttgttgtaattctaaagattaaatctacaaaatttgaaaggaattcacaacgcacaacgcaatcttattagaatttttatcgttgtaattctaaagattaaatctacaaaatttgaaaggaattcacaacgaatatgcagtagcgggcgcaagcgatttagttgtaattctaaagattaaatctacaaaatttgaaaggaattcacaacctaaattgtctataaaatcgttggttttcagttgtaattctaaagattaaatctacaaaatttgaaaggaattcacaacaaaaataatcttgttgctctcttagctatggttgtaattctaaagattaaatctacaaaatttgaaaggaattcacaaccaataatcgaatccttcatttgtatcttccgttgtaattctaaagattaaatctacaaaatttgaaaggaattcacaaccaatacatgtttagaatttacatttttagggttgtaattctaaagattaaatctacaaaatttgaaaggaattcacaacatattgttttgttgattgatggtgcagtaagttgtaattctaaagattaaatctacaaaatttgaaaggaattcacaaccatcaaaccataattgtacgaatctatctggttgtaattctaaagattaaatctacaaaatttgaaaggaattcacaacaaggcgttgtaaccgattttggtaattcaagttgtaattctaaagattaaatctacaaaatttgaaaggaattcacaacgcaacaatactaacaagtaatttatcattagttgtaattctaaagattaaatctacaaaatttgaaaggaattcacaactacttccaagaataggagttaatgatttcagttgtaattctaaagattaaatctacaaaatttgaaaggaattcacaactcgattcccattctatacgatttaaagtgtgttgtaattctaaagattaaatctacaaaatttgaaaggaattcacaactacccgcggtaacggtatgatagtatacgagttgtaattctaaagattaaatctacaaaatttgaaaggaattcacaacagtttcagctaacagacgtgcctcttctgcgttgtaattctaaagattaaatctacaaaatttgaaaggaattcacaacaaagatactaaaggattagatatttctgaagttgtaattctaaagattaaatctacaaaatttgaaaggaattcacaactgccccatgtccaaaagtccaacagttgcagttgtaattctaaagattaaatctacaaaatttgaaaggaattcacaacacatagatgttcattttcgattcaggtagtgttgtaattctaaagattaaatctacaaaatttgaaaggaattcacaacgagacttcatgacggcaaaacgaaaggagagttgtaattctaaagattaaatctacaaaatttgaaaggaattcacaacacagctctaattgttcttgtgtataatcttgttgtaattctaaagattaaatctacaaaatttgaaaggaattcacaacttaattgtcttgtattattaattgctgtcggttgtaattctaaagattaaatctacaaaatttgaaaggaattcacaacggtgttacctttacatactgtgcattagcagttgtaattctaaagattaaatctacaaaatttgaattaaacggaacgaatcatcgaatccaaaacaaatagtatcgttgagataaaggaatccaaataaaacaaacttttatttgatgaaaatggtcattgctttgaatccagtcgaggtcacaactcttgataaagtagaaataattttttttatttttcaaaacaaatatgtccgttattttgaaaatgttttaacactgcactataaaaaaacggctttgattatctaaaatcaaagccgtaatcttttaaaattcaaattctccaattaaaattttatcttttccgctgttgggtttgtcgttttgaaaagtgattaattttcgaacttctttacctgaactatacatcaaataaatttcgacagaaatagttgtcggtccagaaagtgtcatttgactttcgccataaaaattcgattcaattttgtattttcctttgatggcttttttaagcataaattgttccggtccaaaacctcttgttacatcatcgctcattcggccaccaatttctgtagcacgatgagaatagaagcaaacgtcgccatttgggtcggttacatataaatcgatatctgtgtcgtctttattccaattcataactacacgaatatcaaccggaatatctaaaattaattttttatctattttagataaatctaattttttgccatgaaccgaaattaaattgttgatttcaggaataataatttcagaaatatttcggtctctgtttctgaagttttcatcataactgttcgttaatgtttgatataaaaaatctaaagcttcttgataacgttgattatcttgtaatgctaaagcgtaatctcgataactttgtgcatcaaatggacgccattttaaaactttttctgtgacaaacaattccgtatcatatgcaccaatttctttaagtttataagctaacgttttgtacatttcggcattttctaaacctaattcggcaatagaacttaaaactttatatcctgtttcgctttcttttttctgaaagaagaaagtcgcaacatcatagtaaaaactaggagtttcttgatattcttttcttaaagtcaaataagtttcatacggattttttgacttctcaatttttttgatataatctttgtccgattttacatcaaaagtttttatgtctgacgaaactgtttttttatcggaatttttagatttattcgttttagattctgatctacgccttgatgttgttctatatgtatcaataacaatttcttctaacattggttctgactcttctgcctgataatcaagtgtttcagcagtagaataacttaccgatcttgattctcttacaggtgaagagtcatttgatggtgctatagctgtaatttcagaaatagtttcgtcttgagatactctgtttactccaataagtggagtaggtggttcttcaagtttttcgggtttaggatattttttcttcgtttgttcgtaattggtattccaccaaattcttaaatcttcaacagttgtaaaagcttcgtctaataaattatttttttgatattcgttttcttcggtttgatttttcatcaaatcgttataagcaacaagtaattcatctggaggtaaaattttatatttcacataatcagaaacattttctaaaacaattaaactcgtgtttgctgttacaatcgaaaattgtttgccaatttcagcaatatcatctttgtttccgtcaaagtccatttctaaaaaatcaactttattttgtgcccaaatcttactaacatctaatccattcgaagctttttctaaattaatttctttcgtaaaaagtacttttccgtttcgaccaaaagccaatgtcaatttttttagatttgatggacaaattccggtaaccgaaaaatcttttgtgatttcagttccaatcactggataaacttcagttacctcttgattctgaatacctaaaaattggacattactttcgtttaaagttataaaacctttatcaaccgaattttcagcaagatttataaattttcctttgtttttttgtgcgatgattttcaaaatgccaaagtttgatttcgcagaagctgtaacggtataaattggtttgttaaaattaaattggtttgaacctatggtcgatattccatcagaaaacatcaaatattcatttgctggaagttttgaagcttcgataattgagtaattggttgcaccgtcataaactgtgtttttgagatactgttttaaatccgtccaatcaccatttttaatctggaatgtttttcctttttctaactgaatatttaatagaacaacatcaatggttatatttttttgttgtttgatgattttaccaagtaattccaattccttttcatggtcttgatttaatctgctcaacgaattatcccaaataattccaagattatctgaccaaatttttgattcggttttcccgttgataatcaaattcgataaaaaatacattgaaccatccgtatttttttgtgtgaatgattcgatactgttttccgattttggtaactcaataattaacgagttcgaaggtttaaaatttactttagataaactagcttcgtaaatattgctgttttcactgaatttaaaagtattgtcgggtttttcgattaactttggcttttcagtcgattgataaacttttacgactaaatcaaatttcgaaattttttccgacgtatttaaaggtaaaacgtacagataattattttgttctaaatttaatgtttgataataactaatttgaatagttcttgttccgtttgctggaataggagaaatgcgcgttttgaaattatttccttcaaccttttcaataattccagggtcgacattttgtttctgaatgctttcgaaaacttcagttgctctttctttttcaatcggaaccgcgttgcgtaactttccgttaatatcaatagcgtaaccgctaatagttgttttatctggtaaaggaaaaacaagctgaccttctaaaacacgatttgcattgtttttgaaaatcatggttgaagtcgttttagaaatgttcccgaaaatttcaacttcagtatttattgattctaaaactacggattttttatcttctttggattgaatttcaatttttggaatagcgccttttgtaatttgtgcattcatttttacacaatataacagaaatgagcaaatgcaaattaaacaaacaattcttttcataagctttggttttgattattaaagatatgataataatatataaaactgaaaaattaatttatttattgtgaatggtttatgtttgattaattaaaaaagccttgtaacttccgaatagaatttacaaggctttttctatgattattttgtttcttattttgcgctaagggttgtcgtaaatgttttagaaatatcaattttcatcccgactgcaaaaacgcttcggtcttttgtgtttaatgcatttttaccaaaagataatcgctgctctgcataaatttgaacgtattttataggctgataattcaatccaaaaataacatcgttaactttaaaattggagcttattgggatttgattgttttctgtctctaaattttttcggtctggaatatacaaattataacctccgtgaatggcgaaatcatcgaatttgtaatttgcaaaaaactcaaatcctttggcatcaaaaacaacagttggataaattaattcttgggtattatttaagtatgaaccttgggtgaaatcaccatttttttcgatagctcctacaacgcttaatgttaatttttctcctaaatattttataccggcagcataataagttggttgtccgtctaaaccaatgattttatgttgattaattaagttgttgctcaaaaaagttcggttaaaagaagctcctaaaaataattcatctaaaattttatattgtgcagaaaatccgaaaccgtcaataaatttatcattgtttccgcctcgaacttgtgcttgcgcacctaaataaaaattaccaaattgatttctgtaaattaccgattgagaagcgcgtccggttcctgaagctccaccatcactacctccgacataagttgctgaagctcttcctccaaaaattgtaaattggtcggtgtacgatgtaacatcataataaacgctccattgttttccgaaagttagcgttccatatttttcaaaatcaaaaccgatgtatccaattctgtttgtaaaagcttgcttactttcggtggtttgaatgtctaaaaattcggtattttcatttccatcaacgttgaaactcggaccgccttgaaataaacttagatgtaattccgtag

SEQ ID NO: 1245 - DNA, 24188 bp, synthetic construct
  source 1..24188: mol_type = other DNA
  misc_feature 1..24188: note = Synthetic
cggttctcctttcttatatatcacttttcttatatattacctgtaactttcttatatattacttgcaacgcacaaatatacgaatagttcttgtaactgacggcctgcaatctgttaaactataggctctgtgcatggttctgcggacttgtccggcaaagtctcccggtactgcacgggtgtcatgccaagcagtttgttgaacgccacatagtaggtgttgcggctcttgaagcccgaagcggtggctatggcatctatggaatacattctgttgtctttcagcatcgatatggagtgctccacacgcaggcggttgatgtagtcgctgaagccgtcggcaccggcatattcgcgcaggaacgggttgaggcggttcttgctcaaggccgttatcttcatcaggtcttcgcggttgaagtcggggtttaggaagggcaggtcggtgagcagggcatcttccatctgcatgaaccggcggcggttgtcttcatcgtcggcagcggagggggaagtgttggcttgagcggcaggcggctcttcgttaggggcatcttccgggtgaagcggctgccggcggtatgccttgcgcagttcttctttctgtgccagaagctcttctatctggcgggcggctatctggttgcgtttgcgggtgcggcgcaggtggaggtgcttttcccatagcaggatggcgagcaggatggcgatgaagctggtggtgatgaacagtacgcgttgccgtgccagcttgtgttgggcttcacgtatctgcgcatccttttcctgggtttggtagatgatggcgaattcgtgtgcctggccggccttttcgcgggcatagatgctgtcggtcagcatggtgatgcgctgttggtagctgtcggccagttccggacgtttcagtccgcggtaggtgcgggcatagcggtccagcagaatcaggtggccgtagttgaaggtatcggccggttcggccagggcggaagaggcgtcaagaagttgcagcactttatggtactgacgcgtacccagcaggtaggggacgatttctgtttgtcctgcctgcgattgtgcaaagccggtgctttggtatttccgggcggtttcggcggctttttcgctttgtccgttttgcaggtagtaccaggcaagtttggagtagaggtaaccgtattgctggtctatgtatccgggcggcggtccgggcagcaggctcatgcggctgataacgtcgagacgcttctcgcagagggcaatggcttcgtccaaacgctcgttttcggccagataggcggacaagtcgccgtaggaggtggatagttgggccagttcgcgcacattgtccgtgccttgcagcagttcgatggaacggtacatgtaccggaacgctttgtcgtcgagcttcatgccttgatacatgcggcccaaagtgaacagcagttcgctttctttggccttctgtccttgctcctgtgccagctcgatggcttgggtacagatgcggatgccttcttcgtatttgttcaggcggtcgagggcggtggcgagctgcgtgaggacttgcagtttccggagaggagtgtgctgcacggagtcgctttgcagggcgcggcggatgtaccgctccttgaggtggtacataccttgacgttcgtagactgtgccgcgcagcatgtcgatgcggaattgcggcaggtggggaagacggcgggcttcggcttcgtccagcagtgacagagcgctgtcgggcagggtgtaatagatgctgcggatatgctgttcggtcagcaggctgtcgggcagggaagcggaggttttgtatcggttaggggtgcttgcggtggaaaataggcttatggtgagtgccagagcaagatagaggggacggaagtaatgtattttctccattgtttattttctcttttgtatggcaaagatagggattatttttatctttgcctgcgtttatcataagaagttactgcaatgaatatatacataaaatctgtcattttgtcttttttctttatatctgtcggggctcgggcacaagaggcttccttcactccgccttttgattttcccatcattttctccggtaactttggcgagatacgtgccaaccattttcatggcggactggatttcaagaccggtggcgccataggcaaaccggtacgtgcgctggcggacggatatatttcgcgtatccgtgtcacccacggctcgggctatgtgctcgatgtggtgtatgataacggctataccgccatctaccgtcatcttagcgcctttgtgggtgaagtggcaaagcgagtgaaggctcttcagtacgaaaaggaaagctgggaagtagagataattcccgagcctgctcccgtgtcagatgagggagacgatagagatagaggcagtaataatctcggggtgcatatcttgggcgaatatcccgtgaaagccggtcagataatagctttaagcggaaacaccggatactctttcggtccgcacctgcatctggatatgatagagacggctacggacgaatatatagacccactgcctttcttcatggacaaagtgaaggacaagactgccccgcgtgccgaaggtatcatgttgtttcctcagccgggcaaaggagtggtggaaggtaagcagacgcgacgggcttttccggcacatcctacgaaacccattaccgcctggggattgattggtgcaggcatccgtgcttatgattatatggacggagtgcagaataaatatggcgtgaagacggtgattctcgaagtggacggcgaggaagtcttccgcagtacggtagaccgctttgcgtacgaagaaaaccgctatatcaattcgtggacacacggccagtatatgaagtctttcatcgagccgggaaaccacttacgcatgctgcatgcatccaacggtaaccgtggactggtggacatcaacgaagaacgcccttaccggtttgtctatacgctgagcgatgcgctgggaaatacctccaaggtctgcttcacggtgcaggggcagaagacgacaattgctccggtggaacatcgtgagaaatacgccctcaagtgggacaaggtgaactatctgcaggaaccggggttagaattggtcattccgaaaggaatgctctacgataacgtcctgttgaactattccgtgcgggctgatagcggtgatatagctttcacctatcagttgaacgatacccgcattccgatgcacgatgcctgcgatttgcgtatcggcttgcgccggcgtccggtagaggatatgaccaaatattatgtggcgggcgtaacggcgcgcggtggaaaataccgcatcggcggtaagtatgaggatggtgtcatgaaagtgcgtatacgggatttggggacttataccgtggcagtggatacggttccgccggtgataactcccgtgaaccaagctcagtggggacgtacgggaaaaatcatcttcaaggccaaggacaaggaaaccggcatcaacacctatcggggtacgattgacggaaaatatgccttgtttggaaagcccaactccatcagtggtaacctggtgtgcgagctcgacccgaaacatgtggagaaaggcggcaagcatgtggtggagatgacggtgacggatggctgtggcaactgtaccaccgaacagtttgaatttgtatggtaaagcctctcccccgacccctcccccgtagggaggggaggtcggaagttacttttgctatatatagtgtaataaataagtgtaataaaaatatgtgtaacaagctatcattttcttctcccctctctttcggagaggggacgggggtgaggccttaatttattagaagtatgaaaagtaaaagactgactctttccgtcttgtttgttgtggcagccgtggcgaatgcactggcctgcaccaatcttatcgtgggcaagaacgcctccgcggacggttctaccatcgtttcttattctgccgattcctatggcttgttcggcgagctatatcattatcctgccggcatgcataagaaaggcacgctgattgacatacacgagtgggataccggcaaatacctcgggcagatagcgcaggcccgtcagacgtacaatgtcatcggcaatatgaacgaattccagctcactatcggtgaaacgacattcggcggacgccccgaactggtagacactaccggtattatcgactacggtagcttgatttatctcggactgcaacgttcacgcactgctcgcgaggctatcaaggtgatgacggaattggtgcaggaatatggctattacagtagtggagaatccttcaccattgccgaccccaacgagatatggattatggagatgattggcaagggacccggtgtgcgcggtgccgtatgggtagctgtccgcgtgcccgatgattgtatctccgcacatgccaaccagagccgcattcatcagttcaatatgaatgacaaggaaaactgcatgtactctgccgacgtcatctcctttgcacgtgagaagggttactttgatggtgtgaacaaggatttcagttttgccgatgcctatgctccgctcgattttggtgcccgtcgctattgcgaggcccgtgtatggagctatttcaatatgtttaccgaccgtggtaacgagttcttaccttatatattaggtgagacgaacactccgatgcctctgtttgtgaaacccaaccgcaaggtttccgtgcaggatgtgaaaaatgccatgcgcgaccattatgaaggtactcctctcgacatcagcaaagatttcggtgcaggcccgtatcataccccgtaccgcctttctccactctctttcaaagtgggcgaccgggaatatttcaatgagcgtcccatctccacccagcagagtggtttcgtattcgtggcacagatgcgttccgagttgcccgaccctatcggtggagtactgtggtttggcacggatgatgccaacatgacggtatttacgcccgtatattgctgtacggacaaggttcccgtatgctatacccgcgtggatggcgccgattacatcactttctcctggaactccgctttctggattttcaattgggtggccaatatggtatatccccgctatgacttgatgatagacgacgtgcgtgccactcagacagagttggagacaaccttcaacgaagcgcaggagggcgttgagactgctgctgccaaacttttggaaaaagaccctgccaaagcgaaggcattcctaaccaactatacgaacatgaccgcccaaagcactttcgatacctggaaacgtcttggcgagtttcttgtcgtaaagtacaatgacggcgttgtcaagcgtatgaaaaacggtcagttcgaacgcaattccattggccagccggcaggcgtaatccgcccgggatacccgaaggagttccttgaagagtatgttaagcagacgggagacagatataaaatgcctgaataaaattaggatatttgaacttattcttctacatttgtgtcttacaaaaaagtttatattaacccttaaaataataacagtcttatggaaaatcaggaactgattaagcaggtgactgagaaagccgaaaaatggcttaccccggcatatgatgccgaaactcaggcagaagtgaaacgcatgttggaaaatccagataaaaccgaattgatagacagtttttacaaagacctggagtttggaacgggtggtctgcgtggcatcatgggtgccggtacaaaccgcatgaacatctacaccgtaggtgccgcaacacagggcttgtccaactatctgaacaaatgttttgccggaaagaaggatatttccgttgttgtggggcacgactgccgcaacaatagcgacaagttcgcaaagatttctgccgacatcttctctgcaaacggcatcaaggtatatctttttgatgaccttcgtcctacgcccgaagtttcatttgccattcgccacttcggctgccagagcggtatcaacattacagccagccacaaccccagagaatacaacggctacaaggcttattgggatgatggtgcgcaggtgctcgctccgcacgatacagccatcatagacgaggtgaataaggtgacggtggccgacatcaagttcaacggcaacaaggacttgattcagattatcggcaaggaagtggataaggtttatctggacatggttcactccatttccatcgatcccgaagtcatccgtcgccagaaagacctcagcattgtgtatactccgcttcatggcgcaggccgcgtgctcattccggactcattgaaggagtggggatttgagaatatcaactgcgtgcccgaacagatggtgaaggacggcaatttcccgacagtggtttctccgaatcccgaaaatgccgaagccctttccatggccattgcgctggctaagaagattgacgctgacatcgtgatggcaagtgacccggatgccgaccgtgtcggtatggcctgcaaggacgataagggcgagtgggtgcttatcaatggtaaccagacttgtctcatcttcttgtactacatcatcaagaaccgtattgcaatgggtaagatgcagccgaacgacttcatcgtgaagaccatcgtgaccaccgaactcatcaaggctgtggcagacaagaacaagattgaaatgcgcgactgctacaccggcttcaagtggattgcccgcgaaatccgtctgagtgaaggtaagcagcagtatatcggtggtggtgaagaaagctatggcttcctggccgaagactttgtccgtgataaagacgcggtttctgcctgctctttgctggccgaaatctgtgcttgggccaaagaccagggcaagacactctatgacgtattgatggaaatctatgtagaatatggattctctaaggaaaccaccgtgaacgtggtgaaacccggtaagagtggtgccgaggaaatcaaggcgatgatggataacttccgtgccaatcctccgaaggaaatcggtggttcggctgtcagcctgattaaggattacaagacgctggaactgactgatgcccagggcaacgtaagcaagctggatatgcccgagacatccaatgtacttcaatatttcactgtagacggcacgaagatttctgtccgtccttccggtacggaaccgaagattaagttctatatcgaggtgaagggcgagatgggttgtccgaaatgctatgccagcgccgatgccgaagctgagaagaaagtggaggcagtgcgcaagtcactcggcatttgataggaaagaggaaaaaatgtgtatatagtgttcggagaggcgtaacccgtgagggctgcgcctcttccttttgcttctgtgttgaaagaaaacttaaataaagacttaaacccgatggttgatgaacaaaacgtttgcagggaagtttagtatatgcagattgcggttacacaccgattggttgatgtgaatgagagtcgtttcattcgtagttgttcgtttgtgagtgtgtgttttccgcaatttgcttttttaaatttcttcccccctctttttaattctttaatttttaattgttctccatccaccagtctatcagccttcttgcgatactcagctttcgtggaatttcgggcaggttgtctttggaatagaaggcggcagcggttagctcatcttcctgcagttttatctccccgctttcgtagtcggcaatgaaacccaccatcaatccgctggggtagggccagggctggttgctgaagtaggtgatgttctttaccttcagccccgtttcttcaaaaacttcccgttccacacattcttccagtgtctcgccggcttcgaggaagcctgccaccagtccgtagaaggttcctcggaagttccgggcatgcaccagcaggatttcgtctcctttgcgtatcagtacaatgatggcggtggaaacgggagggtacatctcattgccgcagttgggacacttcttcatgatgggggtctggtgctccatggcggtgccacacacggggcagaagcggctgtgctcgtcccaatagagtatctggaaggcctttcctgcagaacggtactcgtccggcgagatgtagtcgtacgatgcgcgcaggcctatcatgacccattcatcggtttcggccacgggctgttccaaagcaaatgcacgtacttgcttgccgttgggtgggaacacttcgtgtatattacttccggcttccggtgtcagaggaggctctatactgacgggtacgctgtattttatttctcctttgtctgtatatccttttttcagcagcagttggtctttgaagaagacgaaccactgcgtgcagggttggggttctgttgatttttccattgtttgttgttttattatttggggggatgaacaagaaaatacaaaggcacagagattcttttcaaagagataaagcattaatttctatgtctttgtgtctctgtgttcgcccccccctaaatttcgtttgctgtgtctttttcttgccgcacatagaccgttgaccttcccattccgcggcggcgcaggaacccttgccggatgaatttgttcagctcgtctatggcggcatgtctggttagtccgctcaattggatgtattcgttcttgttgatgcatacattctgcttgaggaacagttccagttcggcttttcttgttgcttcggtggtctctactacttttttcgatttcttggtagtggagtgtacacgttccaacgtcattttcttcttgatgttgttgcggaacgtgctgctgatgcgcaggtgcacgttttggaattggacggattcggaacggattttctttttctcatcgtcggtctcgcgcaagcatttcagtgaagtgctgaagaagccgagttctcccagttccacgatgtttccgttggcaaggaggtcgcacaactcgtcaatgcaggcatccaatgctgctcctatcacattcttgggcagatgttggaaagttgcgatatgttccacaaactccttttgggtataagtccttttcgggcagatacgtgcatggagtgatttcttgtcttctttcccgtcgggcgaaggcgtttcgtaaaggtcgtaatacgcgctcataagatatttatttttgtttatagcgataaacagttctcgtcgcttcggggaattatttttgtcgctaagcggattaattttcttcttcctaaaaactaatcgtccgacaactgttgcattatcgtccaacagttgtttaattatcgtccgacagctgtcggatgaaacagaaatgggtatgggacgattatttcttagtgaacaaaggtataaaatattgtgatacgaagagtagtgtttggggaggaaagttttagttttcggcaaaagagggatattgggaatgataattagtttttggaaataaaaaatcccccgttaaggacgagggaacctaatgttttcacaacggaataatccttattgtgacttgcttcattttagtatgacaaatgtataaaataaatatggaaatacaatgcttatattgaaaaaaaaaatacctttgaagaaaatattcaaaatataatactatgagaacgatacttggattggatttgggaaccaatagtataggatgggctgtaataaactctgtaattaaagaacagaccgagagaatttggatagaaatggctggcagtagaataattccgatggatgctgctatcttgggagactttgacaaagggaattctatatcacagacagctgaaagaacccgttttagaggggtgcgtcgattgagagagcgacaattactacgccgtgaacggttgcataaagttttgaagattcttggcttcctgccggaacactatttaaaaggaatagattttgaaaagcatacgggtaaattcttgtcaggcagcgaaccgaaattgccatgggtaaaggatagatggggaaaatactcttttttatttcagacagcgtttaatgaaatgttggcggattttgcaaaacaccaaccttcattggtttttgatggtaaaaaaatcccttatgactggacagtttattatctccgtaagaaagctttgacagaaatgataagtaaagaagaactggcatggattcttttgaactttaatcagaaacgtggttattatcagcttagaggagaagaggaggaagacaatgcaggaaaatctgttgaattttatgcattgaaagtcttgtcggtggaagcgactgatgaaaagaaaggccgggatatatggtataatgtacatctggagaatggatgggtatatcgtagaagcagtaatgtcccattggactgggaaggacgggtaaaagagtttattgtcactactgacttaaatccggacggtactccaaagcttgataagtatggtgaggtgaagcgttctttcagagcgcctaaagaggatgattggatgttaataaagaaaaggaccgaagcggacattaccggtactcataaaacgattgggagttatatatatgatgctttgttgcaggagccacaacaaaagataataggaaaattggtgaaaacagtagaacgaaagttttacaaggaggaactgaactttattttgcagaagcaatgtgcttttcatgcagaattgcaggatagagatttatacatgaggtgtattgaagcgttgtatccgggtaatgaagtgcaacggagaaatatagctaaccgggactttatctatttgttaatagatgatgtcttgttttatcaaaggccgttgaaaaccaaaaagtcattgatagctaattgcccttatgaggaaaatgaatatgtaaaccgcaaaacaggtgaaatcaaaacagctccgttaaagtgtatagccaagtcacatcctctttttcaggaattccgtttatggtatttcctttccaatattcgggtatatcaaaaggaaagggaagtaaatggaactttacatttggatgtggatgtgacaacggagtttttgaaaacagaagatgattatgtggctctatttgattggctgaactctcgaaaggaaatagatcagaaagcttttctgagatatcctgcgtttggactgaaaaaggaaataaataattatcgttggaattatgtcgaggataagttctacccatgtaatgagacgagacatgcgattctttcccgtttggaaaaggccggtattgactttttatctgatgaaaaagaaacagccttgtggcatatcttatattctgtaagtgacaagcaggaaatagagaaagcattggcgacttttgcggttaagaacggattgaatgaatcctttgtggaagtgttcaagaagtttcctcctttcaagtctgaatatggcgcttattctgccaaggcgataaagaagttgttgcctttgatgaggtgcggaaagtattgggatatgtcgttgattgatggtacaaccaaggaaagaatagaaaggataatagcaggtgagtgtgatgagagtataggtgccaaggttagagaaaaggcgatgaacttgtcggatatatcttgttttaagaggcttccgttgtggttggcttgttatgtagtgtataatcgtcattccgaagataaagaaataaccaaatgggaaagccctgctgatattgatgcttatctggctgcttttaagcaacattcactacgaaatcctatcgtagaacaagtgataaccgagacattgagagttgtcagggatatttggaaacaggttgggaaaattgatgaaatccatattgagttagggcgcgagatgaaaaatcctgcggacaagcgaaaaagaatgactactcagattctggagaatgaaaatgccaatttacgtataaaggcattgcttgctgaatttgtgaatccggaatatggggtagagaatgtccgtccctattcaccaagtcaacaagaaatattgcggatttatgaggatgcagttttaaagggggaagaacagattccggaagatatagatgtgatattgaaaaaattcaataccagtaaattaccgacgaaatcagaattcttgcgttataaattatggctggaacagaaatatcgttcaccttataccggtgagctgatacctttggctaaattatttactgctgcgtatgagatagaacatgttatacctcaatcccgctattttgatgattcattctctaacaaagtgatatgtgaatctgctgtgaacaagttgaaagataatcaactgggatatgagtttatcaagaatcatcatggacagaaagtggaagtgggttttggaaagacagtagaaatcttttctgtggatagttacgaacgttttgtaaaagaacaatatgcaaaatcgggcataaaaatgaagaaattgttgatggatgatattcccgagcaatttattgaacgccaattaaacgatagccggtatatcagtaaggttgtcaaaggacttttgtcgaatatcgttcgtgaaaagaatgatagcggtgaatatgaaccggaggctgtttcaaaaaacatattagtttgtacaggaagcgtgacggacaggctgaaaaaggattggggcatgaatgacgtctggaatagtattgtaagtcctcgttttgaacgtttaaatgctttgaccgaaacccagtgttttggacattgggagaataaagacggaaaaaaagtttttcaaacagcagtgccccttgaatatcagaaaggattcagtaagaagcgtatagaccatcggcatcatgctatggatgcaatagtaatagcttgtgctacacggaatcatgtaaactatctgaataatgagtctgcaagccggaatgcgaaaatttcccgttatgatttgcagagactgttgtgtgataagagtaggggggatggtaatggtaattatagatggattataaagaaaccatggactacttttacgcaagatgcaagggaagcgttgagtgggataatagttagcttgaaacagaatttgcgtataataaataaaacaaccaatatctatcaacattttgatgcaaatgggactcgtgtttatgagaaacagaaaatcggtgatagttgggctatccgtaaaccgatgcacaaagatacggtttttggagcggtaaatttaagaaaggtaaaggtggtacgcctatctgtcgctttggatactccttctatgattgttgacaaaagagtaaaaaataaggttcttgaattgttatcatataagtatgataagaagaaaattgaaaaatatttcaaagagaatgctttcttgtggaaagagctggatatagccaaagtcgctgtttattattttacggaaaatactactgaacctttagttgcagtacgtaaatcattggactcaactttcaatgagaagaagatagcatcggtgacggatactggcatacagaaaatactcctgaatcatctgaaatcaaaagaaggaaaggcggagttggctttttctgcagaaggtatagaagaaatgaaccgtaatcttttacaactgaatgatggtaaaggacatcagcctatatataaggtgagggtgtatgaaccgcgtggaaataaatttaaagtcggtgtacttggcaataaaggtgccaaatgggtggaagctgctaaaggtactaacttgttctttgctatttacataacagaagatggaaacagaacgtatgagactattcctttaaattgggttatagagcgtgagaagcaagggcttgttcctgtaccggacagaaatgaaaagggagataaattattgttttggctgtctcctaatgatttggtatatctgccaaccgaagaagagcgggattttggtaggataaatgaaccgatagatagggggaggatttataagatggtttcatcttctggtaatcaatgcttttttatacctcaaagtatatcaaatgctattatttccactaaagaattaggttctaataataaagcagaaaaatcatgggatggtgaaatgataaagaatatttgtattccagtaaaagttgataggttaggccgtattatagaagttaagtatagagtaaatgaataatataaagttgtttcaagagaaaaagatccgttccgtatggaacgaggaagaacagcaatggtatttctctgttgtagatgtagttggtgtattgactgatagtgtgaatcctacggattatctgaagaagatgcgaaaacgggatgaagaactggctacttacctggggacaacttgtccccaggtagaaatggtgacagatacaggaaaaaaacgaaaaacgttggcggcaaatgtgcaggctttattccgtatcattcaatctattccttctcctaaagctgaacctttcaagctttggttagcacaagtaggttatgagcgtgtacaggaaatagaaaatccggaattggctcaagagcgcatgaaagaactatatgagcaaaaaggttatccaaaagattggattgacaaacgtttgagaggaatcgccattcgtcagaatttgacggatgaatggaaagaaaggggaatcacggaaaaaagtgattatgccattcttacggcagaaatatctagagcaacgtttggattgactccttcggattataaaatatataaggggctgacgaagaaaaatcagaatcttcgtgaccacatgtctgatttggagttgatatttacaatgcttggagaacgtgtcacaacggaaatttctcagaaagaaaaaccagatacatttactaaaagtaagcaagtagcacaacgtggaggaaatgtagccggagtagcacgtgaacaagctgaaaaagagttgggtagaagtgttgtttctcctgaaaattttctgttggattctgataaacagaatgatactttagagctttcttttcttgaaaatgatgaatgaataacttgtaaagtctatatgctatgattaagaaaacactttattttgggaatccggtctatttgtctttaaaaaatgcccagttggtgattaaattgccggaggtggtgaagaacagtgctttacccgaagggttcaaacgaatgtccgaagtgactaagccaatagaagatattggagtagtggtgttggacaataagcagataaccattacttcgggagtattggaagctttgcttgagaataattgtgcagtcataacctgcgattctaaaagtatgccggttggtttaatgcttcctttgtatgggaatactacacaaaatgaaaggtttcgtcatcaacttggtgcgtctctaccattgatgaaacaactttggcagcaaacaataaaagccaaaatagagaatcagacggtagtattgcatgaatgtgctggagaagaaataaagtgtatgaaggtgtgggctgcagatgtaaagagtggagattctgataatttggaggctcgtgcagctgcttattattggaagaatttgtttaaaatagaaggctttacaagggatagagaaggtattcctcctaataatttgttaaattatgggtatgctattttgagggcagttgttgctcgtgctttggtgacaagtgggcttctacctactttgggaatacatcatcataatcgttataatgcttattgtctggcagatgatataatggaaccttatcgcccttatgtggataggttggtatatgatatattcaagaaagcagaaccgaattgtgttgaattgacgagagaattgaaagcgaggttactgacaattcctacattagagactgttatttcgggaaaacgtagtccgttgatggtagctgttgggcagactacggcttctctgtataaatgtttcagtggtgagttgcgtaaaatatcctatccagagatgtgatggaccggtttagtgaatatcgcattatgtgggtattagtgttgtttgatttgcctaccgaaaccaagaaggataaaaaggcgtatgcggaatttagaaaaaatctgcaaaaggatggatttacgatgttccagttctctatatatgttcgtcattgtgcgagttgtgagaatgcggaggtacatataaaaagagttaaatctttcttaccggactatggaagtgtcggaattatgtgcattacggacaagcaatttggaaatatagcacttttttatgggaaaaagactgtggatgtgaatacgcctggacaacaattagaattattctaaaaaaatcccgcgcaatggcgggatttttttagaagcagcattctttttttatattctaacactatgtgtaatcgtttgaatattagattgttacttgtaatcagctgtttccaatggttcaaagatactaaaatgaaagcaaatcacaactaattttatatagctatcttgctgatgtctgctgtttccaatggttcaaagatactaaaatgaaagcaaatcacaacgggtgcaaacagcatgcgaaatcacgagacgctgtttccaatggttcaaagatactaaaatgaaagcaaatcacaacgattaacggtgtagggatgagtaaaattcagctgtttccaatggttcaaagatactaaaatgaaagcaaatcacaacacttttagcaatatctatttttatgtttttgctgtttccaatggttcaaagatactaaaatgaaagcaaatcacaacgggttaattaagaaagagtgtacttatcatgctgtttccaatggttcaaagatactaaaatgaaagcaaatcacaacatttgcgacaataaagcattacctttgctgctgtttccaatggttcaaagatactaaaatgaaagcaaatcacaaccgcatagtgatattctcattctttctgaagctgtttccaatggttcaaagatactaaaatgaaagcaaatcacaacacaaacatcgacctcgcagtggtgaagatggctgtttccaatggttcaaagatactaaaatgaaagcaaatcacaacatatcgtcgcaaccgcatttaacgcacggagctgtttccaatggttcaaagatactaaaatgaaagcaaatcacaacgcactgacggtagtagtaaacatattcgctgctgtttccaatggttcaaagatactaaaatgaaagcaaatcacaactgggatatatctatgcctggtgataagtatgctgtttccaatggttcaaagatactaaaatgaaagcaaatcacaacttacctaaggaaaatctaccgcatagtgatgctgtttccaatggttcaaagatactaaaatgaaagcaaatcacaactgattctgaaaattctaaacaagaagcagagctgtttccaatggttcaaagatactaaaatgaaagcaaatcacaaccccgaagggtttccacttaaactaggtggagctgtttccaatggttcaaagatactaaaatgaaagcaaatcacaacctgtttttgccagtgaactccctcattcctgctgtttccaatggttcaaagatactaaaatgaaagcaaatcacaacaatttcagcccgaaagattggcgcaaacgtgctgtttccaatggttcaaagatactaaaatgaaagcaaatcacaacactggtatgcgtgagcttcagaatcatgttgctgtttccaatggttcaaagatactaaaatgaaagcaaatcacaactaaggctgaccttacgcataagcttttgacgctgtttccaatggttcaaagatactaaaatgaaagcaaatcacaacggaaaaggtgtaggtactggttctggccgagctgtttccaatggttcaaagatactaaaatgaaagcaaatcacaacatcgtgagcgtgctcgttctcgtagtattggctgtttccaatggttcaaagatactaaaatgaaagcaaatcacaactgctttttgtttagcattttcagcatcaatgctgtttccaatggttcaaagatactaaaatgaaagcaaatcacaacataacattggcatggaagttcttcctatgagctgtttccaatggttcaaagatactaaaatgaaagcaaatcacaactcagggtaatgttacgggctaaagctgcctgctgtttccaatggttcaaagatactaaaatgaaagcaaatcacaactgaatctgagaagtagattgtctactttgagctgtttccaatggttcaaagatactaaaatgaaagcaaatcacaacgaaccgttacgattataatcgtcttgtcgagctgtttccaatggttcaaagatactaaaatgaaagcaaatcacaacgagaaagggatatcattgcagcgtattatagctgtttccaatggttcaaagatactaaaatgaaagcaaatcacaaccacggtatgccttgctgtaacgtatcaccagctgtttccaatggttcaaagatactaaaatgaaagcaaatcacaacgccttcatggtcgtatctccttcgattattgctgtttccaatggttcaaagatactaaaatgaaagcaaatcacaacacgagcgtatggctatgcagcagcgcgattgctgtttccaatggttcaaagatactaaaatgaaagcaaatcacaacagttcagcatgacatcgtcgatgaataccagctgtttccaatggttcaaagatactaaaatgaaagcaaatcacaacatatcaagggcaacataaacggatataccggctgtttccaatggttcaaagatactaaaatgaaagcaaatcacaactgccgtgagactgtacgatgcggacggcttgctgtttccaatggttcaaagataagcaaatgaaagcaaatcacaacgtgtgtgtgcgtgtctgtgtgtgtatttgttttccaaaaatagtgaatcttaataagaatctctctgatttcgctactatttggtatctttacacacttttctttatacatgagtactgactataaataaatcatattgtggaaatgatccaacgcatccgcctcctcctttccgaaatgaaccggggagtatacgaaaaagaaactgaaataaacctctccctgctggcagctctggcaggcgagagcattctgctcctgggacctccgggagtagccaagtcaatggtagccaggcggctaaagtctgcttttacagatgcccgtgccttcgaatacctgatgtcccgcttctctacgcccgacgagattttcggtcctgtcagcattagccgactgaaagaatccgacaagtacgaacgtgccatcgacggctatctgcccacagccgatgtcgtgtttctggacgaaatatggaaagcaggccctgccatacagaacactctgctaaccgtcatcaacgagaaacttttccgcaacggcgacaaggaactgcatctccccctcaaactgctcgtagccgccagcaacgaactgcccgctcaaggcgagggactagaagccctatgggaccgcttccttatccgcattctctgcacctgcgtcaagcaggaagaatctttctacaaaatgctgctggacgattctgccgaccatccggaaacgactgcttgcgaatggcaaatctccgaccgcgagtatgccgaatggcaagctgagatacgccgcgtaaccttgcctctcgatgttctttcctgcatcacagccattcgccacggactgacaagcgtagagatgcaagactccgacctgcgccgcaatgtctacgtcagcgaccgccgctggaagaacatcgtgaagctgctcaagacctccgccttcgtccacggccgcacggaagtctccatgaccgacctgcttcccgtctaccactgcctatggagtgagcctgatgagagcgttgccatccgtgacatcgttatccgtgccttattcgtgtcccacacaaaacagattgccggtatcgcctcctcgctgaaatccgatttgaaagtcagccgtgtgcgcgaagccctcgacaaagcccgccttgccggcgaccgtagggacgatgacctgctgataacggaacacttctactaccaggtggagaaacatggtacgggcaacacctacatctttatcgtggactacaaaaatctgaaggagtacagcgccaaagatgcccccaccttgggcgtaatgtatgccgaccccatcaatcccaagcgtaccatcatccgcgcctttgccgacaccggcgccgtgaaagaggaaggcaccgaacgcgtcaccctctaccgcgacgacaagcatctctacatcaacggtgtgcgcttccccatgcggcgtctgcaacgaggtgaggagcaacaactctggctgggaaacctctccgtcaccgaccgtgactacgagacggaactggacgccgccgccaccagcatagaccgcctggtaagagatttgtccgacaaccttttcgtctccgaagaagacaaaaagagcgtagctcaatacgtctccatcgtccgcaaggagatagcctgggcgcgtgtggacatgcgcaaactgagatatggagacgaataatcctccagtaaccaagaagaagatgaacaccaccgccacccgatatgacaccgccttctatgtgcaggcactggaccgttttgtagccaccggagagtgtgctgagacggataccgagcccttgtatgcctatctgctctccgtgatgaacgactccatggtcaaggtgcaggtgctgggcgatgaggtctgtgcacgtatcttttacgacaccatgattcagttcatccaattgaacttggagaaggagaggtaccacctccggaaaagccagtcggaacggaccgggatgaaactcgtgctggaatggtccatggcaaagcggaaagacggctggcaagccttgctccagcagatttccgacaaataccgggagtacggcttcgactcccgtttctaccgcagccacttcggtacagaaggaggatatgcggacgatgaagtctgggagaaaatggtggacgactgggaagacgccttccaactgaagatgcacgaagaaaaggagaaagagattgctttccgcaaagatgccctcgagcgcaggctccgttccaatctgaaagacatccccgagtacatccgccagaaccgggtggataaggacgaattcttccagacctggggcatgatgagcggcttgtggaatactgtcgactttgagcgtatacggaaaatcgtgcgcatccagcgctcttgccccgagatagtgaaagtagcccgcaagatggggcgtatggcagacgacgaaggacgtgagcaaatccgcgttgccgaaggaaacgtctacaaaatggagcactcctccaaatgtgacatcctgggtatcagtaccggcaacgacctcaataccctgcttcccattgagcttgcccattccgctgacagtgaactggaagatttgttcgtctacaaataccttactcgcaagctccagaccttccgttataaatcggaaatcatgcagcctgcccggcgcatcgaaaccaagcctgcccgtcccaaaggtccgatgattgtctgtctggacacctcgggaagcatggctggcaagccggagaagattgcccactctctgctgataaagctcctggagatagccgaccgtcaacggcggaactgctttctgatagccttttccgtctccatccatccgattgacgtaaggaaagagcgggcaaggctgctcgaattcttctcaaagacagcttgcggggatacagatgccacccgcatgctggaagccacgttccacctgctcaaagaaggcaaggagtatatgaatgccgatgtgctttgggtcagcgatttcaagattcctcactcttcacctgcctttatggaggagattcgtcgctgtcgggaagccggtacacacttctacggtctgcagattggcatcacggacaatgagtgggcaccattcttcgaccatatctatcgagtagaatatactccttcgcaacagtattaaaagttgatatttacacctcccatcaccgtggctttcggcatggggaagcctgcattgatttcatagcgttgtgccagcaggttttcacccttgacaaagacgtcggcaaaactgcacagacggtagttggcacgcaggttccagagtacgaagctttcctgcttctccttgcccggggtgactgaggtatgaagccccttcacgtattgtataccggtagacagactccagcgtccttgcgtaaagtccgcaccggcataaagtttgtgctcgggagcagccagtaccggattctccatgtgcagccagctgtagttggcgtttatctgccagtggcggttgatgtggtagccgaggttggtttccacgccccagttctctatctctccggagttgacgttcttgcgcagggcagggtccgtcatgatgatgttgtccccgttgatgtagtagaggttcaccccataggacatggcccctcccaaaagctgctccgtaaaggagagttcatagttcatcaggctctccgctttcaaatcggggttctgtggagggaacatgtacatctcccggatggtggggttacggaatcctttgctcaccattgctttcagttctgcctgccgcggcagatggaaagccagtcccccttggggaatccattccgtgcccacgtgcgaatggtggtctatgcggacaccggcgtccagtgaaagccaactgttgatgtcctgcctgaaatccacatagcctgcaaattcatccatctgcttgtccacgccggggatgcggtcaccaatctgctgtccgggttttgcctcgtcgatggcgacaaccttgttccaggactctccgccgaagtgctggtaatcgaaacctacggtcaggcggttgccggtgaagagcgtggcgctttgataccacgatatgcccagcatccggtccttggagttgaagtgcgacttctggggctctcctccgggatggtagccgtcattaatcctgtgccggccccagttgtagaagaagctcacggcgccggaagtgcggtcgtaacgattttccagtgcgaaggaggtcatgccgcgtgtgatgcgcgagtcgttgtctatatacggattgtcggcttcgccgggattggaggcgttgaagcgggtgatgttcacgtcgccccacagcttccaggtgtcgctgaagtcgtatcccagtttggcatatccgccatactgctcaaactccatgtcgtcacggtgtccgtcggtacggttgtacgagccggtcaccacgctgctgaaacgccctttcctcacgcggttggagacttccgtctgcagggtattgtaggaaccgtatcctatctgcgcattggttttcaccccgtcctcctgcatcttgcgggtgacgatgttgataaccccgcccattgcattggacccatagaggacggaggcgggaccgcgcagcacttccacccgttcggccatcatgctctggtaggcgtcggcgatgggatgccccatcaggcccatgtattgcggatgtccgtctatcagcaccagcaggctggttgtaggtcctccggctgcgtttactccggcgcctataccgcgcaggctcatgcctcctgcggctcccgtggatacgccgtagcccatgatgccgcggcttgtggtgaaaagtccaggcacctgctcggtcagtgcaggcaggatggagggctggtaggtctgttccagttgctggcggcccactacggagatggtcattggcaggtggcggatgtctgtttcatttcttgtcccggtcaccacgacttcatcaagcttgtagcttttcagccggaggctgtcggcaggtgcggacagcatactacccggaagggcgatacttattaaaattgcggttaaaatctttttattcatcgtttatctatggttctttttgcaaagttatacaaaaagaagaatctgtatatgattggtaatccttaaaatggacaaccagggttgaagataagtccgttaaagggtttcctgcttcagcgcttccacaaatcggtctatctcctgcagtttcgccgggat

SEQ ID NO: 1246 - DNA, 24188 bp, synthetic construct
  misc_feature 1..24188: note = Synthetic
  source 1..24188: mol_type = other DNA
aaagcaaattcgtaggcgtcgatggccttgtccagttcttcccgttgcaagtacaagtctgcaaggtcttcccacagttggggagagtggggggcttcgttaagttgttgttctaagattttgatagtatcttttgttttcatgcgcagattggtttgaagtgtcttctccatgccgggccgacacggatagtcttgtgcgtgtcggcccgtgtgggtgagaccttccaccttctaaaaatgtgaaatggttttttatttgttcatcttgctccaggtgtctttcagagacacggtgcggttgaatatcaaatgtgcgggtgtggagtctttgtcgggggtgaagtagccgatgcgttggaattgcaggtagtcgagcggctttttcgtggcgacgtatttctctacataacagttggtcaacacggtgagcgattcgggattcatcatttccttcatggcttccagtgccgagcagtttttcgcttcgcggatggcagccagctcgtcgcgcgggttgtcccccttccacaagcggtcgtagaggcggacctcggccggcaggcagtgtgcacagctcacccagtggagcgtacctttcaccttacggttgctttcgggcatgccgctcttggtctgcgggtcgtattcgcagtagatttcctcgatttcgcctgtttcgtttttcttgcatccggtgcacttcacgatataggcgtttttcaggcgcacttcctgccccggtgtcatgcggaaatatttcttgggagcattctccatgaaatcttctcgctccatccatagttcacggctgaactcgatggtgtgtgtgggtgagttcgggtcttccggattgtcgattgcttccatttcttccacttgcccttccggatagttggtgatgatgagcttcacggggttgatgacggccgacacgcgggtggagcgtgcatttaagtcttcgcgcacggcgctttccagcagtgcaaagtcgttgagcgcatcataggtggtgtagccgattttatcgacgaagttacggatggattcgggcgaatagccgcggcggcggaatccgcagagggtcggcatgcgggggtcgtcccacccgttgaccaaaccttccttcacgagtgtgagcaggttgcgtttgctcatgagggtatagtttaggttcagtttgttgaattccgtttggcgcgggcggttgtcgtccaagtcttttccttccttcagccagtcgatgaacaggtcatagagcgggcggtgcggcacgaactccagtgtgcagagtgagtgggtgacgccttcaaagaagtcgctttgcccgtgggcgaagtcgtacatcgggtatgctttccacttgtcgcccgtgcggtggtgtggagtcttcacgatgcggtagatgatggggtcgcggaaatgcatgttcgggctggccatgtcgatttttgcacggagcaccatggagccttcttccagttcgccgctgttcattttctcaaacagggctaggctttcttccacaggccggttgcggtaggggctttccacgcccggttgggtgggagtgcctttctgctggctgatgatctcggccgattgttcatccacgtaggccttgccttcttttatcaggcgcacggcgaagtcccagagttgctggaagtagtcggaagcgtagtattcatgtccccattggaaacccagccattggatgtcttccttgatggcgtctacatattcggtgtcttctttcgtcgggttggtgtcatcgaaacggaggttgcacacgccgccgtgtttggctgcaatgccgaagtcaaggcagatggccttggcatggccgatgtgcagatagccgttcggctctggcgggaagcgagtctgcactcttcctccgttcttgccttcttgcaagtctttttcaaccatttgctcgatgaagttcaagctctttttttccacagtttcaggcgttttttcactcatagtaaagtctttattgttttaattgccagcaaaagtaatgattcttttttgtttgtagtttatccatgtctgaataaatggccgcggactgcgattttttgccggaagtcttttctcgaatacggtcatttagaaagatttaaagacctctgacgttaccttggagtcggtggccgggcggaaaggagtccgtggtcgggcggattcctttccgtggtcggctaccttcctttccgctcccgggagctgtttagggcagaaaaagggactttcctcttggtgacaaccggggaacacggagaccggatgtggcccgtttctcccgatgggttgggatgtctttgttttctttgactttcgcttgtgtgtcgaatggaaaattttgactttcgacgcgaaagtaagtaatgttttttcggatactcgtttgggccgggcagtttttgccggcagattttgcagattttggacgcatttgggcgtcgaattgttaaaacgacacttattcggcaaaaacatgttttttaacatgaaaatatatttgcacagtctaaaaaaagggcgttcctttgcagcgttatcctgaaaacaatctttttaccttaaaaaaactaatacctattgaaaacttaagacgggcgctttgggaaaagcgcccgtcttttttgctttcgtttcgtttggatttgacgggttcttgaaagctctttcgtttgcttcccggaaaagtctgttaattcattttggcagatttcatatcgtatccggtacaaggaagtcattctgacaagtgtgttgtctacattttctctttatgttatttatgcttaatctgacaccgttttttacattaaattagcgccgaacgattacttttgtcaattcatacttttagcttaatcggaaagcaatgaagcaatggaaatatcggataagcatgcttatgctgctgctttgttcctttgtttgtgcggtagcacagattcggggcgtggtgactgactctgtgagccgggagcgcctgccgtatgtttccatatcttataataataaaggtatagggcataccgacaacaatggtgacttctacatccggattccggacgactgccgcacgctgactttttcttctgtgggctataagacccgaacggtgaccatcgagccggggacgaagaaaaaacttcaagtcagcctcgtgcccgacaacattgtcctcgacgagatggtggtgcgtccacgccgggaacgataccggaagaaagacaatccggccgtcatcatgatgcggaaagtgattgcggcaaaacgccggaaccgtttggaagataatgactattaccgttaccacaaatatgaaaagttgaacattgccctcgacgacatcaaccccgtctcgctcaacaagggagtgctgaagaagatgcctttcctgctcgaccaactggaagtggacacggcaaacaacatgctggtgcttcccgtgtcggtgaaagaaacttcttcggaggtgctctatcgcaaacagccccagcggaagaagactttcgtggaaggaatgcgctcttcggggcttgacgaccttttccacatgggcgacgtggtcgacggaatgctgcaagacgcatttgccgacgtcgacatttacgacaacaacatctacctcctgcgtaagaagtttgtcagtcccatatccgacagggccatttccttttataaatactacatcatggacaccgtttacgtggaccgcgagaagtgtttccatctgacgttcgtcccctacaactcccaggatttcggttttacgggacatctttacgtgatggccgattcttcctacgccgtgcgccgttgcacgatgaacctgccgcagcatacgggtgtgaatttcatcgaggaactgtcgctcacgcaagacttcgagcagatgcccaacggcgattggggactggctgtggacgacatgacgaccaagatatatcccttcaaaaacttgcaaggagccgttgtccgacggctgacgcgctactccgatttctccttcgcccccatcccggacgacgatttcggcaatgcccgactggtggaaacgcgcccggatgcctacttgaagacgcctgccttctggcaagatgcacgctcgcttccgctcacgcagaaggaggccgagatgggcgatttcgtgaaaaacgtgcagaagacgccgggggcgaagtatgtcatctggttgctgcgcctgtttgccgaaaactatgtggagaccaccaaggaagacaagccgagcaagttcgacatcgggccgctcagtacggtggtatcgagcaactatgtcgacggccttcgcttgcgtctcggcggttcgacgacggctaacctcaacccgcacctgtttttcaagggttattacgcctacggcttcaaggacaaacgttcgaagtacatgggcgagctggaatattcgtttgaaaagaaggcctatatgcctttcgagtttccccgccattcggtggccgtgtcgtaccagtcggatgtgatgtcgcccctcgacaaattcctgacaatggacaaggacaacatgtttggttcgctgaagaccacgaccgtcgaccagatgatgtatttccgcaaactgacgctgcgctatgaatacgagtcgttcagcggcttttctaccaaacttgagcttcgacacaacgaggaagagcccacgggcaaattgcaatatatccgtgccgacggcgcggccacacccacgtttgtccaccgcctgaccacagccgaggcagctctcaccctgcgctatgccccgcacgagacgtatatcaacaccaagcagtcgcgccgcccggtcaaccgcaacgcacccgtcttcacgctgggacacaccgtggggctgaagggactgatgggaagcgactattcctatcacctgaccgaagcctctttcttcaaacgcctgtggctttcttcctggggcaagatggacatcacgctgaaagccggcgcgcagtggaacaaagtgcccttcccgttgctgctcatgccgccctccaactcctcgtacttcctgcaacggggcagtttcaacatgctcaccaacatggagtttctcaacgaccgttacgcctctatcgacgtggactacgacatgaacggcaagctgctcaaccgcatccccttcctgcggcgcctgaagtggcgcgagcatttcggcgtgaaagccttctatgggacgctgaccgacaagaacaatccctacttgcaacacgacggcgacctctacctcttccccacacgcgacggcgagccctcgagcttcatcatggagcgcggcaagccctacgtggagctgatggtgggcgtgcacaacatattccgcatcttgcaggtcgactacgtgcgccgcttgaactacctcgaccaccccggcgtgcacaagcatggcgtgaggctggcactgaaactgactttttgagactgtatatataataaggtataggagacaatacgacatatggcacaaccattggcagaacgcatgcgtccaaaaacactggacgagtatattgggcagaaacatctcgtcgggccgggagccgtcttacgcaagatgatagactccggccgcatcccctccttcatcctttgggggccgcccggagtgggaaaaaccacattggcacaaatcatcgcccaccggctggagacgcctttctacacgctgagcgccgtgacttccggcgtgaaggacgtccgcgaggtgattgaacgcgcgcgcagcggccgcttcttctcgcaagccagccccatcttgttcatcgacgaaatacaccgtttcagcaagtcgcagcaagactcgctgctgggagccgtggagacgggagtcatcacgttgattggggccactacggaaaacccctcgtttgaagtcatccgccccctgctctcgcgctgccagctctacgtgctgaagtcgctggagaaagacgacctgctcgaactgctccagcgcgccgtggcaaacgacgtggaactcgccaagcggcacatcgaactccgtgagaccgacgccatgctccgctattcgggcggagacgcacgcaagttgctcaacatcctggagctggtggtcgaggccgactccgacgagacggtcgtcgtcaccgacgtgaaagtcgtcgagcgcctgcaacaaaaccccctcgcttacgacaaggacggcgagatgcactacgacatcatctcggcctacatcaagtctattcgaggcagtgaccccgacggcgccctctactggctggcccgcatgatagagggaggggaagaccccgcgttcattgcccgccgcctgctcatctcggccgccgaagacatcgggctggccaaccccaacgcccttctgctggccaacgccgcctttgaagccgtgatgaagattggctggcccgaagggcgcattcccctggccgaagtcaccgtctacctggctacaagccctaaaagcaattccgcctacgagggtatcggccgggcccaggaactggtgcgccagacgggaaaccagcctgtccccctccatctgcgcaatgcccccacgaagctcatgaagcagttgggctacgggaaggactacaagtatgcccacgactacgccggccacttcgtccgccagcaattcctgcccgacgaattgaaggacgtccgcctctggcatccgcaggaaaacgccgccgaagcccgcctgaaagagcgcatggaggccctctggggcgaccgcttcaaggactgacgccggcatgccctctgcccgcggtaaggcagcggaaaaaagatagtcgtgtttttgcaggccgcagagcctgtttgttagactattgattatcaatctaaaacaaaaataagcctccgttcagggggcaactttggaaaaatatgaatattgtagtattagacggatattgcctcaacccgggcgatttgtcatggaaagggtttgaagagttgggcacgtgcacggtctacgaccgcacgaagcccggagaagtgttggaacgggcgaaagacgccgaagtcttgctcacaaataagaccgtgctcgacgccgcgacgctggaacagttgccccggctgcgctacatcggcgtgttggccacgggctacaacgtggtcgacgtgcgtgcggcccgcgaacggggcgtggtggtgaccaacattccggcatacagcacggagtcggtcgtgcagacggtctttgctcacatcttgaacatttactatgccgtgggccgctacacggcgcaggctcgcgagggcgtgtggcagtccaagggcgatttctgctattgggatacgcccctcatggagctttccggcaagcgcatcggcatcgtgggcatgggcaacatcgggcgggccgtggcccgcgtggctaaggctttcgggatgaccatctatgcctgcacgtcggccactatcgcacagcttccggcaggcacggtgaaggccgacctggagacgctcttccgcgagtgcgacatcgtcacgctccactgcccgctgcgcgacaacaacgcgggaatggtcaatgctgccctgctcggcctgatgaaaccgacggccatcctcatcaacacggcccgcggggcgctcgtcaacgagcaggacttggccgacgcgctgaacgccggaaagctgtatgccgccgggctcgacgtgctttcttccgagcctccccgggccgacaacccgctcctctcggcgcggggctgcttcatcacgccccacattgcctgggccacgaccgacgcgcgcgaacgtctcatggcgcaagccgtggcaaacctgcggctgtttctcaaaggcactcccgtgaatgttgtcaattaatctccatctaaaaacgactggttatgcatacatttaccatccacatgcccacgtttgtccaggtcatcgagtttgccgggacgtttgctttcgccatcagtggcatccgcctggcttcggccaagcatttcgattggttcggggcctacgtcgtgggcgtggcgacggccatcggagggggaaccatacgcgacttgatgctcaacctgaccccgttttggatgaccaatccggtctatctcatctgctcggccctggccttggtcggcgtcattctgttcggcaagttcctgatacgccagcaaaacacgtttttccttttcgacgccatcggcttggcccttttcaccgtcgtgggtgtggagaagacgctggcgctcggcttcccgctgtgggtggccatcatcatgggcacgataaccggtgcggcaggcggtgtcatccgcgatgtgttcatcaatgaagtcccccttattttccgcaaggagatatatgccattgcttgtgtgataggcggtttggtctacggcctctgccgctgggcggggatggacctgacgctgaccgagatcgtgagcggcgtgagtgtgctcctggcgcgcatcctggccgtgaaataccattgggctttgcccgtgttgaagggagacaatgcgccgtcgggcaagtaacattcattttatgggcgtatgaaaaacaacttgctgagcgaacatttggtgtataatggtgagagccgcacaccgactcacttccacttgtgcagttacggggcgaaaggctgcgaagaggttgcaggcgaggattttgacgaactcgccgcgcaactcttgccgggccggatacactggttgcagatacacgggctgaaagatacggactccgtgcgccgggtctgctcgtacttccagatagatttcctgacaatgcaagacatcctgaacgccgcccaccccagcaagatagaagcctgcgggacatacaatgtggtgataggcaagatttccgaaatcccggaagatgccacggctggcatccggcagatacacgtctgcttgttgcagggcaaagatttcgtgctcacgtttatggaagaagaaagcacttttttccaagacgtggagcaggccatccggggcaacatcttgaaaatacgcgaacgccacagcgactttcttctcagtgtgttgctcaacggcttggtgggcaactgcatgtcggtcgtgtcgcgcatagacgatgcgctggaagacctggagagcgcgctttttgacaacgccccgagcctcgacgccggcatccgcatacgtctgctgcgcaagcaatatctgttgatgaaacagacggtttatccgctgaaagaccagtatgccaagttgcttcgtcccgactctccgggcttgatacagaagtccaaccgcgcttttttcagtgatgtgaacgaccatttgctctacgccgcccagaccatcgacagttgccgcgagacgctttcttctctcatggacctctacatctccaacaacgacctgcgcatgaacgacatcatgacccgcctgacggttgtgtctaccatattcatccccctgacgtttctggccggtgtctgggggatgaacttcaagtggatgcccgagctcgattggcgctacggatatttgtttgcatgggggcttatgctggtgcttggcgtcgcggtgtatgtttatttgaagaagaaaaagtggccatagccgggaggcggcattcttgtttcaggtcgttttcctccaagaaatctttctatgaaacttacctgcggtgctcgggcggcttcccatctgttcatggacggatgggggaaggtaagctcggctactgttaaggcttctccgacgggacttttctccagccattggggatgacagggtggagaaaaggcagggacgaatcttccggaagcggcgtgcaggggaagataaaaaaaatcccccgttaaggacgagggaacctaatgttttcacaacggaataatccttattgtgactcacttcaaattagtgggtacaaatttaagaataaaaccttaaagggcaaacgatttagaaaaaaatggttagctttgggaaaaataatggattatggttatgaaacacattttagggctcgacctgggaacaaacagcataggttgggctgtgattaatgctttggaaaacgaagacgggagagaaacgttggaaaagattctttgtgccggcagtcggataatcccgatggatgcagccgttttgggcgattttgacaaaggaaacacaaagtcgcaaacagccgaccgaacaatgaagcggatggcacgcaggctctacgaacgcaaccatttgcgccgtgagcgcttgattcgggtattgtctgttctgggcttcctgccggaacattatgccgctcagaccgaccgttacgggaagttcataaaccacggcgagccgaaactgccgtgggcgacagacgcacaggggcgtcccgtcttcctgtttaaagaatcgtttgacgaaatgctggccgacttccgccaaaattggcccgacttcttcactgcttcccggaaggtaccttatgactggacaatatattatttgcgcaaaaaagcgctgacccggaaaatcgagaaggaggaattggcctgggtgcttctgaacttcaaccagaagcggggatactaccagttgcgcgaggaaccggaacaggagaaaccatccaagaccaggcaatatttcgacagccaggttgttgtggaaattatagatacgggtcaactatacaaaggtatgaaagtgttgatcgtcgtgctggaaaatggtacgaagggcaagatattcaagaaagacaagccggagtgggtagggcaaaagaaagacgtcatcgtggttgtcgacctcgacaagaacggccaagacaaatatgatgagaacggagaactctgtgcccgctttaaagtgccgacggagcaggagtgggaaacacagtggaagctggtaaaggcaaagacggagaacgatttgactggttcgggcaagactgtcggggaatatatctacgacacacttttacagatgcccggacagaaaatccgcggaaagctggtgcgcacgatagagcgcaagtattataaggatgaacttcgcaggattctgaagaagcagcaggagtttcatcctgaatttcaagaccgtgcactctacaaagcctgcattgatgcgctctatccgcagaacgacgcccaccgcaatttgataagcacgcgcgatttggcctatttgttgctcgacgacattttgttctatcaacgcccgttgaagagcaagaaggcgttgattgccaactgcccctatgaaacgcatgattgtataaacagggagacgggcgaggtgaagccttatcgtttgaagtgcatagccaaatcgcatccgttgtttcaagagtttcgcctgtggcaattcctttccaatctgcgcatttaccaaaaagaaaaagtggtggatgggaaaatatgttttgatgtagatgttacggccgagtttctgaaaggagaagacgattatgtcggtcttttcgactggttgaccggccaggaaagcatcaagcaagataccttctttaaatatccgccgtttggcatgacaaaggatgcggccaaaaacttccgttggaattatgtggaagacaagatttatccgtgtaatgaaactcgtgccctcatactgaagcgtttggaaaaagttggtgtggatgcaggcttcctgaccggagaaatggagcaagccttgtggcatatcttgtattccatttccgacaaacaagaactccggacggctttgggtacatttgccggcaagcacggactcgacgacaggtttgtcgaggcattccaaaacatgcctccttttgagaaggaatatggtgcttattcggccaaagccatcaagaaattgcttcctttgatgcggatgggcaaatattggtcggaaaaagacattgacgcccatacgtatgaacgcattgcgaaaatcatgtcgggcgagtgtgacgacaacatccgccagcgggtgagggaaaaggccattcacttgaaagacgtgcattctttccgcgggcttcctctttggttggcctgttatgtggtctacgacaggcattccgaggcaaaagacatgcagaaatggaaacaaccttcagacatagatacttatttggctgggttcaggcaacattcgttgcacaacccgatagtggaacaggtcattctggaaacactgcgcacagtgcgcgacatctggaaacaggtgggacacattgatgagatacatgtggagctgggccgtgaaatgaaaagccccaagaataagcgggagatgatgacacggcagatgctggaaaacgaaaacaccaatatccgcattaaagccatgcttatggagtttatgaatccggagtttaacgtggaaaatgtgcgcccctattctcctgcccagcaagacttgttgcggatttacgaagaaggcgtgtggaacagtgtggacaatatacctgatgatatacgtattataatcaaccgattaagtgaaagcgagactcacaagcgcccgactacggcggaagtgctgcgctataaactatggctggagcagaagtatcgttctccctataccggcgaaatgataccattgggtaaattgtttacgccggcctacgagatagaacacatcatcccacaggcgcgttatttcgacgattcgtttagcaacaaagtgatttgcgagtcagaggtgaataagcttaaaagcaacatgctggggcatgagtttataagcaagcaccgtggagagaaggtgcctttgtcgggcggcggatgtgtgaatattttctctgttgccgattatgagaagtttgtgaaagacaattatgccaagagcatcgtcaagcagagaaagctgctcatggacgacatcccggaacaatttattgctcgccagttgaacgacagccgatatatcagcagagtagtcaagtcgttgctttccaacattgtgcgggaagaaagcgaacaggaagaagtttcgaagaacctgattgtgtgcacgggaggcgtcacagaccgtttgaaaaaagactggggcatcaacgacgtgtggaacaagattatcctcccacgtttccttcgtatgaacgaaataacgggaactgattcgtttacggcacccaacacaaacgggaggttgattcctgccatgccattggagttgcagaagggattcaacaagaagcgtatagaccatcgacatcatgcaatggacgccatcgtcatagcttgtgcaaaccgcaacattgtgaactatttgaacaatgagtcggcaagcaagaacgctaaaatagcccgctacgacttgcaacgcttgctatgcgacaagcagaagaccgacgagcagggcaactatcgttggcttatcagaaagccgtggcccacattcacgcaagatgtgtatgccactctgcaaaacatcattgtaagtttcaaacagaatctgagagtcatcaacaagacagtgaactattatcaacgttatgtggatggcaagaagaagttcgtgttgcaggaaaaaggtgacagttgggccatccgtaaatctatgcacaaagatacgttttatggagaagtgaatctacgtatgacgaaaacgatttcattgaaagaagcactgaagaatccgaagtccattgtagagaaagacctgaagaagaaaatccaggaactgctttcgcataagcagaacgaaaaacagataagggcttattttgaagcaaataaagatgcttggcaagatgttgatttgaagaaaataaaggtctattattttgcttcggaaacgaaagaccgctattatgcttcccgcaaacctttggatgacagctttgatgaaaagaagattcggagtgtgacagatgtgggcattcagaaaatcttgctgcgtcatttggaaaacaatggaaatgatgcaaagttggctttctcgcctgaaggaatcgaacggttgaatgagaacattgcaatgttgaacggtggaaaataccattatcccatttataaagtgaggacatatgagaaggccgacaaatttgccgtaggccggacgggaaataagatatccaaatatgtagaggccgacaaaggtacaaatctcttctttgctgtttatgaaaccgagggtgtggacaaggtgacaggggagaacgtgaggaaaaggagttatgcaacagtgcctttaaatgtcgtgatagaacgtcagaaatgtggattgccatcggctccggaagatgagaatggaatcccgccacggtttgtgctttctcccaacgatttggtgtatgtcccgacggcagaagaattggaaagtggtcacataacttatccgttggagcgaacacgcatctataagatggttagttgtacgggaaatgaagtacattttattcctgcatttgtgtcaaatccaattttacaagtaaaagagttgggtagtaataacaagtcacaacgtgcctggtctggagaaatgataaaggaaatctgcatgcctctgaaagttgaccgattgggaaatgtgatacagccattatgataaagaaaacactttatttcggaaatcctgcgtatttgtctttgcgcaatgcccagcttgtcataaaacttccggaagtggagaaaaattcttcacttccggaacagatgcggcaacaggcggaagtgacaaggcctatcgaagatttgggagtggtggtgttggacaataaacaaatcacaatcacttcaggtgcgatggaggctttgttggaaaataattgtgcactcataacgtgcgatagtaagagcatgcctgtcggattgatgcttccactttatggtaataccacacaaaatgaacgcttccgtaaacagttggacgcttctttgcctctaaagaaacaactttggcagcaaacaattcaagcgaagataaacaaccaagctgccgtgttggctgcatgtacgcagggagaagtcagatgtatgcatgtctgggctaatgatgtgcgcagtggcgacccggacaacctggaagcacgagctgccgcttattattggaaaaatttgtttgctgaagtcgaaggttttacaagagaccgagatggcattcctcccaataatttgttaaactatggctatgccatactgagggctgtggtagcccgtggcctggttgccagtggcttgttgccgacgttaggtttccatcatcacaatcgttacaacgcctattgtttggccgatgatgttatggaaccttaccggccttatgtagatgaactagtctataagttgtataagcaatatggtgaacatgtaactttgaccaaagatataaagttttctttgctttccataccaacacttgaagtgcgcataggaggaaagcgtagtccgcttatggttgcagtgggacagaccacagcttctttgtataaatgtttttcaggtgaagcccgtcgaatcctttatccggcgtattaatggatcgctttagtgaatatagagtcatgtggatattggttctttttgatttgccgacagagaccaaaaaggataagaaagcttatgctgaatttcgtagaaatttgcaacgcgatggttttaccatgtttcagttttccatatatgtccgccattgtgccagtagtgaaaatgcggcagtacatataaagagagtgaaatcttttttaccggagtatgggcaagtggggataatgtgtatcactgataaacaatttgggcagatagaactgttttatggcaaaaagcctcagggagtaaaaactccggggcaacagttggaactcttttagttttaatcgttcgtttaatcatatagaaagtacaataacttaaatgtcttataatcaataacgataataatcgcaggtctcgtgggttaatgactgcgattgtgacatcctcacaatcgcgattataaggtagagtgaatcgcaatcgtgaacctttcatattcgcgattgttaggtcctgacaatagacatcctatatattgttgattgcctgaatgttgtgtttgctctcgtgggtttgtgcaataaatttctttaatgtgaagttgagtaaatgagagctatttcagcaataggctaagacgcaaaatatacaatatcttttctaagtatttttataatatggatattaggtatagaaagaataaatcccgtttctaaaacgggatttatcatagaaaacaagcttttttttattttctgtgatattatataattcattgattataaatgaataatgcatattgcgttgtttcctatggctcaaagatactaatttgaaagcgaatcacaacccggttgtgtatggctcttagctggcttgggttgtttcctatggctcaaagatactaatttgaaagcgaatcacaacaagttaaacaaaagtttgaaagagttcttagttgtttcctatggctcaaagatactaatttgaaagcgaatcacaacgcgttcacgttggtcttgattgacggccgcgttgtttcctatggctcaaagatactaatttgaaagcgaatcacaactcgtcgaaacattgaaggcatccgtaacgggttgtttcctatggctcaaagatactaatttgaaagcgaatcacaacttaccaagtagttctgaacgtgattttttagttgtttcctatggctcaaagatactaatttgaaagcgaatcacaaccgtgttgttgatattgattatcgtcatcgtgttgtttcctatggctcaaagatactaatttgaaagcgaatcacaacaggacttctcggattgccttaataaaacggttgtttcctatggctcaaagatactaatttgaaagcgaatcacaacctagagagaatgttatatttcttccatctggttgtttcctatggctcaaagatactaatttgaaagcgaatcacaaccactgtttcgttggctacttttgtttgtggttgtttcctatggctcaaagatactaatttgaaagcgaatcacaactcttgtcatagatatatgaccgcacgcgggttgtttcctatggctcaaagatactaatttgaaagcgaatcacaacgatattacggaaggtttcgaaaatatacctgttgtttcctatggctcaaagatactaatttgaaagtgaatcacaacgacaaagaccattaggtgcaggaaagtaagttgttttctatggcttaaagatactaatttgaaagcgaatcacaactccgctggcggatatgtttaagggtacgttgttgtttcctatggttcaaaaattaattgaaagcaggttgtatgataaaaaatagactccccgtagctatggaagctgcagggagtccttattttattaagtaatcaattacttgttcaatgcagtagccacatcaacggcacaagccactgtgcatcctaccatcgggttgttaccgatacccaggaagcccatcatttccacgtgagcgggaactgatgaagagcctgcgaattgagcatcgctgtgcatacggcccatcgtgtcggtcataccgtaagaagcaggaccggctgccatgttgtccgggtgaagtgtacggcccgtaccgccaccagatgctactgagaaataaggcttgccggcgaggatacgctctttcttgtaagttccggcaaccgggtgttggaagcgggtcgggttggtagagttaccagtgatggacacgtctacaccttctttccacatgatggcaacaccttcgcgtacgtcgttggcaccgtagcattttactttagcacgcgggccgtcagagtaggcaatttcttctattactttcagttcgccggtgaagtagtcgaaatcagttttcacgtaagtgaaaccgttgatacgagaaatgatttgtgcggcgtctttgcccaaaccgttcaagatgcaacgcaaaggctctttacgcactttgtctgctttggctgcaatcttgatggctccttcagcggcagcaaacgactcgtggcctgccaggaaagcgaagcacttggtttcttcgcggagcagcatggcagccaggttgccgtggccgatacctactttgcggtcgtcggcaacagagcccgggatgcagaatgattgcaaaccgatgccgatggcctcggcagcttcggcggcagtcttgcagccttttttcaatgcgatggcagtgcctaccacgtaagcccattttgcgttttcgaagcagataggctgagtttcttcacaagttttataaggatcaagaccatattgttcgcagatagcatttgcttcttcgatgtctttgataccgttttcgttcaatgcagcaagaatctgtttgatacggcgatcttggctttcaaattttacttctctaatcattgtgtctatcctccttatattattcgtgacgtggatcaatatgttttactgcaccctgttcggcagtgaagcgtccgtatgtgccggttactttcttcagtgcctcgttagcatctgttccttttttgatttcgtccatgaatttgcccaggtgaacgaactcgtagccacagatttcgtcgttcttgtccaaagcgatggtcttgatatagccttcggccatttctaaatagcgagaacctttggctttcgttccatacaatgtacctacttggctacgcaagcctttgcccaagtcttccagacctgcaccaatcatcaagccgccttcggagaaagcagattgtgtacgtccgtaaacgatttggaggaacaactcacgcatagctgtattgatggcatcgcaaacgaggtcggtgttcaatgcttcgaggatggttttgcccggaaggatttctgaagccatggcagcggagtgtgtcatgccggagcaaccgatggtttcaaccaggcactcttcgataacaccgttcttaacgttcaaagtcagtttacaagcgccttgttggggagcacaccaacccacaccgtgtgttaaacctgaaatatctacaatttctttagcttttacccattttccttcttcaggaataggagccggtccgtggttgggacctttcttaacaacacacatgtgttctacttcgtgtgaataagtcatatcaattacgttttatagtatgaaaataatatgttatcactgtttatttggagagaggcacgtctgccttcctttctgagcgcaaaattacgctatatattcattttctgcaataaagagacgtcttgttttcacgatttttattattagaaagccatgcttgcccgccccatctgttaatgcggcggaatctttgccggagatgtgttcgctttggaagaaaacccgctatctttgcagcttgaaaaacaaatttatgtcatgctgcaattcttaaaaaactggacattgccggtggccatgctggtaggtgtctttagttatttcttttttgcccgggtcggttttgtggctcctttgaagccgtttgtctttgcggcagccaatgtattgaccccgttgctcatttttgttcaattactgttgactttttgtaaaatagacatctgcgatttgcgtcccgtgaagtggcatttgtggttgctcatcatccagtctgttgcttgcggtggcattgcgctggcgcttcttttctgcccgatggacgaagcctatcacggtgtgtttgaaggggctatggtttgcttgatatgccccacggccactgcggcggccgtcatcacgggcaagctgggaggaaacgccgcgagcctgacggcctatacgttggaatccaatctgctggctgccgtggtcgtgcccttgctcttccctttggtggagccgcacaccgagttttcttttgtcgtttcgtttctaaaaatattgggaaaggtgttcccccttctgctttgtccgttcattttggccgttttgttgcgttggtttttgcctgccgtccaccattggctggccactttcagcaatgccgcgttctacatttggggcgtgtcgctggccatcgtatgcgggcagacggtgcgttcgttggtcaatagcgacgaaccggcctatgtgcagtggatggtggcattggtggcgctggtggcatgttgcatacaatttttcttgggtaaacgcatcggttcgtgctatggcgagcgcatcagtgcagggcaggcattgggacagaaaaacactgtttttgccatatggatggcgtatacttatcttacaccgctttcggctgtcgctccgggagcatacgtgctttggcagaatatcatcaactcctggcaactgtggaaaaaacagcggcgcgaagcagtttccggcacgaagtgaaacatctgccgtgataaggaaaaagcgacacagaaacaccgaagcgcagagagaatatggattggaacgctatgatatgcccttgtgtctccatgtttctgtgtcttgccccgtgtaggcaaagccttggcgttgccggcttttctctatgagaagcggagaaaaagtcagcgggctgcgtagtaggtagctcccatgatggcatcgcgcgcggcgctcacgccttgtgcgtcgggagtgacgttgatgtattgtccgttttgcatgttcaagtccacagtgccatcgttgcagagtttcatgatttcatagcttttcccgttgcaaaccacgttccaggtctgtgcattctggtcaaattggagttccattgccgtgtcttctccttctttgacgatggaatacccgttttcggttgttgtcaccaggaattttccgttttcgttttcaatttcttccacggtccctacggctacaggattgcttccgctccaaaattcgatggaattcagcacgagcgtgtcggccaacatggaaacttcatagaccggcacaatccaaaggccgataaagatgagttcgtttaggaatttgctgcctgttacctgttcgttccaggaacgtaccttattaaatagggcatacgagccgatgcacgacgtaagcgtgagcccggacagggcgcagcagacgatggatgttttgattgctttcataatcgttttgtttaagattggtaaaactaagcgtaaaaatacgcttttattttgagaaaaaagaaagatgtgcccgaaattttggactattgccgacgtcgtgtctttctgcatgcttgtgccgggatgcggtgtgccccatcatgtgtacaacggaattttcttgggtgtggaagctacattttttgaatattcccaacaagaagctttgtgtttgatgggcgtgccggtcctcttctcaggaggcttttgcttaccttcctttccgctcctgtctgccttcctttccgctcttgcctaccttcctttcggtgcacgggcggaatagaagcggctcttgcttatctttaaggagattttcagacgtaaccttttcggcgggagatgttgccataacagatttgctgtcaggtctttatccacttgtcctcgcagccgtttctaggttgctctttgggaaatatgtcttccggagtccggagatagcgagcaagccccggcaaagcatgaagtgtgtgaaaaatatctacatcctttgtagacaccgaattacctgttgaccggcacgtcggggtggaatgcagcagactttcccataagaagtgaaattaccgtccggttgacactttgttactcctaccaagcggattatttaggctgaggcctgaaatcttttacgtttttctttgctttatgcaatcttttcctatacatttgctgaaagtaaattcttaaatccaagatatgatgaaagaaatagattgggcgaatctgtcgtttggctatatgcggacagactacaacgtgcgttgtaattatcgcgatggaaaatggggtgaaatagaaattagttcggaagagacgattaatctccacatggcagccacttccctgcactatgggcaggaggcgtttgaaggcttgaaagcctaccgttgcaaggacgggaaaatccgaatcttccgcatggaggccaatgccgagcgcttgcaaagcacttgccgcggcatcctgatgccggaactgcctacggagcttttctgcgagatggtgaagaaggtggtgaaactgaacgaacgtttcatcccgccctatgaaagcggggcatcgctgtatatccgcccgttgcttatcggcacgagcgcacaagtcggcgtacatccttctgccgaatacttgtttgtgatatttgtgactcccgtgggcccgtatttcaaaggtggatttgccgcaaatccctatgtgattatccgcgagttcgaccgtgcagctccgcttggtaccggtacgttcaaggtgggaggaaactatgcagccagccttcgtgccaacaaaatggcgcacgacttgggctattcttgtgagttttacttggatgcgaaagaaaaaaaatacatcgacgaatgtggcgcggccaatttctttggcatcaaagataacacttacgtcacaccgctttcaacttcgattttgccttccatcaccaaccgcagcttgatgcagttggctgaagacatgggcttgaaagtggaacgtcgtcctatcccggaagaagaacttgccacttttgaggaagctggagcgtgtggcacggctgccgttatcagccccattgagcgcatcgacgacttggaaaacaagaaatcctatgtgattgccaaagatggcaaaccggggccgatttcgaccaagctctaccagcgcctgcgcgccattcagtatggcgacgtggccgacccgtatggttgggtgacagtgctcgactgacgtgtgggtgtgaagagtggagaatgacgagtggggaaaagccgtgcggcatgtgtcgtgcacggggattcttcattcagcattcttcactcttcattttttctttgtatttttgccgggcaaaaactctaaaaacaaagctcatgggcaagaacaaactggaaaagtttgcagatatgcggacctatccccacgtgtttgaatatccgtattcgttcgtagatgatgtgcctttcgacatgagggggcactggaaccgcgatttttttcaaaacgacaacccgattgtgttggagttgggctgcggccggggtgagtacactgtcgggctggcacgccgctatccggacaagaatttcatcggggtggacatcaagggcgcccgtatgtggacaggagcgacagaagcgcttcaggaaaacttgaaaaatgtggcattcctacgcacgaacattgaaatcatcgaacgcttttttgcgcctggcgaggtgagtgagatttggcttacgttttcagaccctcagatgaaaaaagcgaccaagcgcctgacgtcgacctattttatggagcgttatcgcaagtttttggtcgatggcggtcttgtgcatgtaaagaccgatagcaattttatgtttacctacactcgctacatgatagaacgcaatcgtttgccggtcgatttccagaccgacgacctttatcattcggggttggtcgacgacattttaggtatccgtacctactacgagcagcagtggctcgaccgcgggctgaccattaaatatgtgaagtttcatttgcctcaggctggagagttacaggagcctgacgtcgagattgagctcgatgactatcgcagctacaaccgtagcaagcgcagcagccttcagacgagtaaatgaagtgtctgcctttttcgtcgtggcgttgaaaaaacttacgaataaccaacttcaaaaactgaaaagaatatgactatttatccaaaactgatattagacgctcttgctaccgtgcgctatccgggtacgggcaagaacatagtggaagcgggtatggtggaagacaatatccgtattgacggaaacaaggtttccttttcgctcatttttgaaaaaccgaccgacccgttcctgaagtcggttgtcaaagctgccgaaacggccattctgacttatgtgggttcggaagtggacatcgtgggcaacatttcggtgaagacagtccaacaggcgcgtcccgaagtcggcaaactattgccccaggtgaaaaacatcattgccatttcttcgggcaaaggtggggtgggaaagtccaccgtggcggccaatctggctgttgcgttggccaagctgggctataaggtcggcctgctcgat

SEQ ID NO: 1247 - DNA, 23833 bp, synthetic construct
  source 1..23833: mol_type = other DNA
  misc_feature 1..23833: note = Synthetic
aagttgttcttgcgatttcacgccgatgaccttgagcatcttttcagcatccgatgcggtggggccgttgtggcgtttgatgaagttgtttctgatcataacaattcgtttatataattgataatttgttgatatttcgtttattggatttgttgttgcaaggcatcaatggtagtgatggactgaaggtcgctgtcagggatgttgaagagcttgcttctccatgctttaaatgcggcggtattatgaagaatggttttgcgcaagtattcatattcttggcatttggtcctgcctctgtacttgttgaaaagtgcatcgtaggaattcatttgaccattcttgttgtgaatcattttccaaaactcttgcttgaatttggcagtcggggtgttgtcaggtgattcagcctcctgggtctggacagtgttctgttgctgctcttcaacttttttgttttctttttcggcaggggtcgcttcttttacagctggggttgtttctttaacagtgggagtagcttctttagcagcgggagtggtggcttcctctttttgaataggtttttcctctttgacagccgggacctcgacctttggttcgtctttcggagttgtgctgttgtcagcaatcaaggctacggtgtctgagtttatgacagagtcagctaacgcaagtgtggagtcgactacgggagcgtctgcacgcaacgagtcggtcgtcactaatggccgaacgggtggggtatgaggaggattcggcttagaaaacacgccgaggatgtacaatactgcgatgataatacctatggcaagcaaggcgatgatgtatttccatttgttttgctcaagccttactaagaaaggagctctttcgtactcggcaataagctttccatcgtagtatttgtcagaggaatggggctcaaatttgaagcctttcaacacatatcctttcggtgggatgatgtcttccttggcgtctctaccgtcttcatagcaggaataggggcatgtgtatttcttttctccttttccggggtcaatataatagcgcttttctgtaatgtttgacatttggcttttaatttatatatctacttaattcggtgatggaatagatggaattcaactgtttttcggggatggtcttcagcttgtcgtaccattttttgaaacctgcgaagttttccaagatgacggtacgcaaatattcgaattcctctccgctggctttgtctttgtaattaacatacaaattgtggtagtcatccattgaggcgacacgttggtgaaccaaggcccagaactcttgcttgaaatagacattggggtcgttcgcctcgttttgtggcttctcctcgggtgtggttaccgcgggagtctcttgcacgttctgggtgttctcggtctcgttggaggaagtggctttggtcttgtcttcctttttctctatcaacgattggtcggtctttttgtcctttttctttttcttgtcagcaggttttgctttgatttcggttttgggttccttggcaggttcgtttgtggtgctgctctttttgaaaacactgaaaaccaataggatgataagaccgatgactgcagcaacgatcaatgccaacatcagcttccaaaggttcgatttcagacggatattgaacggctcttttgtataaatggcatataacttaccgtcataaatctggttgctggcatcagggtcgaatctgaatccggaaaagacataacctttaggggggatgatatattcctgaacatcatgaccgtcttcaaagtttgaatacggacatccatccatttttttcccttttccagggtctatgctgtaacgcttttcttcaaagtctgccattctttggtgggtttattgtaaggttttgttgatggtaatgtaattggggtaggaaagttgttggttgttgatggtgatgtaaggcttcacttgcaggcctaatttgactgggtcgctgctggcaccggccaatttgaaggccaggttgagaatggcatcagccgattcaccgctgaacaactggaacaaatcggtagtgacgggaatggtgatggtgtttttggatttggctggaacatttatgctgttgctcatcgtggtgctgatgacttgtttgccgttgagactgacaatgtaatccatctttgacatggcagccgcgatggcattggggttttcgacatccagattcacgttgaaagtcaccggaagctctctcttcatgagggcattggccagattgagcagttgcgtggcgttgaggtcgtctttcgtcatgcctttgctcaggttgacacccaacatttggattttgttgatactattgaaatcaaatgtgcaattggcgaagttggccatctgagccacttgagtcagcaagtcacaggaggaaagccctaacgcgacaaagaggataatgagtgttcttttgattttcgacatagctctattcgctgatttataattaaatacaataataataaaacatttttacggattgttttatccgctcgtcttcaattttgcaatattacgaaaaaagtcggacataaagcccgacttttagaaatatttttcaaggttattcttcaccacgacgcgaggcgcgtttgcgctccagctcgtcgaggataatcttgcgcagacgcaggctcttgggcgtcacctcaagatattcgtcgtcacggatatactccatgtattcctccaacgagaaacgcacgggcgggatgaggcggatggcttcgtcgctgcccgaggcacgcacgttggtgaggtgcttggtcttgcaaacgttgatgacgatgtcgttgctgcgggtgttctcgccgatgacctcgccagcatagacgtcttcgttcgggttgacgaagaaggtgccgcggtcttgaagtttccaaatggcgtaggggatggcttgacctgtttccatcgaaatcaaggcacctacattacggctcggcatctcgcctttccaaggctcatagtccttgaaacggtgcgaaacgatagcttcaccctcggtgacggtcaaaagtgtgtttctcaagccgatgagtccgcgtgacgggatgtcgaagtcgaggcacatgcggtcgcccttgggctccatctgcgtcatttcacccttgcgggcgctgacctgctcgatgacacggcccgagaagtcttcaggaacaaggactgtcaatgcttcgataggctcacacttcacatcgtcgatgtatttcaggatgaccttgggctgaccgagttggaactcataaccttcacgacgcatggtctcgacaaggatgctgaggtgcagaatgccacggccgtagaccatcagagaatcaggcgaatcggtgtcttccaccttcaaggcgaggttcttctcagtctccttgtaaagacgttcgcgcaggtggcgtgaggtgacatatttaccttccttgccgaagaacggtgagttgttgatggtgaacagcatactcatcgtaggctcatccacatggatgggtggcagcggttcggggttctcgtagtcggccacagtgtcgccaatctcgaagtcatcgatacccatcagcgcgatgatgtcgccagcctcgacgggtttcttggtgcgttccttgcccagaccttcaaaggtatagagctccttgatggtagagcgagtcacggagccgtcgcgtttcaccaaagaaacattctgtccggcctgcagggtgccgcgtttcagacgacccacagcgatacgtcccacatatgaactatagtcaagagaggtgatgagcatctgaggcgtgccttcctcgaacttcgcgggcgggatggtgtcgatgatgacgtccaagaggtaggagacgttatcggtgacattttcccaatggtccgacatccagccttgtttggatgaaccatagacggtggggaagtccagctggtcctcggtcgcaccgaggttgaacatcaggtcgaagacggcctcttgaacctcgtcgggacggcagttgggcttgtccactttgttgatgaccacgatgggcttcaggcccagctcgatggctttttgcagcacgaagcgggtctgcggcatggggccttcgaaggcgtcgacgagcagcagcacgccgtcggccatgttaagcacgcgctccacctcgccaccaaagtcggcgtggccaggagtgtcgatgatattgatttttacatctttatagcgaacagacacattcttcgaaaggatggtgatgccgcgttcgcgttcgaggtcgttgttgtccaaaatgagttggccaggagcctcgtccgattccttgaacagttgggattggtaaagaatacggtccacgagggtggtcttgccgtggtcaacgtgagcgataatcgctatatttctgatattctgcattttagtaaaaattgctgcaataatttaagctgcaaaaatacaaaaaatcaaaaaaactgaatatagaaaaactctagtgcttggatttttctgcccaatcttcaatctgaaggtttgggatatggctggaataagccatatcatttaccagctttcaacgttcctgccatagttttcattgtttcttagcgaattagtatcaatgtcactccaatcaccactaaaacaggtttttaaatcgggatgtttggaagtcatccaataaaactcctccttggccacaataggcttgaaatattcatcaataatccctcgctcaaccaattctttcggcgtgccttggcgcaaaggctgctgcggtgcgacgacccacatcacatcagcgtggcggagcagcaaatcaaggtcgtgagaactgaaaagaatagtcttgtgcttctcgcgcgagagcttgtgcatgatgttgaccaactcgattttgctcgggtagtcaaggaaggcggcgggctcgtccatgaaaatgagaggcgtgtcttgcaccaaggccttggcaatcatcactttctgctgttcgccatcgctcaaggaaacgaagttgcggttgaccaaatggctgatgccgacggtatcaaggctgtcgtagatgatttgctcatcctcggctttcagtttggccaagaggccgagatggggatagcgaccggcggccacaatgtcgaagacctttaggaataggtcatcgggcttctcggtgagcacgaggctgaagagcgaactgcgctcggtgggggagtagtcgcgcagatccttgccaaacagcttgacctcgccgccgacaggctttaaacttgccgacagcgtcttgaacagcgtcgttttgcccgagccgttgggacccgccaaagccacaatgtcgccttcgttgaggctcacgtcgatcgcgggcatcagggcttggcctttgtagccgattgacagatggtttgtgtgaaggacttcgctcatggacaggaattgtttttaactacagatttgacagattaaaccgatttgagtccggaaattggtgggatgcaagcatccgatgattacagatggccaggagtggaagagaatctgtgccatttggacgcttgcgtccttataattatgtagcgtcattctgtacaatctgtgtaatctgtagtttaatatcatcattgtatatgactgactttttgccggtggaagatcacccaaagcacgatgggcgcgccaattagtgctgtgaccgagttgatgggcaggttgccttcgaaggagggcaggcgtgcgatgaggttgcagaacagggccaagtccatgccgaggaaggccgtggcggggatgagcagtttgtggtcgctgctgcggaacaggaagcgtgcgatgtgtggcacagccaagcccaagaaagcgatggggccacaaaaagctgtgatgagggcggtgaggaagcccgaggccaagatgatgagcatgctgcttcgacggatattgacgccgaggttctcggcataacgctcgccgaggagcagtaggttcaaggtcttgaagagcaggaacgagcctatggtgccgaccgccactgcgatggcaaagaagggcagttgtgccttgctcacgttggagaagctgcccaggccccagatgacgaaggagtgcaagccttccttctggctgaagaacttcaggatgtcggtgaccgagccggcgatgtaggcgatcatgatgcccaccaacacgaggctgaccatgctgcggagcctcgagctgagcgcgaggatgagcaacaataccgcgaaagcacctaaaaaagccgctatggtgacaccgaaggtggaccacagcgacagcgtgctgaccgaaagcccagtcgccgtgccaagcaagaccacgaaggccacgccgaggctcgcgccactgctgatgcctaatagggaagggtcggccaagggattgcggaacaaggtctgcatcaaaaggccagaaaccgatagacctatgcccgccagaagcgccgtgatggcttgtggcaggcggtagtcgaggatgatagcgcggtaggttgacgtgtcgccatgcagcagagcgtcccagaattcattccacgggatcgacaccgagccgtagcgcaggttcaggatgaacagcacgatgccaacagccaggatcgcgatggagaccagcgcgatggatggcgttttgcgacggagggtatggtcggtgttaggagccatttctgggtgtttttgcgttgcaaagatagggtttaatttgattgaaaggacaatcaatcagcgtcatcatctttcggaccggaaacaagcagcgtcgtatcgtcgcagcggatgccgtaatacacatccctcatgcggccttgctgtggttcgagaacgcctttttcgacaaggtctttgatgtcgcgagaggccgtgtcgaccgaaaccttgcaatgcttggcccagtttttcacggtcaatttacctatataaccgtcaaggtagatgttcaacaccttgttttgtcgctccgtaaatgcaagatgggcatggttttgccaaaacgtggctttctgcaagatgcgtgaaagcacttcatcggaagcgttgacggcacgtgccatgcagtcgagataccagacgagccattccgtgatgtcagcatccgtttgtcggctgacgcgctccaacacgtcgtaatacgatttcttgtctttgttgatttgtcgcgacatgctgaagaagcgcatggcagagtcgtcggcttgcgagagcgccatgtcggcgatggcgcgaccgatgcgcccgttgccgtcgtcgaaagggtggatacagacaaaccaaaagtgggctatggcggatttcaggtaagtgggtgagtcgatgtcggtattgaaccagtccaagaaaacatccatttccttatgcacgtcttgagcgggaacggcttcataatgcactttttcacgaccgtaattgcccgacaccactttcatctcacctttgcggtattgtgccacgtcgattttcgaataaccacttctgccagaaggaaacaggcagttgtgccatccgaagagccggtcgtgggtgaggggttggcggtaatggctcacggcatcaagcatcatttccacaacaccttccacatagtgactggcgggttcatcggcatcagaagggatgcctaactttctggcgatagaagaccgcacttgtttggcgttcaatgcaatgccttcaatctcggaggagttgatgatgtcgttggagagcatctcggcattggctgacaggcgggcgtcgaaaccgatggcgtcgagtcggcccataaggaatcccgaggctttgctgacggaagccaatctgtctgcgacaagatccttgtcccaagtgaaatgtggccattgtttgctttgatggatgtaggaagccatagttaatcggatatttcggctgcaaaaatacacattatattaataagccgcaaatcttgcggttaattatccgcagattttgcggattattggccgcaaaggtcgtgcgtttctaaagaggaagctatttcttatatcgttttaatgcattcgtcaattcatcgagaatggttttgcgtaacgattcaggttcgattacttccaattcgttgccttcttttaaaatggcttgtcggaggtcgaaagttgggacgagatagtattcaaaatctgtgtatgtgtcggtcttgcatatttctttttgcgagtgatgcaaggggagtgttcgcagtagattgggcatgttgtaataggctcgcaaaacgatgcgttgggcagggatttcctctccgatgaacacgccgaaatagtttttgaaaaaggcttcggcatcaaaatcggtggctaattcatattgtgcatctgtatcggttgttttggtcatgcggtcaagggcatagatggccatggcaccgcctttcctttcgcttttgccaagcaggtaccagcgttggtggaacagtttcaagcaataaggctcaattagagtagtgtagggctcggagtcgttgaatttctgatagcccatttgcagggtgtggtggcatttgatagcgttgataatggtttcgaggtgttcgaggccggcaggtacgtcttcaagcaggagttggtccttgatggagaggctatcgaggaggatattgctgacggtgagggtgcggaacatccagttttgggtagagttgtctcgaagtgtctctgggttgttaatataataatggtgctgtttgtcgcattcgatgcggataccgaacatgtcgatgatggattgtcgcaagcggtaaaaggtggtgcgggagaggggtttgccttcgttcaggtcattgacaatccataggtgtccgatgcgctcgaagctgattctttcgttgcggagtatggtatccaccatccatgtgtactgtctgaaagtgtctgtgtttttcatggtgatttgagatttttcgcaaaaatatgaaaaaacaatgatagtgtttcatgttttgaaacagataggttgtatttttggcgcgaacaaagaaaagaggaatgaacggtgacgagatttgggcaaaaaaagacgaggcgaccgaaatcgccccgaacttgatgttttcacaacggaataatccttattgtgaattgctgcatatcttgtgctgcaaaaataggtatttttccaatactgcaagagttttttgaaaaaaatactaattttgacaaaaatttgaattgataaatagtcgacttatgaagaaaatactaggacttgacttaggcaccaacagcataggttgggcggtggttaatgcggaagaaacaactcgcgaaaacgagacaacgtatctgaaaccgacgggcattagtgcagcagggagtagaattattcccatgtcagctgacattttgggtaactttgacgtaggcaattccgtatcgcaaactgcagaacgaactggatatagaggcgtacgccgtctacatgaaaggaatttgttacgcaggcaacgacttttgcgagttttgaaactaatgggatttttacctgaacattttgctaagcagattgataaacacggaaaatttattgattatggtgagccaaagttagcctggcaaaagaatgaatatggcaaatatgactttggtttcaaagactcgttcaatgagatgttgacggattttgcccaacatcagcctcatctcgttgccgacggcaagaaagtaccttacgactggactatctacttccttcgcaagaaagctctgacacaaagacttacaaaggaagagctcgcttggattctattacagtttaaccaaaagcgcggttattaccaattgcgaggcgaggatgaggatgaacatcaagacaaactgattgagtttatcgctcaaaaagtggtgagagttgaagctactgacgagaaaaagggtgatgatgtttggtacaatgtgtatttggagaacggcatggtctatcgccgcacgagtaaaacgcccttggattgggagggaaaagttaaagagtttatcgttactactgatctcgaaaaagatggaacgccaaaaaaaagacaaggaaggcaacatcaaacgctcttttcgcgctccaaaagaggatgattggactttgcttaagaagaaaacggagtttgacatcgataacagccacatgaccgtcggttgttacatctatgacaacttgcttcaaaaaccgaatcaaaagataattggcaagttggtgcgcacggtggaacgtaaatactacaaagatgaacttaggcagattcttgaaactcagattgctttgataccagaattgaaggacgaaacaatatataatagatgcctagaggagttgtatccgaacaatgagtcacaccgcaaaaacaacgcaaagcctgactttgccaatctatttatcaacgacatcctgttttaccaacgtccgctgaagagtaagaaatcgctcatcagcgattgcccctacgagagccatttcgataaggacggcaacgagcatcccgtgaagtgtatcgccaagtcgaatccgctgttccaagagttccgtctttggcaatttgtgcagaatttgcgtatctaccagcgggaaagaatagttagtgacggccaattggacttgttcggaaaccaatcggcagggaaactccaaaccgatgtggatgttactgacgagtttctgaaaagtgaagatgactatgtgaaactcatcgattggctcaatgacagggcttccatcaaacaggacacgctgctcaattcatacttcaaaatcaaaaaggagaagggcaaagacctgtatccttatcgttggaactatgttgaggacaaggattatccctgtaatgaaacgagggcaacaatgcttggtggattgtggaaatgtggtattgatacaggttttctcactagcgaaaaagaaatgtcgctgtggcatattctttattctgtggaagacaaaatggaaatagccaaggcattgaagaagtacgccgaaaagaacaatctttccgatttgtttgcggaggtgttcgccaaagtaaagccatttaaaaaggactatggatcgtattccgaaaaggctatcaagaagttgctgcctttgatgcggatgggcaagtactggagtgctgatgccattgacatcaagacaaaagaacgtattgacaagatgctgacgggcgaatacgatgaaaacatcaaaaaccgagtgcgtgaaaaggctattaacctgactgacattgaccattttaaaggtctgcctatttggttggcatgctatattgtctatgaccgccattcagaggcaaaggaaatcgggaaatggaaaacgcctgaagacatcgacggctatttgaaggaattcaagcagcattcgctgcgtaatcccattgtggagcaggttgttacggaaacgctgcgcacggtccgcgacatctggaaacaggaggagcaaattgatgaaatccatttggaactgggtcgagagatgaagaatcccgccgacaagcgcaagcggatgacagaaaacatcctacaaaacgaaaacactaacctgcgtatcaaggcgatgcttatggagtttttgaatgatcctgaaatcgagaatgttcggccatattcaccaagccagcaagacattttgcgaatttacgaggaaaatgcgcttgacaatttgactaaggatgacaaggattatgattttgtcagcaaaatatccaagtcggcacaaccgtcaaaggcagatataattaggtacaaatgctggttagagcaaaagtatcgctcaccctatactggcgaaatgattccgcttgccaagttgtttacttcagcatacgaaatcgagcatgtgattccacaatcgcgctactttgatgattcgtttaccaacaaggtgatttgtgaaaaagaagtgaacgggctaaaagaccgccaacttggttttgaattcatcaaaaatcatcatggtgaaaaagtgcaactgagtcagggaaaagtggtggaaattttgtctgttgaggcatacgaaaagtttgtgaaagaacattatgccaacaaccgcacgaagatgaagaaattgctgatggacgacatccccgatggcttcatcgaaagacaactgaacgacagccgttatatcagcaaattggtgaaaggactgctttcaaacattgtacgtgaaaaactcgaaaacggtgaatacgaacaggaagccgtttcgaagaatctgatttcttgcaacggatccatcaccgaccgtatgaaaaaggattggggaatgaatgatgtttggaatggcattgttttaccgcgtttccgccgtttgaacgaactgacgggcaaagactgctttacgacaatcagtgctgaaggccacgaaattccagccatgccgctcgaattgcaaaaaggcttcaacaagaagcgcatagatcaccgccatcatgccatggatgccattgtgattgcgtgcgctacacgtgaccatgtaaatttgctcaataatgaagctgcgcactcgaaacacaacgccaatcgttaccaactgcaacgcaagttgcgccgattcgagaagttgaccatcgacggcgtggaaaaggaaatcgccaaagagtttttgaaaccgtgggattcttttactactgatgccaagcaaatattagaaaacatcattgtaagtttcaaacagaatttgcgtgtcatcaacaagactacaaacagttaccaacactatgatgagactggcaaaaaagtgatggtaaagcaagagaaaggtgatagttggtcgattagaaagccgatgcacaaagacaccgtttttggtgaagtaaatctgcgtatgagcgacaaaactgtttcgctgaatgaagctttgaaaaatcctaaaacgattgtaaacaaggagtttaagaaaaaggttatggagatgcttgaagcaggtcgcgatgccaaattcatcaagaaatatgtggaggacaacaaagatgtttggtcggatatagatgttaagaggatacagatttattatttcactaaagaaacaaaagaccgctattttgccacgcgtaaaccgcttgacacttcgtataatagcaagaaaattaaagaaagtgtgactgacacagggattcagaaaatcctattggagcacttggaggctaaaggaggagaccccgaacttgctttctcgcccgacggcatcgatgaaatgaatcgaaacattgttgcgctcaataagggcaaattccatcagccgattctgaaagtgcgtgtttatgaaaaggctgaaaagtatgctgttggacagaacggcaacaagtcagcaaaatttgttgaggcagctaagggcaccaaccttttcttcgccattttcggaacggaaaaggcaaacaaggaaacaggtgaaaccgaaatggttcgttcttatctgaccattccactcaatgtgatgattgattgccaaaagaaatacggttcgcaatggcgcaacaacatcgaatcttatctgcaagaacagcaattggctacatccgatgccaaactcttgttcattctttcgccaaacgatttggtgtatttgcctatgcctgaggaattgaaggatggaatttataaaattgataaatcaagaatttacaaattagttagttgtactggaagtagattgtatgcaattcctttttcagtggcaaaagtaattgtcgataagatggagtttacacaattaaataaggtggaatttactgattacaaatcgtcaattaaagaaatctgtgttcctatcaaagtggatagattaggtaacatcatcgaactaaatggaaagaagctatgagttgtacccaaattggttacaactgaacaaacgaaagcaaccatgattaaacgtactctctttttcggaaatccggcctatctctccatgcgtaatgcgcaattggtcatcaaacttaatgatacccaaacgcaagaggaagtgacgaagactgttcccattgaagacattggtgtggtggtgctcgaagatcgacaaatcaccatcactaatggtgccttggatgccttattgcaaaacaattgtgctgttatcacatgcgatgaaaagcacatgccagcaggtttgttgctgccacttgaaggtcacacggtgcaaagtgagcgtttccgttggcagattgaggcttcgttgcctttgaagaaacagctgtggcagcagactgttcaggccaagattcgtaatcaggcctcagtgttgaagcggttgagtggggcagaggtgggctgtatgctggcctgggccaacgatgtgaagagtggcgacagcgaaaaccttgaaggtcgggcggcagcctattattggaagtctgtttttccggaaatggaacggtttgtccgtgaccgcgagggtgaggctcccaacaacctgttgaactatggctacgctatcgttagggcagtgatagcccgctccttggtggctagtggcttgttgcccactttcggaatccatcatcacaatcgctacaacgcctattgcttggcggatgacgtgatggaaccctatcggccttacgttgatgagttagtgattgagattttgcgtagtggcgttgattgtagcgagctgactacggatttgaaacgtaagctgttgggacttccagtaaaggaagtcatcatcgacggtcgccgcagtcccttgatggtggcagcatcgcaaaccaccgcctcgttagcgaaatgctttggcggggaattgcggaaagtggtttatccagtaatggaattatgatggaccgattcagtgaatataggattatgtgggtgcttgtgctttttgatttgccgacggatacgaagaaggagcgtaaggcatacgccacttttcgcaagcgcatcatggccgacggctttacgatgttccaattttcgatttatctgcgacattgtccgagctatgaaaacgccgaagtgcatatcaagcgggtgaagtccttcatgcccgagtttggcgacatcggcattttgtgtattaccgacaagcagtttggtgaaatggagatttttagcaactgcaagcctaaggcggtggacacgccttgccagcaattggagttgttttgaatcgggaaaatggtcataacaaagaaaaatccaactcaaatgagctggatttttcttttctgaaacaacttctaaattgttgtggctctttgttttacccatatcgtgttgtttcaaagagcaaagatacaagttaaatgcaagcaattcacaacataaaaagcatatcactgattttttgaaggttgtttcaaagagcaaagatacaagttaaatgcaagcaattcacaacgattgacggttgtaagtcttggcaacttaagttgtttcaaagagcaaagatacaagttaaatgcaagcaattcacaacgactttggttcctcattggctcaaggtattgttgtttcaaagagcaaagatacaagttaaatgcaagcaattcacaacaaaactcaaagaaacttgctgaattcttatgttgtttcaaagagcaaagatacaagttaaatgcaagcaattcacaacttggatccttgaacgtcttcaattcttgccgttgtttcaaagagcaaagatacaagttaaatgcaagcaattcacaaccataaccgccgttatttcaataagttaaagttgtttcaaagagcaaagatacaagttaaatgcaagcaattcacaacctatgtagttacttaatcgtggcatattttgttgtttcaaagagcaaagatacaagttaaatgcaagcaattcacaactttgtcaaacatatattcattaaatgcattgttgtttcaaagagcaaagatacaagttaaatgcaagcaattcacaactattactctactataatcctgatttcctagttgtttcaaagagcaaagatacaagttaaatgcaagcaattcacaactgcttcaaagttattttctgtgtggtattgttgtttcaaagagcaaagatacaagttaaatgcaagcaattcacaacttgttttagtgtgttatgttctaatacatagttgtttcaaagagcaaagatacaagttaaatgcaagcaattcacaactataaaggaaaacaactgcatgaccatttcgttgtttcaaagagcaaagatacaagttaaatgcaagcaattcacaactgaggtagaccgacgtgggcaggcgtcgcagttgtttcaaagagcaaagatacaagttaaatgcaagcaattcacaacttaacgattcgttaagcagtgaatatcgttgttgtttcaaagagcaaagatacaagttaaatgcaagcaattcacaactaattgattgttgtttgtgagttatcatttgttgtttcaaagagcaaagatacaagtttttgaaagcaaattttcaatcttcaagaaactcttgtatttttgcccaataattctgtttgacatgaaaacgctatccaaatgtattctgcttttccttgctgcatttttgctcctccccacgcttctgtcagctcaacaccctcaagataccctcaaagccaagaagcctggcattgtagcccatcggggattccaccgttttgaaggctcggtcgaaaacagcatctcatccatgcaacatgcctttgcccatgactttgaaggcaccgaattcgatgtgcagctcacaaaagatgacgtcgccatcgtgtttcacgacagtaaaacgcaaggccgtgccatctgtgacacgcctttcgacacgctgcgtcagttgcaagcatttacgttgaaaaacggtgagaccgtccccacactcgacgagtttttggaagcatgttccatcgcaattaaggaacaatttcctcgcgaaaagcatactcagttgttttttgagatcaagccgctgcaacgcaaggaacaacgctatcatctcatcggccaaatcattgaagccatcgggaaatatcaacttcacgacgacattttcttcatctccttcgaccttgatgcttgcgtgatgatggcccaattgctgcccgacatccctgtggcctacctcgaaggcgacctctcgcccaaacaactgcaagaaaagggcatcaccgacatcgactaccattggagcaagttcgccgcccatcccgaatgggtgaaggaggcgcacggcttaggcatgaccgtcaacgtgtggactgtcaacacgcctgaaaaagctctggagatgctgcagttgggcgtggactacatcaccaccgatgaaccccttcagatgcgggaatggttaggtcgagataagacagaataatgtttgctattgacaaatcacaaatacatatactatgaacaaaactatgcatatccaagaagaggcggcgcgctgcctgctttgtgccgatgcgccgtgcagcaaggtctgcaaaaatggcgacccagcccgcgccatccgtgctattagattcgacaacgaagccattgcgggacaatggcttgacaagtgcaacgaagctgaactgcaagccgccgaagcagcctgcatccactacgaccgtcccatccgcatcaaggaattggcggccgccgtcaaaggcacgaagccacaaaaggatctccccagtctcgccatcgatttctgtggcatcccttgcgagaatcctttcttcctcgcctcgtcggccatctgtaccaactatgagatggtggcacgggcctttgaagcaggatgggctggcgtgttctacaagaccatctgcatggaggacatccgtgaggtgtcgccgcgcttcgacgccgtcagcgagccgggacgttccgacttcttcggcttccgtaacatggaacaactgagcgaaaaccccgttgaggtggacttcgacatcctgcgaaggctgaaaaaggactatccctcgaaaatcgtcgttgcctccatcatgggcaacgccgagacggagtggatcacgctggcgaaaatggccgaagaggccggcgtcgacgcggtggagcttaatttctcctgcccgcagatgaagttggctggcatgggcagcgacgtgggacagaactctgagctggtgctgttctatacggcctatgtgaaacataatgtcaagatcccggtcatccccaagatgacgcccaacatcacccaaatcaaccaacccgccatggccgcccacttcgccagcgccgatgcagtgtcggccatcaataccatcaagagcgtgaccatgaacagtcgcggtgccgtggccgataagaagaccgtctccgggctctcaggccgtgcggtgaagcccatcgccttgcgccacatcctcgaaatggctaaaaatcccattttcaccgcaaccaacaatggcaaacgcatcgagttgagtggcatcggtggcatagagacctggcgcgacgcgcttgagtttatccagttgggctgcagtaacgtgcaggtgtgcaccgccgtgatgcagtacggttaccgcatcatcgatgacctcgtattggggctgcaaaactatatggcagaacgcggcgtcgagcacctttcggatctggtaggagaggagctgcctaatttcgacacccccaccaacctcgaccgcgacaccattgtgtatcccaccttcgaccgtgagcaatgcatcggctgcggccgttgctacatctcatgccaagacggtggccatcaagcgatttccttcgatgccgacctgcgtcagccgcatctcgatggaaagcgttgcgtaggctgccacctctgccgactcgtctgtcccacaggcgccatcggcgtggcgaaacgcattgccaagaaggaataaaatgaacaattaaaacagactgggattccctgacgggaatggagagttcttccaactaaaaagcggcggcatgtagcgtttacaacgggtaaacatcacttgccgccgcttattatacgggtacattactccattcccctaaggggaatctatgccagctttagaacctcagcgtcaaattccccatgacatggaaacctgccatcgggatgaaaccgatttggtagtaacggttgtcgttggggtgaccgtagctgtcgcagatggccgagtagacccagccgctggcagcgtaacgcttgttgaagatgttgttgaagttcaccttcacgatggcttccttgacgaccttcttgggcttcagggtgtagccaaggctcacgttcgaggtgctataggccggaagtgaacgatccagattttgggtgttgtcgagatacatgcgtgagacgtagttcgtgtgccagacggcctcgaagcctttgtggtggaaagtgatgaagccgttcaagatggccgaaggcgagaaggccaaggtcgagttgtcgtagtgaatgacatcgaagccatcgccatcgtaggcattgccgttggcatcggtgttgccttcccaatcgtcccagttctcgacatattcgtcgaagtctttgatcttgtttctgctcaaggcggcgttggcctcgatggtcaaccatttggtggcgttcacgcctgcctgcagctcaacgcccatgcggtacgaatccttgatgttggtggtcagggcctcaccgatgtcgctcaccgcgccggtctgtacgaactggttggtgtagtccatataatagaggttggcacccgcctgccatatgttgccgttgtagttgtaaccaagttcatagtcaaggagttgctcgggcttggggaagggataggagccgttgtcggtgaagttgttacgctcgggctcgcggtggctcaaggcaaccgaaccgtagatgtgatggtcgtttttgttccatgagaggccacctttcgggttgaagaaatgataggtctgatggatgtccaaaggctggttgtagtaaccgctctcgtcgtcgtagaacttatcgttgatgccgtcggtcttgtagtccacatagcggtattgcaagtcgccgaagaggctccaatgctcggtgatgttgtaggtggctttcacaaaggcgctgccatcgagtttgtgggcatcggagtcgtagtatttgtgcttgcagttggtgaggtatttgttggcgacattggggttggcaatgtaggtgacatagccgaagtggttgccgttgaatttttgcaccgataggccgccgatgacgtcccatctctcatccttgtagttggcgttccaattgagaccgtaggtgtgttgggtgaggcctttcctgcgcacgaagtcggtccttttcacttggttgccttcggcatcgtagtaagtcatgccgaatttcgagagcttgttgttgggacggaactcttcgtagtagccatagccgtaggtgtagtgcaaagtggccgaggtcttccagtgttcgttgatgttccaagcggcggagaggaggttgtggtcttgccagaagttgtcggtggtgcgattccagaaagtaccgtcgttcatttggtagcgttgggtcatgtagtggccgttttcgtctttgacgaagttgccgtcctcatcggtgacgaggtattcgtatagcgagttgtattgtcccaagcccacgttccacaagtcggcgtaggtcttgatgccggtgtgctcgccgtatgtgccatccatgaggctgaggtcgtcgttgcctgccacgacaccgttccaggcttgtccggtcttctcgaagttgccgatgttcttgtagcggagttggaagttgttattaataaaggtgatgccgccataatagcttccgctgcgacccttggtgccgtggatgaagccgtcggtgtgggtctcgtggtatgctccgtcgatgatgaggtggttccacaagagaccagttgaggcttttgcaccgaagttgagcgtgttgaacgagccgtaggatcccgtgatttcggcactcggcacgaaagaaggcgttgccgacgacaaggccactgtgccgccaaaggcgccgtcgccattggtggaggtgcccacgccgcgttggatttgcacagagcccaacagcgagccatagctgttcatgttcgcccagaacacgcactggtcttcgggtgagttaagcgacacaccgtcaagggtgacgttgatgcgcgagtcgccggcgccacggatgcgcatgtagctggtgccagtgcctacaccgttctcgctccaggcaaggatgctaggtgacttggcgaacaggaagggcagctcctgacccgtctttgaaaagtcgttcagttccgctttctcgatgttggtgacggcaaaaggtgcgtttttctgaacgcgcacgccgctgactaccacttcgttaagcgtttcgtagttggtagtgtcgattactactgtgttttgagcattcacatttgccgcgataaacaatgcggcgacaacaaaagaaaatcttttcatctcttgaacttttaatttataaaatgtgaaggggaatgcttgaatctatccaatccctacgccggcattatccggatcaggttagagggtatgttctcagccgtttcaccctgccaaagcaggaaaggcacccctttgtaattctgcggcaaaaataggaattattttcggaacgatgataaaaaagtgttatttttgctagataaaacaaaggcaaacgagatgcagattaatcgatttggatattattggctggatacatgggtgatggccaatgtcatacaattggctacgcaagacttttgcgcccgcaatctcaatcacatcaacgatccttgcgggcggcagtacgaccaaatgacacaggcagcacggtcagttccagccaacattgctgaaggtaattcgcgacattcaacttcaaaagtaaccgaaatgcgccttacagatgtggctcgtgcaagtttgtcagaattagccaacgactatgtgaattggctcatgcgacatgaggagattccgtggtcagtgaagtcagaagaacacaaaaatgtaagcaacattcaccttgaccatcccacttataaagacgatgtgcaacaccttagcagcattcacatcctgaaacaaaaacataaatttgatgcatggctttgttccaaaaactcaatgactgaagccaattgcttgcttgtcctttgcaatcgtcttattatgatgctgggcaaacaaattgagaaccaacttgaggcattcaaagaagaaggaggtttttctgaagctttgtcagccgaaagaatagcccgcagggcggagcaaagtgtccaaaccgatgcgcccctttgtccaaaatgcggtaagccgatgataaagcgtatggccaaaaagggcaaaaacgctggtaatgccttttggagttgctcaagctatccagaatgcgatggaacgaggagcgtttgagcctttcatattggtctttcgtaataatgtaaaaactaatgacggaataatgataaacacaacgagtcaatcaaaacccgattaggtagcacaaatacccgcaaacagctgccactaaggcattaactatctttgctttggcaaaactccttttactttcggcaagcaaaggcagcgaggcatggccatcctgcgagatggagcttgccagcagcaccgagaatggcactgtgcctgtggcaaacaaggtgacaaacagcagatgcggtcccgactcagggatgatgcccaccaggacagccaataaaatcatccacggaatattattgctgataagggtttcaatgtcaaagtaatgcagcccgacttgaatgacgaatagcgcgccgaaggtccagaggaagatgctcaggaaatgcttgcggatgatgtgctcccaaaggtgttccttgatcacgtgttcttctgccgtggcaatgaaccataccacaaacagactgatggcggcaaagatgagatttatccaatattcgtcgaagatattgagctgggtgtgaatggcttcctcgtgctcatgctcaaacatgccgaaggctaaggcaacgatgaacaaaatcacgccaagcagcaaggcgatgcgttcggcgctggcatggcgcatgttgcgcaaggtgggtttgtcgtcgtcttcttccttttcatcttcctcgtgaatctgatagccgtccttgcagccttcgtgttggactttgccgttcggcttggagaacctgtccaccagccaaccgacgataatggcgatagcgaacaagaccaccatcaacagcagggcttccttaggtatcatggcgagcatgacgaaggcttcgtcacccgaagaagcaatcatcatggcaatcaaagcgccgaaactcagcagcttgtgcgaatacatagaaacggcggcgaaaccgcccatgcagccaggaatgatgcccaagcccgctcccaaaacgacttgtccgaaacgattttggcgcagtcgggtgaaccatctgccgtgcgaatggatgttgacatactcaatcatcagcatcatgataatcaccaaacctgtgattaaaacgctgtttctcagtacatcaaaaaacaaatgcaaaaactcgtgcatggcttaaaaatgagtggcaaaaataaaaagttttatctttgcagcaaaattaaaaagacaccagactacgtgactgcgggactgcgtgaccgtgagaatacccgaggtcccgaagtctcatagtcccgaagtcatataatatgaaaaaagaagactgtttttatctgggccgcgtggccaagacccacggcttgaaaggggaggtgaccatcaaattggaggctgacgacccttcggcttacctcgaaatgaagcatttcttcctcgaaatcaacaaggtgctgacgccgtttttcgtgg

SEQ ID NO: 1248 - DNA, 23822 bp, synthetic construct
  source 1..23822: mol_type = other DNA
  misc_feature 1..23822: note = Synthetic
ccacccatcccagacccggatacaccaagccgaacttatggccgctgacactgatggagagcacccatttcagacggaagtcccatttcttttccggatacaggaacggaaggatgaaaccgccgcttgcagcatccacgtggatgggaatgtcgtaaccggttttggcattgtaggcgtcgagcgctttgtcaagggcttcgacatcatcattcagccctgtccatgtgacaccctgtataggcacgatgcagattgtgttttcatcacacatcttcagggcttcttcggggtcgagtgtggtcttgtcgagggtcaaaggcacttcgcgcatttcgatttgccacaactgggcaaacttctcccataccacttggaaaccggttgaaataacgaagttcggcttgtcgaacggcttgccttgcgcctgacgttttttgcgccagcgcagccacgcggctacaccgcccagcatacatgcttctgaagaaccgatggcgagtgcgcctgtcttccacgtatctttttccggagaattccacagattggcgacgatgttgatgcacttgccgttcattacggcgatgcggggatactcggtttcgtcaatgtagttgatgttgatggcttcgttcattagcttggttgcatattcgtccatataggtcgtgacgaacgtagccagattcaggcggggctgggtttgggcaaaagtctcatctttcaccatctggtaagcgatttcgggagtggtgggcccatcggggattttttgcaccggtgagggttgtaacatacggtttgaaccgaatacgtctgttttggcatctccctttctgaaattcaaatcttccatataactataagtttttaaaggtttaggcggcggggaccttccccgtcgaattgtccacaacaacgaccctcggaaaagaaagttccggcgttttacattatttggcgtttattaaatgggggagaaatgaaagaggccacagagtttcttattcttgcaagaatgagaaactctgtggcctccggatgtgaaaaccgtttttttttatacttttatctcatcatatttcattccaaatacatctgctactgctttataggccacttttccttccaccacattcaggcctaacgccaatgccggatcgtctttgcaagcctgtttccaacctttgcaggctaaagctacggtatagggcaatgtggcattggtcagcgccatggtggatgtgaacgggacagcgccgggaatattggctactgcatagtgcacaatgccgtctacgacatacgtaggctcactgtgagtagtggggtgggaggtttcaaaacagccaccctggtcaatggctacatccacaagtacggttccgggcttcatcattttcagcatgtctcttgtaatcaggtggggagctttatcgccgggaataaggacagaacctatcaccagatctacggtaggcagttccattttgatgttatgaagtgaagaatagagtgtttttacgtttttgggcaatacttcactgagatagcgcaagcgtggcagattcacatctgtaatcattacctcggctcccattccggcagccatttgtgcggcattagtgcctacgatgccgccccctaaaataagtacgcgtgcaggacgtacccccggcacgccacccattagttttccttttccaccctgcggtttctccaaaaaacgggcgcccacttgagtagccatgcgccctgccacttcgctcataggggtgagcaatggcaatgaatggtcttctttctctacggtttcgtaggcgatacatacggcaccgctttcaatcatggcttctgtcagaactttatcggccgcaaagtggaaataggtaaataccacttgtccctttttaatcagtttgtactccggtgcaatgggttcctttaccttgacaatcatgtcggctatggcatagacgtcttcaatggcaggcaggatttgcgcacctacggcgatgtaatcgtcgtcagagaacccactgtttatgcctgctgttgcctgcatatataccgtatgacctttcttcaccaactcggctactccggcaggggtcattcctactcggttctcgttgttcttgatttctttggggactccgataatcataatgtcatctgttaatggttaaacatgctgcaagatagcgatttctctgtctcattgtcattctgtaccaggtgttttacaacagaaaatgccgggttgttcgatgaggaaggtggcaggattattcttttttgtttaggcggagagaactattcttgttatatttgcatgcatttaaaaaataagatatgggctataagaatataaaacactctatacttttttcttttttattttgggtgggcagtgtgcaaagcgggcatgcacaggaaaccgccgggcaggaagctgttccggagatgcaaacggctgttttcactcctccttttgatttccctatcaccttttcaggcaatttcggcgagatacgttccaaccactttcatggcgggctggacttcaaaaccggtggtgttataggcaaacctgtgcatgctttggcagacgggcatatctcccgtatccgagtgacgcatggctcagggtatgtgcttgatgtggattatgataacggttattccactatcaaccgccacctcagtgcttttacaggcgatgtggcccggagagtgaaagaattgcagtatgaaaaggagagttgggaagtggagatcgttcccgaaccgggagaatatccggtaaaggcagggcaggtgatagcccttagcgggaatacgggatattctttcggccctcatctgcatttggatatgattgagtcggcaacaggggattatattgatccgctgcctttttttatggaaaaagtgaaagacaacactgctcctcatgccgagggcatcatcctgtttccgcaaccgggcaaaggggtggtaaacggaaaacagacgcgccagacctttccggtaagtccagcaaagcctatcacagcctggggattgattggagtgggaatccgcgcttatgaccatatggatggggtgggcaaccgttatggcgtgcataccgttattctggaagtggacggcgtggaagtgtttcgcagtgtggtagaccgctttgcttacgaagaaaaccgttatatcaactcatggacacatgggcagtacatgaaatcgttcgtcgaaccgggcaaccgtctgcgtatgctgcatgcgtctagcggcaaccggggactgatagaaatcaatgaagagcgtccctatcgtttggtatataccttgagtgatgctttaggtaacacctcgaaagtccgtttcaccatacagggcaggaataccgctatccgtccggtggagcatcgcgaaaaatatgccttcaaatgggataaaaccaattatcttcaggagcccggactggaactggttgtgccgcggggaatgttgtatgatgatgtgtggttgaactattccgtacgcgccgatagtggcgacgtggcttttacctatcagttgaacgacacccgtattcccatgcatggagcgtgcgagatgcgtatcggcttacgtcgtgatgatttggaagataagtcgaaatattatgtggccggcgttaccgccaaaggcggaaaatatagcgtaggcggggtttatgaggatggttttatgaaagtccgcatccgggacttggccacctatacggtagcagtcgataccgtaccgccggagatcattccacttaatcctcagcaatggggacgtacgggccgcatagtctttagagctaaggacaaagggacgggggtcaatagctaccgcggaacgatagacgggaagtatgcactgtttggcaagcccaattccattagtggcaatctggtttgcgagctcgaccccgaacatgtgaagaaaggcggtaggcatactgtggaaatgaccgtaacggacggttgcggcaatcaaactgtcgggcagttccattttgtatggtgaaataggaggggctgtatcctctgaaatccctttatagcattgtgatataataaattcaataataattcaaagtatgaaaagattaactctctccgtcatgttggtagtggcagttgtggcaaacacttttgcctgcaccaatcttattgtaggtaagaatgtatctacggacggttctacaattgtttcctattctgccgactcctatggattgtttggcgagttgtatcattatcccgcaggcatgcacaagaaaggcacattgattgatgtgcacgagtgggacaccggcaagtatctcggtcagatagagcaggcgcgccaaacctacaacgttatcggcaatatgaacgaatttcagcttactatcggtgagacgactttcggcgggcgtccggaactggtggatactaccggtatcattgattatggaagccttatttatctcggtctgcaacgttcgcgcacagcccgcgaagctatcaaagtgatgacagaccttgtgcaggaatacggttattacagcagtggtgaatcctttacgattgccgatcctaatgaaatctggattatggaaatgataggcaagggacccggtgtacgtggcgccgtatgggttgctgttcgcgtgcccgatgattgcatctccgcacatgccaaccaaagccgtatccaccagttcgatatgaatgacaagaacaactgcatgtattctcccgatgtcatatcctttgcccgtgagaaaggctatttcgacggagtgaacaaagatttcagttttgcaaatgcttatgcaccgcttgactttggcgctcgtcgttactgcgaagcccgcgtgtggagttactttaatatgttcacagctcgcggcaacgagttcctaccttatatattaggcgatacggataccccgatgccgttgtttgtgaagcccaaccgcaaaatctccgtacaagatgtaaagaatgccatgcgcgaccattacgagggtactcccctcgacatcagcagggatttcggtgcaggaccgtatcacactccctaccgcctttctcctctttcctttaaagtaggcgataaggaatacttcaacgaacgccctatctctacccagcagagtggttttgtattcgtggcacaaatgcgttccactttgcccgatgctatcggcggcgtattgtggtttggtacggacgatgccaacatgactgtatttactcccgtatattgctgtacggacaaagttcccgtatgctattcgcgcgtggacggtgcagactatatcactttctcatggaactcctctttctggattttcaactgggtctccaatatggtatatcctcgctatgacctgatgattggcgatgtgcgtgccacacagaccgagctcgaaacaaccttcaacgaagcacaggaaggcattgagaccgctgctgccaaactcttggagaaagatccggctaaagcgaaaacattcttgacaaactataccaatatgactgcccaaagcacgctcgatgcatggaagcgtctgggcgaattcatgattgtgaaatataatgacggcgttgttaaacgtatgaaagacggtaagtttgaacgtaattctatcggacaaccggcaggcgtggtccgtccgggttacccgaaagagtttcttgaagagtatgtcaaacagaccggcgacagatataaaatgcctcaatgacagtttgggcaaatgagatatttcgttcatattcttagtaaatactgtacagatttgtgaatctacggtaaaaaaaattaggatatttgaacttaatcttctacatttgtgtcttaacaaacaattgaagtattaacctttaaaatagaaatagtcttatggaaaatcaggaactgattaaacaggtcactgagaaagctgaaaaatggcttaccccggcttatgatgccgaaactcaggcagaagtgaaacgtatgttggaaaatccagataaaaccgaactgatagagtgtttttataaagacttggaatttggtacaggcggcttgcgtggtatcatgggcgcaggcagcaaccgtatgaatatttatacggtaggcgctgctacccagggattggctaactatctgaacaaatgtttcaaagataaagaacaaatttccgtagtagtgggccacgattgccgtaacaacagtcgtaagttcgctgagatctcggctgatattttttctgcaaacggcatcaaggtttatctctttgaggatttgcgtcccactccggaggtttcctttgctatccgtcatctgggctgccaaagcggtatcaacctgactgcaagccataacccgaaagaatacaacggttacaaggcctattgggatgatggtgcgcaggtacttgccccgcacgatacagccattattgatgaggtaaacaaagtgactgttgaggacatcaagttcaaaggcaacaaagatttgattcagattatcggtgaggacatagataaggtgtatctggataaagtccatgccctttccattgatccggaagtgattaagcgtcagaaagaccttagcatcgtctatactccgctccatggtgcaggtagggtactcattcctgcttccttgaaagagtggggctttgagaatgtgcactgtgtacccgaacaaatggtaaagagcggagatttcccgacagttgtttctccgaatcctgaaaatgcggaagccctttccatggcaatcgaactcgccaagaagattgatgcagacatcgtaatggcaagtgatcctgatgcagaccgcgtgggtatggcatgcaaggacgacaaaggcgaatgggtactgattaacggcaatcagacttgcttgcttttcctgtactacatcatcaagaaccgtatcgcaaccggcaagatgcaacctacggatttcatcgtaaagaccattgtcactaccgagctcatcaaagctgttgccgataagaacaagattgaaatgatcgactgctacaccggtttcaagtggattgcccgcgagatccgtctgcgtgaaggcaaacaacaatacatcggtggaggtgaagaaagctacggtttccttgccgaagatttcgttcgcgataaagatgctgtttcggcctgctcactgttggctgagatttgtgcttgggcaaaggatcagggcaagacactgtatgacatcttaatggacatttatgtggaatacggcttctctaaagaaactaccgttaatgtggtgaaaccgggtaagagtggtgcagatgaaatcaaggccatgatggataatttccgcgctaatccgccgagagaaatcggtggttctgccgttgagctggtcaaggactataagacgctgaaagctacggatgctcaaggtaactcaacagctttgaatatgcctgaaacatcaaatgttctccagtatttcacagtagacggcacgaagatttccgttcgtccttccggaacagagcccaagattaaattctacattgaagtgaagggtgaaatgggatgtcccaagtgctacggcagtgccaatgctgaagctgaaaagaaagtggaagcagtacgcaaatcactcggtatctaagaaggtttaattcttacatataggaaaggtgcaggtggcagaagccgcttgcaccttttgtgttttatgatggtaaatgtgtggtggttccgaatgtattaagtttcttttatattctttatgccagtctgcaaatccattcttcgttgaatactgttcttatatgcgacagaggtcgacagttaatagatagtatgacagattgcggttgcacgccaattggttgatgtgaatgagagtcgtttcattcgtagttgttcgtttgcgagtgcgtgttttccgcaatctgtttttttgtttcttttccccctttgagtcattaatgcttttaaaactctttggttccttacctctttagttgttattttccagccaccagtcaatcaattttcgtgcaatgcttagcttgcgtggaatttccggcaggttgtctttggaatagaatgagccggaactgagttcgtcggcttgcagcttgatttccccactttcatagtcggcaatgaagcccaccattaatccgctgggatagggccagggctggctgccaaagtaagtgatgttcttcacctttagtccggtttcttccatgacttcccgttctacgcattgctccaaagtttcgccagcctcaaggaagccggctaccagtccatgaaaagtgccgcggaagttgcgtgcatgtaccagcagtatctctttacctttccgtatcagtacgatgattgccgtagatacgggagggtacatttcatttccacatttcgggcatttcttcatgataggggtttgctgttccataggagtgccgcatacggggcagaaacggctatgctcgtcccaatagagtatctgaaatgcctttccggcggacaggtattcgtctgcggaaatgtagtcgtacgaagcccgcaagcctatcattacccattcttcggtttctgcgacgggctgtcccgtagcaaatgcccgcacttgcttaccgttgggcgggaatacgtcgtgtatattgcttccgctttccggtgccaaggggggatttatgctgacgggtacgctgtattttatctctcctttttccgtatatcctttcttcaatagcagttggtccttgaagaagacgaaccactgcgtggagggtttgatttctgttgaatcttccattgcttgttattttttttggggggatgaacacgagaacacagaggtacagagattcttttcaaagagataaagcattaatttctgtgtctttgtgcctctatgttcgccccctaaatttcgtttgctgtgtctttttcttgccgcacatagaccgttgaccttcccattccgcggcggcgcaggaacccttgccggatgaatttgttcagctcgtctatggcggcatgtctggttagtccgctcaattggatgtattcgttcttgttgatacatacattctgcttgaggaacagtttcagttcggcttttcttgtttcttcggtggtctctactacttttttcgatttcttggtagtggagtgtacacgttccaacgtcattttcttcttgatgttgttgcggaacgtgctgctgatgcgcaggtgtacgttttggaattggacggattcggagcggattttctttttctcgtcgtcggtctcgcgcaagcatttcagtgaagtgctgaagaatccgagttctcccagctccacgatgtttccgttggccagcaaatcgcacaactcgtcaatgcaggcatccaatgctgcccctatcacattcttgggcagatgttggaaagttgcgatatgttccacaaactccttttgggtataagtccttttcgggcagatacgtgcatggagtgatttcttgtcttctttcccgtcgggcgaaggcgtttcgtaaaggtcgtaatacgcgctcataagatatttatttttgtttatagcgataaacagttctcgtcgcttcggggaattatttttgtcgctaagcggattaattttcttcttcctaaaaactaatcgtccgacaactgttgcattatcgttcgacagttgtttaattatcgtccgacagctgtcggacgaaacagaaacgggtatgggacgattaattcttagtgagcaaaggtataaaaaattgtgatacgaaaggtagtgtttggggagaaaaaaaatcccccgttaaggacgagggaacctaatgttttcacaacggaataatccttattgtgacttgcttcattttagtatggcaaatgtataaaataaatatggaaatacaatacttatattaataaaaaaaatacctttgaagagaatactcaaaatatgatactatgaaaacaatacttggattggatttgggaaccaatagtgtaggatgggctgtaataaactctgtaattaaagagcaggccgaaagaatttggatagaaacggccggaagcaggattattccgatggatgctgctgtattgggagatttcgacaaagggaattctatatcgcaaacatctgaaaggacacgactcagaggggctcgccggttgcgcgaacgtcaattgttacgtcgtgaacgattacataaagtgttgaatattttaggctttttgcccaatcattacttagaatatattgattttgagaagcatcccggaaaattcttagccgatgccgagcctaaattagcgtgggtaaaagatgagcaagggaaatatacttttttatttcaagctgcatttgatgaaatgttggcggattttgcaatacatcagccttcattggtttctggtgataaaaagataccttacgattggacaatttattatcttcgcaagaaagctttgacagaaatgattagtaaggaagaattggcttggattcttttgaactttaatcagaaacgcggttattatcaacttagaggagaagaggaggaagacaatgccgggaaatcagttgaattttatgcgttgaaagtgctgacagtggaagcgactgatgaaaagaaaggccgggacgtatggtataatgtacatttggaaaacggttggatatatcgtagaagcagcagtgtgcctttggattgggaaggtcaggtaaaagagtttattgtaacgactgacttgaatccggatggtactccgaaattagataaatatggagaggtaaagcgttctttcagagctcctaaggaggatgactggatgttgataaagaaaaggactgaagctgacattgccaatactcataaaactgttggagcctatatttatgatactttgttgcagaaaccgcaacaaaaaataataggaaaactggtgaagacggtggagcggaaactttatagggacgaactgagcttgatattgcagaaacagtgtgcttttcatgctgagttgcaggacagagctttatatgcgaggtgtgttgaagcattgtatccgagcaatgaagtgcgacggaagaatatagccaatcgggattttgtttatttattaatggatgatatcttgttttatcaaagaccgttaaaaaccaaaaagtcgttgatagccaattgtccttacgaggagaatgaatatgtagatcgggaaacgggcgaaataaaaaaggctcctttaaaatgtatagccaaatcacatcctctttttcaagagttccgtttgtggaatttcctttctaatattcggatataccagaaagaaaaagaaataaatggaactttacatcttgatgtggatgtgacagcagagttcctgaaaacagaggatgattatgtggcattgtttgattggctgaattctcggaaggaaatagaacaaaagaccttcctgaaataccctaaatttggattgaaaaaggaaatcagtaattatcggtggaattatgtagaagataaacagtatccgtgcaatgagacacggcatgctattctttccagtttggaaaaagccaatgtctgtattgatttcttgtcaaatgagaaagaggtagctttgtggcatattctatattctgtaagtgacaagcaggaaatagagaaagctttacgcacttttgcggcaaagaatgggttggatgaatcttttgtggaagcgtttaagaagttccctccattcaaatctgaatatggggcttattctgccaaggcgataaaaaaaatgttgcctttgatgagatgcggaaaatattgggacgtgtcttcgattgatgatacaaccaaagaaagaatcaaaaagattgttacaggtgagtatgacgagagaatagccgtcaaggttagggataaggtgatgaacttatcggatatttcttgttttaggaggcttccattatggctggcttgttacattgtgtacaatcgtcattcggaggataaagaggcggtcaaatgggaaagtcctgcggatattgatgcttatttggcttcttttaagcaacattcattacgcaatcctattgtggaacaagtgataaccgaaacattgcgtgttgtacgggatatttggaagcaggtggggagaattgatgaaatccatatagagttaggacgtgagatgaaaaatcctgcggataaacgtaaaagaatgactgcgcagattttggaaaatgagaatgccaatctgcgtataaaggcattgcttgctgaatttatgaatccggaatatgagatagagaatgtccgtccttattcaccaagccagcaagaaatcttgcggatttatgaagatacggttttacatgccgaagaccaattgcctgaagagatagatgcaatattgaaaaagttcaatagcagtaaagtgccgaccaaatcagagttcctgcgttataaattatggctggagcagaaatatcgttcgccttataccggtgagctgatacctttgggcaagttgtttactgctgcttatgagatagagcatgtcattcctcaatcccgctattttgatgattcattttccaataaggtgatatgcgagtctgctgtgaataagttgaaagacaatcagctgggatatgaatttatcaagaaccatcatgggcagaaagttgaagtgggttttggaaaatcggtcgaaatcttttctgtggatagttacgaaagatttgtaaaagagcaatatgccaaatctgccgtgaaaatgaaaaaattgttgatggatgatattcccgaacaatttatagaacggcagttgaatgatagccggtacatcagtaaggtgattaagggacttttgtcaaatattgttcgtgaaaagaatgatagcggtgaatatgaaccggaggctgtttccaaaaatatagtagtttgcacaggaagcgtgacggacaggctgaaaagggattggggaatgaatgatgtctggaacagtattgtatatccccgttttgaacgtttaaactccttgactgatactcagagttttgggcattgggagaataaaagcgggaagaaagtctttcaaacggagttgcctcttgaatatcaaaaaggattcagcaagaaacgcattgaccatcggcatcacgctatggatgcaatagtgatagcttgtgctacgcggaatcatgtgaactacctaagcaatgagtctgcaagccggaatgcgaaaatctctcgttatgatttgcaaagattgttgtgtgacaagaacaggacagatgataatggcaattataagtgggttataaagaagccatgggatacttttacgcaagatgcgagggaggtattgagcaaaatagtggttagcttgaagcagaatttgcgcattataaataagacaactaacgtttataggcattttgatgcaactgtgaatcgtgtttatgagaaacagaaaaccggtgatagttgggctatccgtaaaccgatgcacaaagatacagtctttggagcggtgaacctgagaaaagtaaaagttgtgcgattatcggtcgccttggatactcctgccatgattgttgacaaaagagtgaagaacaaagtgtttgaactgctgtcttataaatatgataagaagagaattgaaaaatattttaaagaaaatgctttcttgtggaaagtatggggcacagaacgaaacggtttaactatggatagtacaaaacggcgcataagccctttatttataggcgtttcagaaagatagtacacgaacgctgatttaaaacgaaacggtttgaactttacttttgctttacttctactttacacttgaaagccttgatttagggtgaatgcgggcagtcgtttacttttctctttacttcgcttatatttccccggaaatgaaaaacaaagccgttatagagccgcaaaatgagttcgctggggactttgtttttgctgctattgtatcgctccttttttggtagtttaacaatgtaaatacttccaaatactcattatttagtagttttgcaaaaataaaacttcaaatatacatgggaaagacagaaacaaaggtaatacatgtacacctgatattcgagaaaaaagatttctactttggtagtatatctgccatattcaaaatactggatgaagaacgtgttggcattaagaaaagtacccttttgcatgccggtttaagtgatggaacatccttaccaacccgaaaagctatcataaagcaatcccatcttattaggagtggaagctaagatattgttatacaattttttaaaggctgttagaacggttctaaaccagtattctaacagcctatttttttgttatcggttacaaaaagagttacggaaaaaggctacaaaaaaataagttaaaagggttacaaaagggttacaaaaaacatttcttgtaatggtgtacagatatacaaaatgactaaaaaacactacttttgacagaaaaagccttttaaatagatagaaaaagccaatatataaatatatcaacctacataatttagtatattaaaccaatgattataagatacttatattcatctttatatctcctatctctattttttgcgtgtgtatgccctaaaatagctactcaagtcctaccgagccaaccacaacagcgataccggttatttcatcaactggtatatcaaaaggcgggtattccttattgtctgaaatggcacgcagatgcttcttgtcttcacccggcatgatacgctttaccaaaatcccctgttcccttgttgctattacatgacatttgttccattgaataaactgagtatttctcaaaatagaacaggcaattacatctccggaattaaaatgcggatacatagatagtccggaaacttcaatcataaagtctacatgacaatatttaaatttaggaataacatagtattcttttacatcagcttcttcaatagagaaatcgccattaccaaaaccagccgctgcctgttgtgtcactaaaggaatagggtgtaacccattgcgtgcagcttcagcaaatggtatggcttcaggtttatcagacataacacatgagacgttgtttgtgccatagtcaatacttatatgtctaactgattttgacttaatgttacaatcggaactcttaatatctttcagcattgttccttctcctgttagcagccatgaagcatttatttcgggatacacctttaggatattttctaatttatcagagcctatattacctttgttattaagtgactttctaaaagaattattagacatgcctatatttctttcaaactcagcgattgaaatgcccttataatcaataaacttctttacattttctaaaaccataactattcaaattaggaaaaaatatatcataataggaaaatatcctatcatttatttggatatttcctaatttatattcaactttgcagcgtgttaaagttattaacgggcggtaaatataagaaaaacgctcgacagttcaatgattaaagaagtgaaatatgaaaaggtactggtttgaattgacagatgaacgctacaatgatttaggtgcagcgattccagacggaagcaacaaacaggctgctatcaacaaggcaagacaatggatgagggacaacagcgtggcaaaggcgatgttggcagtgaacagcatgagaacggataaccttatagacgtaatcaacatagaattgaattaaaatataaaacgtatgacacagaaagaatttgaagaaagaaccaaacgtacagtaaaggcggaagattatttcatcattgagcggctttacatggctaccaacatggataaggacgagttctgcaaggagtttcaggagatgaataattccataaggccgggaatccggcaatcgctccgggaaatttccaatcgcctggggagtcttgaagcccaaaatgccacccttaaaatctccatgagaaaacgtgataatgacttggcggatttcctaatcggaaaagcccatgcgtatgacgataccgatttccgcaaccaggcagtgaagttggtcggagaagtggaagtagtgaaacgtactatcgagttggggcttccgctttgggatgaagaccggaagtgtatcctttcgataattgacgaacaaggcaaaaagattgccggataactggcagcccggaaagacggacgggcaattagttcagtcggtagaacaggcgaaacttaaccatagaagccatggtccccggttcgattccgggattgcccacaaggtaacataaaaaacagaatgacgatatgaaagcaatcaaggtatttattgacagagaggagcaatttaagatgctctgtctcgtagaaaagctgaacgggcatccggatattatggcaaccgcaaccggaccgactgaatttgtggtggcggctgaaggtgaatactcgatggcttatacaagggcggttatagaaggccggttgaatgattgtacgattgaaataattaaataatgtgattatgaaaggaactctatttcaaagctgtttccataccttctatttaataatgaaacggtgtgtgaaaggattaaagttaagtttactaaagaagaagagtggtttacggatgtatcaatgtgaaaattgtattttacatagtcaacgccgttcatttcagcctcttcgtcaggatggtaaaattcttcgctcagagaaacatcaatcttatatattcccagaaggatacgaaagtatgtgtgaaaactttttgcattttcttgaatctcaacagaaggaagagtgtctggaacaaatatgatattgacttttaaaggatacataaatcagaattttagttagacatgctgcaaatgtagcaaaacttccgcggttcgggagaatagcggaggtatttaacaacagagtattaacaacaagacaatatagcgatgaaaaagcatatttatttggataaggccggtaaaggcaaattacgtcagatatttaattgtactgatgtaatgatatggaaggccttaacatttgagagcgacagcgaattggcccgcaaaatccgttatacagcggtaaaagagtttggtggttttaccataaatgacggtttggcgatggactgggatacaacccatcagactgcggagcataccatgacgcagacattcgggaaacgggttaaaatcattgcccatacggatgcccctttggttattgctttcatagacggaaaggaagtaaagagagtggaaagttccttaatcccctctgattttatgagctttcaggatgaaattgtgagaatggcctacggcccccgaatttaaaatgtcattatggaatactacggaaaaatattatgtatatcaaaagatgacctgacacgcgacgatcgatccgtttttggggaatataagattgatgcgaataaagctccgataatgagtgaaagttgctataagcaattagtttatcgaaagaaaataaaggttgtccgtaaaggcataggtcgtggggttactgcccttgtttccgttgaaagtcttcctgataagtataaaaaattagttgaacaaaagtacggtagtatggatgttgaaatgttaagaaactggtttgcctcacattgggaagtggatgcggatgcccgtagtttttattcccgcttccgcctgccttccggtaaacctctggagccggaacagcaacaggaatatacccttaatgcttctgccattcaatcggtgctccgattaatgagtgatattaaaatgaaacgtgccgttatgcagggaaaccgtttgaaatgggaagagatggccggtgcgataggtttctttcaaaaggagttcgggcataacctgccactttctgtaaaccgtttcaagaagaaagtcaaggattttcaagaaagaagttatatcagcctgataagtggcaaattcggtaaccagaacaaaaggcttgttgatgtacacgttgagaatttgttactcagtttggctacattgccgaataagccatggaataaggacgtatgggaaatgtatgatatgtttatagacggtaaattacaggtatgtgacccttctaccggcgaaattttcaatacaaccgatttcttggataaaagaggcaatccgataaagttaagccgttcaacggtcaatgcttatctgaaccagcccaaaaatcagattttgataaaccataaacttatgagttggagtacatttatgcacaatgagcgccctcatatacaccgtcatgccccggaattttctttcagtaagatttcatttgatgaccgggatttaccgcgtaagctgaaagataccaagcagcgcccgaaggcttattacgcctatgatgtaacaagtcaatgcgtagtcggatttgcttacaatcgcaataagaacattgatttagtggtagactgttttcgtgacatgttccgccgcatggagcgtaacggttggaattgccctgcacaagtcgaggttgagaatcaccttatgagccaatggaaagagagctttctaaaagccggtacattgtttccatttgtccgcttctgtgctccgttaaactcacaagaaaagtatgcagaatctttaaatggtgcaaagaaacgcagcattgaacataaaaatcatcttgggattggtcgcttctatgctaaaaatgagaaatatcgggctgaaagcaagaagataagcgatgaatataacgatacttatgaagatagggaatattacacatgggaacagctcatagaagaagacatgaacgatgttcatgagttcaatcacactttacatcctaatcaaaagaaataccctggcatgacacgctgggaggttctttgccagaacatgaacccgacattgcaaccggtggacaaagctattttataccggtttatcggtgagcatgtagaaacaagtatcaggcgtaacagctattgccgcgtgaattatgcagacttttggctgagcagtccggaagttctcgacaaactggctcccaataacaacaaagtggatgcttactatatgttggatgaagaaggaaacatgagtgatgtgtacatctaccaaaatggggttctgcttgataagttaagtaatgtcggagtctttaatactgctgaagcagaacagacggacgaggacaaactgataatgattgagcaaaataagttgataagccagtttgatgcaatgactaagaaagaagctattactccggtagtagtaatgaagactgagacagcacataaaatatcccaggtaaccgcaaagcctgtgcaggtagaaccagttgaagcggatgctgatgctttaatagcgcaattcagcgactataaaggacgtggggtagccggtatgtaataattataataacattaaaacgacataataatggaaataacgaatgaaatcaaacagcgcattcttgaagctattgcggtaaatcgggataattatccttcagacagcaagcatgcagcagcgctgggtattgccaccagtgtatacaataacctgaaaaaagggaaaaccgacaggcaggtaagtgataccaactggatatgtattgctcgcaggctgggtgtttcccttgcggatgaaatggagtggcacgcagccgagaccccgactttcgtttacataaccgagcagctttccatgtgtcaggaaagcggtgtatcagctctgctttgtgacatggcaaatatcggcaagacatttactgcacgcatctatgtgaaaaatcacaagaacgcggtatatgtggactgttcgcaggtaaagaccaagcaacggttagtacgcttcattgccaaggagttcggagtcaacagtaatggacgttatcaggatgtttacgacgaccttgccttttacctgaagacactggaacgtccattgattatacttgatgaagccggagaccttcagtacgaagcattcctggaactgaaagccctttggaatgcaacagagcgttgctgtgcctggtatatgatgggggcagacggtttaaaggagaagataaaccgctctatcgaatgtaaaaaggtaggatataccgaaatgttctcgcggtatggcgaccgttacaacaaggttactccggatgacggcaaagaacgtgaaacttttttgaaagcacaggccgccatggtagtgaagttgaacgctcccgactgcagcgaggtgatgaaaatcgtaaaccgtaccggtggcagtctccgtcgtgtatatactgaaattgaaaagataagaaagggggcttgatatggccgagaaaatccaaaaggcaaggcttagacgcgcctactccccgacagaggtgcaacagatgaatattccttgtttcccttttgagggagaatgggaagcagctttcgggcatcctgcacgtacgggcacatggattatatggggagaaagtgggaatgggaaaagcgctttcgtaatgaaattggctaaatatttgtgtaattggtgtacggtcgcttatgacagtcttgaagaaagtacggggctttctttacaaaacgcgatcaatcgtgaacacatggaagaggttaactaccgtttcaagattttagacagagaggcgatgcctgaattaagcgaacgcctgttaaaacgtcgtagccctgatgtggtaatcattgatagctttcaatattccgggcttacatacgcaacctacaaggctatgaaagaaaaacaccataacaaacttctgatattcgtgagtcactgcgaggggataaaacctgaagggcgagctgcaaaaaaggtagcttatgatgctgatgtgaaaatatatatatcctgtttcagagcagtctgcaaagggcgtttcataaccaaacccgggaatcacttcaccatctggaaggaaggcgctgcacagtgctttccgacggaaataaaagataaagaaaatgagaacacgtaactacgccaggttttatgttctgctgggccgaatgtccgcattagacaaggaggaattaaaagtccagttagtacgccaatttactgacggacgtaccgaatccctaaaggaaatgacggataaagagtatactgccatgtgtgacgggatgcaacagcagattggtaattataaatcccgcgagatttatcgtgaggaattacgccggaaacgctcggcagttcttcatctattgcaaaaaataggtgttgacacgaccgactgggagagagttaatgcttactgcagaaatccccgtatatccggtaaagaattcagtaagctgacaatagaggagctggagatacttagcgtaaagttaaggattatccggcgaaaagataacaatagtaataaacaacttttaaactaaaaaattatggcaagaacaaagaaaacagtagtcagcggtatcacccgcgaacaggcggaacaggcgtttgcagacttcgcagccgccgatgccaaagtacagaacctcacctcaaaaatggatattgagatgacccgtatccgcgaaaagtatgcggatcagttggcagaactgtctgccacgaaggaaaagaatttcgacatcatgcaggcatacgccgtagaaaacaaggaagaactattctccaagcggaagagccttgagagtgctcatggtgtattcggtttccgtaccggtacaccgaaacttaagaacctgaaaggttttacctgggcggccgtaaccaacatctgcaaggaattgttgccgcagtatatccgcacaacggacgagctggcaaaagataagcttttggctgaccgggataacccggaagtagctgaatacttcccgaagatcggcgtacaggttgtacaggaagagacattctatgtggaaccaaagaaagagaatgatgtgcagcaatctgcctgaagaatattacgaataccggccgcatggcaggaactgggtggtgtaccgtatccgacgtgacgccaccggttccaccgggaccaagatcggggaattccttacgaaagaggaagcccggcgtgaggtctatcggttgaatggctggaaaacagatctgaaatgaaaaagacatttaaacaatgggctaagcaggataaagacttagatgagtttttatctccgggtgactatattgatgaaaggttatataactatataggagaaatcacttgtcctgcatattgctcaaaagactttattcaagggtgtgatgcaattagaagtgaagatggtgtattattttacataacagtgtacagaaccaatgataataagtacttatacctcggtgttttaccggagtttaaacagtaattcaaaacaataaagatatgaatcaaattaagtttaagataaaagtcctgccatctataaagacaacaggacttgaaaaaaatggcagcgacctactcttccactgttacgcagtaccatcggcgctacaaggcttaacttctctgttcggaatgggaagaggtggaacccttgtgcaataaccacctaaatttagggacttagctgtgctaagtaattttctctattaaccactataaaaggtcaatacagtttagtacaaagtcccaacctaccgtctattcaattttaagcattgtcatagccgtacggtagtaaagctatagaatgctttttctaattatatttttcataattaaaaaaattactcatttgcaacattgcaaatggagcctaaatgtaataataaaaaataatatggcaaaaatttatgtagcaagtagttggagaaatcaacatcaaccacaagtagttagttttcttcgtgaacagggacatgaggtttacgactttagacatcctgctgggaaaactgaattccagtggtcgcagattgatgaagattggaagaattggagtacagaccaatatagggctgcgcttgaacatcccattgcgcaggctggtttcaaatctgattttgatgcaatgcaatgggctgatgtttgtgttcttgtattaccttgtggacgttctgcgcattcggaggcaggatggatgaaaggtgctggcaaaaaggtaatagtctatcaaatttgggaagaagagccagaactaatgtataagctatttgacggtgtatgttcaatgggaataggtttacagatgtttttagctgaatttgataaagagaaaaataacgtataactaaataagaaagaataatggcaaagataacttacaaatcaagtattcccaatgacaagccgctttggcttctcaagctccagttggcagtcagccagctggatgccaccgaattgaaaggtaatgagcaggatttccgtaacctgaaatcattcatcgacgctgaaatccgttcgttaatggaaaaaggcgacatccgtcgcagttttgtggaaaccgaacttcggcaggatgaaggcaggacggtgatacatatcttccgtaatcatgtggttgtccagacctattacatcgaagcatgagtgagaagaaagacatattggtactcagttccccgaactttggcgtcggtaaagaaaccataggctactatacagggtacacctgtggttactgccatggtaacggctggttctggaatcctaaaattatccatgaacgggtaaagataccctgtccgaaatgtggcggaaccggacgggtaaaaggtatcgttacagtggagtgggttccggacggg

SEQ ID NO: 1249 - DNA, 23660 bp, synthetic construct
  misc_feature 1..23660: note = Synthetic
  source 1..23660: mol_type = other DNA
agtttttaaaggtttaggcggcggggaccttccccgtcgaattgtccacaacaacgaccctcggaaaagaaagttccggcgttttacattatttggcgtttattaaatgggggagaaatgaaagaggccacagagtttcttattcttgcaagaatgagaaactctgtggcctccggatgtgaaaaccgttttttttatacttttatctcgtcatatttcattccaaatacatctgctactgctttataggtcacttttccttccaccacattcaggcctaacgccaatgccggatcgtctttgcaagcctgtttccaacctttgcaggctaaagctacggtatagggcaatgtggcattggtcagcgccatggtggatgtgaacgggacagcgccgggaatattggctactgcatagtgcacaatgtcgtctacgacatacgtaggctcactgtgagtagtggggtgggaggtttcaaaacagccaccctggtcaatggctacatccacaagtacggttccgggcttcatcattttcagcatgtctcttgtaatcaggtggggagctttatcgccgggaataaggacagaacctatcaccagatctacggtaggcagttccattttgatattatgaagtgaagaatagagtgtttttacgtttttgggcaatacttcgctgagatagcgcaagcgtggcagattcacatctgtaatcattacctcggctcccattccggcagccatttgtgcggcattagtgcctacgatgccgccccctaaaataagtacgcgtgcaggacgtacccccggcacgccacccattagttttccttttccaccctgcggtttctccaaaaaacgggcgcccacttgggtagccatgcgccctgccacttcgctcataggggtgagcaatggcaatgaatggtcttctttctctacggtttcgtaggcgatacatacggcaccgctttcaatcatggcttcggtcagaactttatcggccgcaaagtggaaataggtaaataccacttgtccctttttaatcagtttgtactccggtgcaatgggttcctttaccttgacaatcatgtcggctatggcatagacgtcttcaatggcaggcaggatttgcgcacctacggcgatgtaatcgtcgtcagagaacccactgtttatgcctgctgttgcctgcatatataccgtatgacctttcttcaccaactcggctactccggcaggggtcattcctactcggttctcgttgttcttgatttctttggggactccgataatcataatgtcatctgttaatggttaaacatgctgcaagatagcgatttctctgtctcattgtcattctgtaccaggtgttttacaacagaaaatgccgggttgttcgatgaggaaggtggcaggattattcttttttgtttaggcggagagaactattcttgttatatttgcatgcatttaaaaaataagatatgggctataagaatataaaacactctatacttttttcttttttattttgggtgggcagtgtgcaaagcgggtatgcacaggaaaccgccgggcaggaagctgttccggagatgcaaacggctgttttcactcctccttttgatttccctatcaccttttcaggcaatttcggcgagatacgttccaaccattttcatggcgggctggacttcaaaaccggtggtgttataggcaaacctgtgcatgctttggcagacgggcatatctcccgtatccgagtgacgcatggctcagggtatgtgctcgatgtggattatgataacggttattccactatcaaccgccacctcagtgcttttacaggcgatgtggcccggagagtgaaagaattgcagtatgaaaaggagagttgggaagtggagatcgttcccgaaccgggagaatatccggtaaaggcagggcaggtgatagcccttagcgggaatacgggatattctttcggccctcatctgcatttggatatgattgagtcggcaacaggggattatattgatccgctgcctttttttatggaaaaagtgaaagacaacactgctcctcatgccgagggcatcatcctgtttccgcaaccgggcaaaggggtggtaaacggaaaacagacgcgccagacctttccggcaagtccagcaaagcctatcacagcctggggattgattggagtgggagtccgcgcttatgaccatatggatggggtgggcaaccgttatggcgtgcataccgttattctggaagtggacggcgtggaagtgtttcgcagtgtggtagaccgctttgcttacgaagaaaaccgttatatcaactcatggacacatgggcaatatatgaaatcgttcgtcgaaccgggcaaccgtctgcgtatgctgcatgcgtctaacggcaaccggggactgatagaaatcaatgaagagcgtccctatcgtttggtatataccttgagtgatgctttaggtaacacctcgaaagtccgtttcaccatacagggcaagaataccgctatccgtccggtggagcatcgcgaaaaatatgccttcaaatgggataaaaccaattatcttcaggagcccggactggaactggttgtgccgcggggaatgttgtatgatgatgtgtggttgaactattccgtacgcgccgatagtggcgacgtggcttttacctatcagttgaacgacacccgtattcccatgcatggagcgtgcgagatgcgtatcggcttacgtcgtgatgatttggaagataagtcgaaatattatgtggccggcgttaccgccaaaggcggaaaatatagcgtaggcggggtttatgaggatggttttatgaaagtccgcatccgggatttggccacttatacggtagcagtcgataccgtaccgccggagatcattccgcttaatcctcagcaatggggacgtacgggccgcatagtctttagagctaaggacaaagggacgggggtcaatagctaccgcggaacgatagacgggaagtatgcactgtttggcaagcccaattccattagtggcaatctggtttgcgagctcgaccccgaacatgtgaagaaaggcggtaggcatactgtggaaatgaccgtaacggacgggtgcggcaatcaaactgtcgggcagttccattttgtatggtgaaataggaggggctgtatcctctgaaatccctttatagcattgtgatataataaattcaataataattcaaagtatgaaaagattaactctctccgtcatgttggtagtggcagttgtggcaaacacttttgcctgcaccaatcttattgtaggtaagaatgtatctacggacggttctacaattgtttcctattctgccgactcctatggattgtttggcgagttgtatcattatcccgcaggcatgcacaagaaaggcacattgattgatgtgcacgagtgggacaccggcaagtatctcggtcagatagagcaagcgcgccaaacctacaacgttatcggcaatatgaacgaatttcagcttactatcggtgagacgactttcggcgggcgtccggaactggtggatactaccggtatcattgattatggaagccttatttatctcggtctgcaacgttcgcgcacagcccgcgaagctatcaaagtgatgacagatcttgtgcaggaatacggttattacagcagcggcgaatcctttacgattgccgatcctaatgaaatctggattatggaaatgataggcaagggacccggtgtacgtggcgccgtatgggttgctgtccgcgtgcccgatgattgcatctccgcacatgccaaccaaagccgtatccaccagttcgatatgaatgacaagaacaactgcatgtattctcccgatgtcatatcctttgcccgtgagaaaggctatttcgacggagtgaacaaagatttcagttttgcaaatgcttatgcaccgcttgactttggcgctcgtcgttactgcgaagcccgcgtgtggagttactttaatatgttcacagctcgcggcaacgagttcctaccttatatattaggcgatacggataccccgatgccgttgtttgtgaagcccaaccgcaaaatctccgtacaagatgtaaagaatgccatgcgcgaccattacgagggtactcccctcgacatcagcagggatttcggtgcaggaccgtatcacactccctaccgcctttctcctctttcctttaaagtaggcgataaggaatacttcaatgaacgccctatctctacccagcagagtggttttgtattcgtggcacaaatgcgttccactttgcccgatgctatcggcggcgtattgtggtttggtacggacgatgccaacatgactgtatttactcccgtatattgctgtacggacaaagttcccgtatgctattcgcgcgtggacggtgcagactatatcactttctcatggaactcctctttctggattttcaattgggtctccaatatggtatatcctcgctatgacctgatgattggcgatgtgcgtgccacacagaccgagctcgaaacaaccttcaacgaagcacaggaaggcattgagaccgctgctgccaaactcttggagaaagatccggctaaagcgaaaacattcttgacaaactataccaatatgactgcccaaagcacgctcgatgcatggaagcgtctgggcgaattcatgattgtgaaatataatgacggtgttgttaaacgtatgaaagacggtaagtttgaacgtaattctatcggacaaccggcaggcgtggtccgtccgggttacccgaaagagtttcttgaagagtatgtcaaacagaccggcgacagatataaaatgcctcaatgacagtttgggcaaatgagatatttcgttcatattcttagtaaatactgtacagatttgtgaatctacggtaaaaaaaattaggatatttgaacttaatcttctacatttgtgtcttaacaaacaattgaagtattaacctttaaaatagaaatagtcttatggaaaatcaggaactgattaaacaggtcactgagaaagctgaaaaatggcttaccccggcttatgatgccgaaactcaggcagaagtgaaacgtatgttggaaaatccagataaaaccgaactgatagagtgtttttataaagacttggaatttggtacaggcggcttgcgtggtatcatgggagcaggcagcaaccgtatgaatatttatacggtaggcgctgctacccaaggattggctaactatctgaacaaatgtttcaaagataaagaacaaatttccgtagtagtgggtcacgattgccgtaacaacagtcgtaagttcgctgagatctcggctgatattttttctgcaaacggcatcaaggtttatctctttgaggatttgcgtcccactccggaggtttcctttgctatacgtcatctgggctgccaaagcggtatcaacctgactgcaagccataacccgaaagaatacaacggttacaaggcctattgggatgatggtgcgcaggtgcttgccccgcacgatacagccattattgatgaggtaaacaaagtgactgttgaggacatcaagttcaaaggtaacaaagatttgattcagattatcggtgaggacatagacaaggtgtatctggataaagtccatgccctctccattgatccggaagtgattaagcgtcagaaagaccttagcattgtctatactccgctccatggtgcaggtagggtactcattcctgcttccttgaaagagtggggctttgagaatgtgcactgtgtacccgaacaaatggtaaagagcggagatttcccgacagttgtttctccgaatcctgaaaatgcggaagccctttccatggcaatcgaactcgccaagaagattgatgcagacatcgtaatggcaagtgatcctgatgcagaccgcgtgggtatggcatgcaaggacgacaaaggcgaatgggtgctgataaacggcaaccagacttgcttgcttttcctgtactacatcatcaagaaccgtatcgcaaccggcaagatgcaacctacggatttcatcgtaaagaccattgtcactaccgagctcatcaaagctgttgccgataagaacaagattgaaatgatcgactgctacaccggtttcaagtggattgcccgcgagatccgtctgcgtgaaggcaaacaacaatacatcggtggaggtgaagagagctacggtttccttgccgaagatttcgttcgcgataaagatgctgtttcggcctgctcactgttggctgagatttgtgcttgggcaaaggatcagggcaagacactgtatgacatcttaatggacatttatgtggaatacggcttctctaaagaaactaccgttaatgtggtgaaaccgggtaagagtggtgcagatgaaatcaaggccatgatggataatttccgcgctaatccgccgaaagaaatcggtggttctgccgttgagctggtcaaggactataagacgctgaaagctacggatgctcaaggtaactcaacagctttgaatatgcctgaaacatcaaatgttctccagtatttcacagtagacggcacgaagatttccgttcgtccttccggaacggaacccaagattaaattctacattgaagtgaagggtgaaatgggatgtcccaagtgctacggcagtgccaatgctgaagctgaaaagaaagtggaagcagtacgcaaatcactcggtatctaagaaggtttaattcttacatataggaaaggtgcaggtggcagaagccgcttgcaccttttgtgttttctgatggtaaatgtgtggtggttccgaatgtattaagtttcttttatattctttatgccagtctgcaaatcattctccgttgaatactgttcttatatgcgacagaggtcgacagttaatagatagtatgacagattgcggttgcacgccaattggttgatgtgaatgagagtcgtttcattcgtagttgttcgtttgcgagtgcgtgttttccgcaatctgtttttttgtttcttttcccctttgagtcattaatgcttttaaaactctttggttccttacctctttagttattattttccagccaccagtcaatcaattttcgtgcaatgcttagcttgcgtggaatttccggcaggttgtctttggaatagaatgagccggaactgagttcgtcggcttgcagcttgatttccccactttcatagtcggcaatgaagcccaccattaatccgctgggatagggccagggctggctgccgaagtaagtgatgttcttcacctttagtccggtttcttccatgacttcccgttctacgcattgctccaaagtttcgccagcctcaaggaagccggctaccagtccatgaaaagtgccgcggaagttgcgtgcatgtaccagcagtatctctttacctttccgtatcagtacgatgattgccgtagatacgggagggtacatttcatttccacatttcgggcatttcttcatgataggggtttgctgttccataggagtgccgcatacggggcagaaacggctatgctcgtcccaatagagtatctggaatgcctttccggcggacaggtattcgtctgcggaaatgtagtcgtacgaagcccgcaagcctatcattacccattcttcggtttctgcgacgggctgtcccgtagcaaatgcccgcacttgcttaccgttgggcgggaatacgtcgtgtatattgcttccgctttccggtgccaaggggggatttatgctgacgggtacgctgtattttatctctcctttttccgtatatcctttcttcaatagcagttggtcattgaagaagacgaaccactgcgtggagggtttgatttctgttgaatcttccattgcttgttatttttttggggggatgaacacgagaacacagaggtacagagattcttttcaaagagataaagcattaatttctgtgtctttgtgcctctatgttcgccccctaaatttcgtttgctgtgtctttttcttgccgcacatagaccgttgaccttcccatcccgcggcggcgcaggaacccttgcaggatgaatttgttcagttcgtctatggcggcatgcctggtcagcccactcaattggatgtattcgtttttgttgatgcatacattccgcttgaggaacagttccagttcggcttttcttgtttcttcggtggtctctactgcctttttcgatttcttggtagtggagtgtacacgttccaacgtcatttttttcttgatgttgttgcggaacgtgctgctgatgcgcaggtgtacgttttggaattggacggattcggagcggattttctttttctcgtcgtcggtctcgcgcaaacatttcagtgaagtgctgaagaatccgagttctcccagctccacgatgtttccgttggcaaggaggtcgcacaactcgtcaatgcaggcatccaatgctgcccctatcacattcttgggcagatgttggaaagttgcgatatgttccacaaactccttttgggtataagtccttttcgggcagatacgtgcatggagtgatttcttgtcttctttcccgtcgggcgaaggcgtttcgtaaaggtcgtaatacgcgctcataagatatttatttttgtttatagcgataaacagttctcgtcgcttcggggaattatttttgtcgctaagcggattaattttcttcttcctaaaaactaatcgtccgacaactgttgcattatcgttcgacagttgtttaattatcgtccgacagctgtcggacgaaacagaaactggtatgggacgattaattcttagtgagcaaaggtataaaatattgtgatacgaaaggtagtgtttggggagaaaaaaatcccccgttaaggacgagggaacctaatgttttcacaacggaataatccttattgtgacttgcttcattttagtatggcaaatgtataaaataaatatggaaatacaatacttatattaataaaaaaaaatacctttgaagagaatactcaaaatatgatactatgaaaacgatacttggattggatttgggaaccaatagtgtaggatgggctgtaataaactctgtaattaaagagcaggccgaaagaatttggatagaaatggccggaagcaggattattccgatggatgctgctgtattgggagatttcgacaaagggaattctatatcgcaaacatctgaaaggacacgactcagaggggctcgccggttgcgcgaacgtcaattgttacgtcgtgaacgattacataaagtgttgaatattttaggttttttgcccaatcattacttagaatatattgattttgagaagcatcccggaaaattcttagccgatgccgagcctaaattagcgtgggtaaaagatgagcaagggaaatatacttttttatttcaagctgcatttgatgaaatgttggcggattttgcaatacatcagccttcattggtttctggtgataaaaagataccttacgattggacaatttattatcttcgcaagaaagctttgacagaaatgattagtaaggaagaattggcttggattcttttgaactttaatcagaaacgcggttattatcaacttagaggagaagaggaggaagacaatgccgggaaatcagttgaattttatgcgttgaaagtgctgacagtggaagcgactgatgaaaagaaaggccgggacgtatggtataatgtacatttggaaaacggttggatatatcgtagaagcagcagtgtgcctttggattgggaaggtcaggtaaaagagtttattgtaacgactgacttgaatccggatggtactccgaattagataaatatggagaggtaaagcgttctttcagagctcctaaggaggatgactggatgttgataaagaaaaggactgaagctgacattgccaatactcataaaactgttggagcctatatttatgatactttgttgcagaaaccgcaacaaaaaataataggaaaactggtgaagacggtggagcggaaactttatagggacgaactgagcttgatattgcagaaacagtgtgcttttcatgctgagttgcaggacagagctttatatgcgaggtgtgttgaagcattgtatccgagcaatgaagtgcgacggaagaatatagccaatcgggattttgtttatttattaatggatgatatcttgttttatcaaaggccgttaaaaaccaaaaagtcgttgatagccaattgtccttacgaggagaatgaatatgtagatcgggaaacgggcgaaataaaaaaggctcctttaaaatgtatagccaaatcacatcctctttttcaagagttccgtttgtggaatttcctttctaatattcggatataccagaaagaaaaagaaataaatggaactttacatcttgatgtggatgtgacagcagagttcctgaaaacagaggatgattatgtggcattgtttgattggctgaattctcggaaggaaatagaacaaaagaccttcctgaaataccctaaatttggattgaaaaaggaaatcagtaattatcggtggaattatgtagaagataaacagtatccgtgcaatgagacacggcatgctattctttccagtttggaaaaagccaatgtctgtattgatttcttgtcaaatgagaaagaggtagctttgtggcatattctatattctgtaagtgacaagcaggaaatagagaaagctttacgcacttttgcggcaaagaatgggttggatgaatcttttgtggaagcgtttaagaagttccctccattcaaatctgaatatggggcttattctgccaaggcgataaaaaaaatgttgcctttgatgagatgcggaaaatattgggacgtgtcttcgattgatgatacaaccaaagaaagaatcaaaaagattgttacaggtgagtatgacgagagaatatccgtcaaggttagggataaggtgatgaacttatcggatatttcttgttttaggaggcttccattatggctggcttgttacattgtgtacaatcgtcattcggaggataaagaggcggtcaaatgggaaagtcctgcggatattgatgcttatttggcttcttttaagcaacattcattacgcaatcctattgtggaacaagtgataaccgaaacattgcgtgttgtacgggatatttggaagcaggtggggagaattgatgaaatccatatagagttaggacgtgagatgaaaaatcctgcggataaacgtaaaagaatgactgcgcagattttggaaaatgagaatgccaatctgcgtataaaggcattgcttgctgaatttatgaatccggaatatgagatagagaatgttcgtccttattcaccaagccagcaagaaatcttgcggatttatgaagatacggttttacatgccgaagaccaattgcctgaagagatagatgcaatattgaaaaagttcaatagcagtaaagtgccgaccaaatcagagttcctgcgttataaattatggctggagcagaaatatcgttcgccttataccggtgagctgatacctttgggcaagttgtttactgctgcttatgagatagagcatgtcattcctcaatcccgctattttgatgattcattttccaataaggtgatatgtgagtctgctgtgaataagttgaaagacaatcagctgggatatgaatttatcaagaaccatcatgggcagaaagttgaagtgggttttggaaaatcggtcgaaatcttttctgtggatagttacgaaagatttgtaaaagagcaatatgccaaatctgccgtgaaaatgaaaaaattgttgatggatgatattcccgaacaatttatagaacggcagttgaatgatagccggtacatcagtaaggtgattaagggacttttgtcaaatattgttcgtgaaaagaatgatagcggtgaatatgaaccggaggctgtttccaaaaatatagtagtttgcacaggaagcgtgacggacaggctgaaaagggattggggaatgaatgatgtctggaacagtattgtatatccccgttttgaacgtttaaactccttgactgatactcagagttttgggcattgggagaataaaagcgggaagaaagtctttcaaacggagttgcctcttgaatatcaaaaaggattcagcaagaaacgcattgaccatcggcatcacgctatggatgcaatagtgatagcttgtgctacgcggaatcatgtgaactacctaagcaatgagtctgcaagccggaatgcgaaaatctctcgttatgatttgcaaagattattgtgtgacaagagtaggacagatgataatggcaattataagtgggttataaagaagccatgggatacttttacgcaagatgcgagggaggtattgagcaaaatagtggttagcttgaagcagaatttgcgcattataaataagacaactaacgtttataggcattttgatgcaactgtgaatcgtgtttatcagaaacagaaaaccggtgatagttgggctatccgtaaaccgatgcacaaagatacagtctttggagcggtgaacctgagaaaagtaaaagttgtgcgattatcggtcgccttggatactcctgccatgattgttgacaaaagagtgaagaataaagtgtttgaactgctgtcttataaatatgataagaagagaattgaaaaatattttaaagaaaatgctttcttgtggaaagaactggatttggctaaagttgcagtttattattttacagaagctacgacagagcctttggtcgcagtacgcaaacctctcgattcaactttcaatgagaagaaaataaaagaatcggtaacagacaccggtatacagaaaatacttctaaatcatttgtgtacaaaggaaggaaagcccgatttagcattttctgcggaaggcatagaggaaatgaaccgtaatcttttgcagctgaataatggtaaaagtcatcagccgatatataaggtgagggtgtatgaaccacgtggaaataaatttagtgtcggtgtacttggtaataaagggactaaatgggtggaagctgccaaaggaaccaatttgtttttcgctatttatataacggaggatggaaaaagaacgtatgagactattcctttaaatgtggttatagagcgtgagaaacaaggacttgttcctgttccggatagaaatgaaaagggagataaactgttgttttggctgtctcctaatgatttggtatatctgccaactgaagaagaacgggaatttggtagaataaatgagccgatagataggggaaggatttataagatggtaagttgtacaggaaatgaagggcatttcattcctgcaaacgtggctaatccgatagtacctgttattgagttgggtagtaataataaggcacaaagagcatggactaatgaaatgataaaagatatttgtatccctattaaagttgatagattgggtcatattatagaagttaagtatagaatagatgaataatataaagttatttcaagaaaaaaaaatccgttccgtatggaacgaggaagaacagcaatggtgtttttctgttgtagatgtagttggtgtattgaccgatagtgtgaatcctacagactatcctgaattggcccaagaacgtatgaaggaactctatgaatagaaaggttatcccaaagattggattgacaagcgtttgagaggtattgccattcgtcagaatctgacggatgagtggaaggaaaggggaattacggaaaaaagtgattatgctattcttacggcagaatttctaaagcaacgtttggactgactccctcagactataagatatataaagtactgacaaagaaaaatcaaaatcttcgtggccacatgtctgatttggaactgatttttacgatgcttggtgagcgtgttactaccgaaatatctcagaaagagaatccggatacatttaccaaaaataaacaaatggcacagcatggcggaaacgttgctggggtggctcgtgagcaagccgaaaaagagttgggtggtagtgttgtttctcctgaaaattttctatcggattccgataagcaggatgatactttagaacttcctttctttgaaaataatgaatgaataattataaaatctatatgctatgattaagaaaacactttatttcggaaatcctgtttatctgtctttgaaaaatgctcagttggtgataaaattgccggaggtggtaaaaagcagtgctttgcccgaagggttcaagcaaatgtccgaggtaactaaacctatagaagatattggagtagtggtgttggacaataagcagataaccattacttcgggagtgttggaggctttacttgaaaataattgtgcagtcataacctgcgattctaaaagtatgccggttggtttaatgcttcctttgtatgggaatactacacagaatgaaaggtttcgtcatcaacttggtgcttctctgccattaatgaagcaactttggcagcaaacgataaaaaccaaaatagaaaatcaggcagtggtattgcgtgagtgtgttggggaagaaataaagtgtatgaaggtatgggctgccgatgtgaagagtggggatccagataacttggaggctcgtgcggctgcttattattggaagaatttgtttaagatagagggctttacaagagatagagaaggtattcctcctaataatctgttgaattatgggtatgccattttgcgagcagttgttgcccgtggattggttacgagtggacttttgcctactttagggatacatcaccataatcgttataatgcttattgtctggcagatgatataatggaaccctatcgtccgtatgtggatagattggtatatgatgtgttcaaagaagaagaattggattgtgttgaattgacgaaagaactgaaagcgaggttattgacaattcctacattagaaactgttatctcagggaagcgtagtcccttgatggtggctgtgggacagactacagcttctctgtataaatgtttcagtggtgaattgcgcaaaatttcttatccggagatgtaatggaccggtttagtgaatatcgtattatgtgggtgttggtgttgtttgatttgcctaccgaaacaaagaaggataaaaaggcgtatgcggactttaaaaaaaatctgcaaagggatggatttaccatgttccaattctctatatatgttcgtcattgtgcaagtagtgagaatgcagaggtacatataaaaagagttaaatctttcttgccggagcatggaaatgttggaataatgtgcattacggataaacaatttggaaatatagaacttttctatggaaaaaagacagtagatgtaaatacccctgggcagcaattagaactgttctgaaaagaaaatcccgccatatagcgggattttcttcttggaaacgacgtctttttttatttctaatatcttatgtaactatgtgtatattagattgttgttgataatctgttgtttccaatgtttcaaagatactaaaatgagagcaaatcacaacgtttcgctggttctttcttcggagcggtcagttgtttccaatgtttcaaagatactaaaatgagagcaaatcacaactcaagacgggtgaggttcagcctggaatcagttgtttccaatgtttcaaagatactaaaatgagagcaaatcacaaccatacggagcgaagacaatctgagcaactcgttgtttccaatgtttcaaagatactaaaatgagagcaaatcacaacttcgaagcctttcttgcccactcggttcagttgtttccaatgtttcaaagatactaaaatgagagcaaatcacaacaacttccagcggtgtatcaccgtattttgcgttgtttccaatgtttcaaagatactaaaatgagagcaaatcacaacaaagaggttaccataaactctcctgagatgttgtttccaatgtttcaaagatactaaaatgagagcaaatcacaactaatattctgttaggttcttgattgtcgggttgtttccaatgtttcaaagatactaaaatgagagcaaatcacaacaatgtagttcgccgttcttgtagaacaatgttgtttccaatgtttcaaagatactaaaatgagagcaaatcacaacgcgttgttcccattcattcggattgtccagttgtttccaatgtttcaaagatactaaaatgagagcaaatcacaaccggcttcggttgatatacctactcttcctcgttgtttccaatgtttcaaagatactaaaatgagagcaaatcacaactcgctgagcaacagaagcacggcaggagaggttgtttccaatgtttcaaagatactaaaatgagagcaaatcacaaccagctcgctctttttcattttttgaatccagttgtttccaatgtttcaaagatactaaaatgagagcaaatcataacttttcacgatgtaccctttaaatgctgatgttgtttccaatgtttcaaagatactaaaatgagagcaaatcacaactatgttaagtaacatactacccattgttgagttgtttccaatgtttcaaagatactaaaatgagagcaaatcacaacatgcgaatatcattgctcgtaaacttggggttgtttccaatgtttcaaagatactaaaatgagagcaaatcacaacagtatgccggatattctttcaaagcagatagttgtttccaatgtttcaaagatactaaaatgagagcaaatcacaacttttcacgatgtaccctttaaatgctgatgttgtttccaatgtttcaaagatactaaaatgagagcaaatcacaactatgttaagtaacatactacccattgttgagttgtttccaatgtttcaaagatactaaaatgagagcaaatcacaactcgcttgtttgggtggtctgtcagtgacagttgtttccaatgtttcaaagatactaaaatgagagcaaatcacaacccattaacgaacggatttcagcgtcgatgagttgtttccaatgttccaaagatactaaaatgagagcaaatcacaactcttggaggaaaatatccttcatatcatagctattttcaatgtttcaaagatttttcgatgagtggtaacgtaatccagtgtatgcaatattgaatgacactggattgttatgttttcgtaatgattcatttgtttttcgatgaattcactgtcactactgctatttgttccatagaggcttacggatacctcttcatacatataatcgagatattgttgggcttgtgccatatctggatatgtgttcttagttagaaattccgtattggaggctgacacttactgtgtacctttgtacacagtaagtatattgataagagttttattcgttttttcatgtttattttatctgtgtttaccaattatctgttctaaatggagctacaggaataccataggtactgaatacacttgcttttgcataatttttgtaagcgtatcgaactgctatcggatgctgcactttatcgcatgatacggcaaggcgggttgttttggtttctatttcggcatgagccggatagaaaattttatcttcaccggcaatctcaaatccttcgagcggggtccacatcggacaaagtccgcgttgtgcattatctatattaatgtatattttatttcctgatatttccatagatttgtaaatgggagtggcatagccgaatcctttttgcccataggtttgggcaagggcccaaagagccagacggctaccaacagtttctttatttgtcgggtggataaagacgggatgccctatatccaaagtagtgaccatcccgctattaggaatgtctttcatattttgttgttggacttcgcgcatacgggcggctgaggtaccatttgctccttcataattgaaaggagcaatctctacaaagtaaaaaggaaattcccctatattccatttgttacgtatgtctttgacaaagacgggcatcagatctttatataaatcaacattgtcgcgattactttcgccttgataccaaagaaagcctttaatagtaaaattagtgaatggtgctattttgctattgtaaagtacacatggagtagctgtaatgttttttattggttcattattattgagtatggataaatcgatacttttaaatggtgtaatagcttcccggctcatccatgcttctacttttgagccaccaagtgaagatataatgataccgaccggtacttctaagacttcttgtagatatcgggcaaaaaagtaagcagttgcacttgtatgggaaacgttgacaggagtgttttctaaccattcacctttacaatcttcttctggtgttttgctaaattgacgtatccattttccatccttagaatctgtattgtagatacggattggagtagaggcttttgctttggcaatgacgtcgtttgtaccttgagtcggttggcggtcaaagccgctcattggcatttccatattcgattgtccggaacaaaaccagacttcacctattaatatattttttaaagttaagagctctccgtcgttgaaagtaatttcataaggacctccagctactggtgtagagatatttaacaaccattttccttgtttgtctgctgctgttttatacgttttgttatcccatgatgtttttatagtgatgggagaattcttttgagctttaccccaaagttttacatttgtatgttgttgcaataccatattactgctaagtatggagggtaattgtactttagcttttacaaatgtagaggctgatagaaaatgtactaatagaagaaaggttattaaggacttaaccactgtgtaatttaaacatctttttttcataatactatttcattttaataaataagataatgtttagttctttgtgacaaaaatagatagggaaacttaccttccaggttaaattgttattaatttgcacatgatatcagtttaataggatcttgtttttaaaatcttatgtcctttatttgttgcggggatttttttgttacctttgcaaagtgttttttaacaatatgctatgagaaataatttgttgatttggatattatgtttctttgctttgggagatttgaaagtgctggcctctacagattatggcctctattttaagtctcattctgcaccgggcaatgaacgcacttctttggctcttgatgaaaattctccttttcgtgtgaagaatgagtttactatagattttcaaatgtgggttcgtaatgagcctgattttggagctattcttcatttatgtacgaatgaaaaccaattccttcattttgtttttgcggcaggtgacaataatcggaacttcccggctttagtttttaatgaaggaatgttctctattgatactaatataaaaaaaaataaatggattccagtttctttgcatcttaatataaagaataatcaaatcgatttgaaatatgatgataaagatactacgatgatagtacctttgcagggtactgaggatatcacagttttgtttggaaaatctccttatttctcgtcagatgtggctcctatgaatattagggatataaaaattactagtgatggggatttaatcagacattggaaattgtggaagcataatggtgaagtctgtcttgacgaagttaaaggagccagggcgatggcttcctatccctcatggttgattgatgaccatattgaatggcggaaaatatatgcagagaagacttcaggacgtttggacgtcgcttttaatgctcgtgatgctttgttttatttagttcgacaagataaagtagatatattaaatgggatttcgggtaatatggataaaatcactgtggagaagggatatccggtgatggaatatacggaccatttggtatatgacactttaacaaatcaattgttttcttactctttacatgaaaaacttgtttctttcttatctgttgatgaaagaacttggagcctgagtgaaaggcatttggacgagcctcgttattataatcatgcacgtacctttaattcaagtgattcttcattctatttttttggaggatatggtttttatcaatatagaaatgatctgtacagattgaaagttggtacgaagcaaattgaaggagttacttattctcctgcgatttctcctcgttattcatctgctgctgctatagtgggagatgagttgtatctttttggcggtcgtggaaatagacaggggaagcaagagtttaatgcttatttttactatgaattatgtgctattaatttgaaaacaggaaagtcgcgttgtgtgtggaagaaaaggcagtctacagatatattaatgatggcatcttccatgtattttgaaccttcagatagctctttttatgcagttagcatgaaagatggaggcagtctatggaaagtttttatgaatgactctgtttgggtggaggtttctaagcctattcataatgatttagtctatcaagattgtgattttagtttttattcatcacctactcatcgcaagttgtatttggtaatggataagattttgagcgatcgcacacatgatgtagctatttattctatcaatactcctttgttgaatgataatgaaattatgcaggttgcagataaaagtttaacacctgtatggttgtggtggttgtgtggtatagtgttgctaggaggggcgtttttctttatctaccgaataaagtgtggtaaaaatagggcgatctctgaagatataaaaagcagcgatactccagtagaaacttttcattttagtgaatcagtagaagaaacagtggaggtagaaaagttctttgatcgcagccgttcggcaatctcgttattaggtacatttaatgttcgtgataaagacggtaatgatataactggtgcttttacacctcggttgaaaagtttacttgtattgcttgtcctttatacagaaaagaacaaacaaggtattttgactaaaaaagtcacagatattttatggtcagataaagaagaagaggctgctcgtaataatcgaaatgtaactttgcgtaagttgcgtgtactgttagaaaaagtaggtgatgtagagattatcagtgatatgggattcttgtgcatcagatggggggaaggtgttttttgtgattatcggatggcattggagtgtattcgtcaatttaaagaaaaaaatgaagaacatggagatgataagctgctaaatcaaatactggagatattattgtatggtccgttgctttcaaatacaattgttgattggttggatgaattcaaagattcttattccagtctttccattgatttgctgagaaatttgttgaatgtgcagcgtaataattatgatacggtactacgcattgctgatatattgtttttgcatgatcctttgagtgaggaagctttagttgccaaatgctctgtcctttttgcacaaggtaaaaaaggtattgtgaaaagtgtttatgaccgtttttgtaaggagtataaagactctttgggagaagagtataaagtacctttatgtaatttgtacaaatagctttcaatgacataaaactagatgctttcttatgccaagaggtgtaagtgataatattttaataataaagcgtttaattgtaatgattaagcgcttttttaatattcctttaatagaagataatcctatattttaagattaagttctttattttgcacaggtagaaaagctcttgtggttctctacatggggtattgagattgtgtgtaactaacttaatcataacactatgaatatgaaaaggatttttttgcttgttttgcttatattaggcttggtaatttcttcttttaaggttttgtctgcaaattctccggagaaactctacgaaaatttacagaaaaaattggcctctgggtggaatacttgggatactcgtagcgtattgacgcacgtgtttcttccttatggctttgctgttgatctcaacatgattgattctgatgggagccgagtgaagaaatttagaattggtgaccgaagtaaaggggcgcctatattgcagcccgggcctcattcttttgatggaacctatactaaaataactgtgaattggcgtggttacaaattgcaagtggaaagtgctgccataggacttaaaaatgtgattttgattacaccattggctgaaacaaaaaaaggagggagattggcagtaattcctgaaattctttggaaacgtggtaatacactggttgtaaatactcgaagttttgttttggcttcacgcgatagggctgttgaaatagaaacatatatagaaggtgaacttctggagaaaaaaggtaaggagtttattgtttctttgaattctccgattgcactttgttgcggagaggctatgagtctggagaaagcaacagcttttgtaaagagacaggcgcaagaatttgttacaactaataaaaaaaggtttggtgagaattacgattgctacaatgccatgcaaagtgttttggcatgggataatatatatgatcccagtattaggaaagtgataacccctgtcagccggatttggagttctgaatggtttgccagtgaagatttcggtggttttacgttgttttgttgggatacttattttgcagcgatgatgctggctgttggtagtaaggaattggcttatgcaaatgctgtggagataaccaaagcaataactgaatgtggttttatacccaattgcttttatagtaatggctttaaatcaagagaccgctctcagccacctgtcggttctttggttgtttggatgttgtacaaacaatataaagagaagtggtttttggagttactttataaagaattgttgacttggaatcgttggtggagtaagaatagggaggataaaggtctattatgtttgggaagtaacccttatgaaaaggttacttattttagatctgaatttgatacgaattgtcattatggagctgttttggagtcgggcctggacaattcacctatgtatgatggagtatcttttaataagcagaaacacttattggagcaacaggatgtgggtatatcttcattgtatgtaatggattgtgattatttggcattgatagcagaggaacttaattataagaaagatgctatggagcttagggagcgtgcggattattatcgtgctaatttgaaaggcttatgggatgaaaagacaggtttttattacaatcgttctactaggaccatggattttaattatcgtacctcgcctacttgcttttatccattgttggcaaaagcacctacacaaaatcaagctgaacgaatggtaaaagagcatttattgaatactaatgaattttggggaaagtatgtgattccatctgttccga

SEQ ID NO: 1250 - DNA, 23459 bp, synthetic construct
  misc_feature 1..23459: note = Synthetic
  source 1..23459: mol_type = other DNA
gtaatatccgaaagcaacatgccataagtggttagtacaacttcgtatttttgaaaatctgctgtacttttctgtctgtctgcgccataatgggttagtacttttacagaaggtgcaaatttagccaattcctcctgccagttgaaaagcagggaagtaggtagtaccacgaggttggttgtatgaccatgcttttctctttgcgagaggataaaagcaataatctgtattgtcttacccagtcccatatcgtcggcaaggcagcctccgaaattatgactgtccaggaagtttagccagttcagaccttcctgctggtaagttcttagttcagcattcaaggctacaggcactgcaacttcgggaatttctgcatttacagaaaaattgtgtatataggaagctatttctgcctgtacttcgttacttagaacttctttctcaaataaatcctgtatttcggtatagctgatcttcggaatcttcaagacctcttcgtcgatatcgccggcctgaaagtaacgtgcaattttatgtatccattcttccggtaatattccaagagtaccatcatccagttgtacaaatttacttttgtttcggatggccttgtgtacctgctttagagtagcttttttatgtccaaaacttactttcagctgcgcattgaaccagtcgattccgcttgtaacctctatagtaattttggcacggtgcgcattgagattgttatttttgatattgttgaaacccagaatgttgatatcttcgtttcgccatgtctcaaaggcgttcaaaaaccattcatcatccaggaacttatctttgtgaaggtaaaagtattcctgttcttctatttgttctctgaaatccgggtgttgttccattaccactctggttagccggatttcagcattatgatcacgctcaattttaaattcatttccgttctggtcggtatccagcagctgcttgcgggagtacaccggaatttccacattgccgtatttcattactggtgtaatggatatataattgccttcctgatgcagataaataagcttttcggttgtgtaatctttatcggcaatttccgtaggtgttgcctgacggatatagctgtaattaatctgtacccgttgttccagctgggtcagtatactctgcatgaagacttcgtatctggagctgtgaacgagtaatatttcgttgttggatttaaagaactgtatcacccgcagcatatcgggatctgtaatcagataataggtattccggtagtaaacaaaatattcgtttcggataacaacctgactgaaggggagtgttgtatctctgaatagcaattctccggttatttcataaaaaggctctttccggaagacatggagctggatttcagcctgcagtgtattcagatgcacggggactaatgactttgccgatatgctttccgctatagctctgtcgtggaaatagacttccagattcaatgggttttgcacaatatgcttcagtgcttcagtttctgcaggatcggtttctccgtactgattgttgaagcttgtaatagcggtatagaacttaatctctgaagcctgttctgctttccacagcaacttcattgcatcgatattgtttaccggatttttaagctttccggtctgggtcgtatcggcttccatgagttggaaattcagctgattgtaatagcggtgtttaccaataaccagtatctgctttttgttggtgtcctgcgtggccagatcctttatgatggatgtacggcgggggagcaaatctcttttcagaatatgctcgtctacctgcagtaattcttttattttagggcttacctgaagccggccattaagataatccagccgaaaatatatatccagattaccttcttcttccagtccatagcttttagcataggggagcagggttttgtgccgcagataagcatcaaagaaaatacggtagtctctttcttcaagcaggcaataaataatctcggcctggtgtatacacagcttatcttcagccgaattacaggagcacgacgttaccatattggcaccgacctgactaacagcgactctggggtagtccgacaaagaagaacttttcgtaaacacaccggcatttaattccagtgccacagggtagatatcctgaaattccttcacagctataaaatctgcatttgctgtatgctttagcaggtcgtatatatgcagtgttcttatattaaagtctggtaagatatattccttaggcagttccatgcgctgaattagtgaagaacaaaagtaaggattttagtgaagctttacttctgtataagtacatctgaatctgaaaaaataagcgctattgttacagcagtattttatctccggtaatacctactttgtaccatttgttattttcatataaagcggcctgatgatctcctttgtgctgatttacatctacgcccagtacttttttattatagtaaaatccaacattggtttttacaatcgtatgacctacaataattctttttacctgaaacaaggatagcgtttggtctacaactttctcatctactacaggttctttaaagtatccgcggtaccagaaaatgccatctgtgctattgaatattttcagaatggtagcatcggtaacggtatttttaaggtttttccacccaatataaggtctggctatttcatttagtttttctatggtcagccccagactgttaacatccggagaaataccaccatgcatacacagattatcgccgattttttcaatcagatttttacttctcagccaccgacccagttctgttttttcactgtataaatctgcataggaaaggtttagcttctccgcattcaggaaatatttctggtctacatatttaaagttgcctgccagattcataatgtcgtgattgcccaaaatagtatgaacgtagccacctttcagtttagcttcttcttccagtttataaagcaaccacatcgtagcaggtacttcggttcctctgtcaaacagatctccgcaaatcaccagatgcccgtctccatagatccattcgtattttttattaataactttgttcgccagtaacagctctcttagtgcatcgaattcaccttcaatatccgagagtaccagcattttcttaggctgtgctgttacagagggctcattcgaaatattttgttttagttttacctcgaagtttttctcgggtgcatccgaaaaactgatgcgcagttttatagctttcttatttttttgaaggtaatgttcttttttctggttgccagcctcaatttgttgcacaagaatactgtcacctttataagtaacatatggaccatcggacgaattgacaggtcttttttcctgtccctgaacggagcataaactgatagaaaataataatagtagcgcagattttataggagaaaacatcatgatatagtattaatctgaacaaatataagggataatggggacttgggaatggggtatcggttgctagttgttagttaagtacgaagttagaagttagaaaaaagaaattagagatctgccttaagtgatttcatctggctaatcaaaagctcctgactatatcggttttttataattaattacccggatattttatagcatccgaaagttctataggattgttgttttttcttattgtaaactgtttttgtttcgtaagctcattgaaattaggtgtaactggcttaccagattcatcaacaaatttcatttttactttaccggttttggcttctttatttctttataaagatcttctattttattaaccagtcgataacaagatctgtcgttgattcggcatcttttgagataattaaaatcattcaatacatttaaaattatccattagaaactgcgcttcattctttgaaatatttttagaaataacaagtgttaccttattctttttattgcattttatggtttttataaaattactgtcagggtattttttttgacctgcggaaatatcaaaaaagtgttcgaatacagtagtattattatgataagttgtaaaggcatataataatttgttccgacttttaaaaggtattttattagttatagacttatcatccattattttcctgtattgctgcatattttgtgcgtaaacaaaatctccaaacataagcatcataattttataatattcattggtataccgataataattaccatttgaataaaattcagatttgttcggaatcgagttataggaagcatacttactataggatgtacagttggttaaaaataaaattaaggcaaataaaagataccttgatttttgtacacctttaactggataaaattttaataacatgctgtcaaattatttaagtgttatatcacttcattttttaaatcttcaaattagcaaattttcaaatggctgcttcttcaaattgaaataattttatcttatttttgcccgaatattcactaatacgaggattcatggaattaaattataagctagaggaacaggattatttacaattgtatatgtatgctgcttctaaaaatcaggttataaaacagcagcgacaaagggtattatggcttctgattataatctacatcgtttgttcattgcttatgtttagtatgagtatggtttctttgtttgtttttatagcagctgctattactgttacgcttatttatatatattactatgaacgtaagcgctatgaaaagttttacttaaagaatataagaactaatcttaaaaacaggataggggttaactataagactgtatttggccctcacgatgttattctgacagagcctaatgctgaagcaaagtttaaataccccaatatagaacttgtagaggaaattaatacctattatttctttaaaatgaaaaccggtgaaagattcattgtgactaaaagtgctattcaggattctcaggaatttaatcagataatcagtaaactgtctaaagattataatattcagttgtgtcaggaactcaactggaagtggagataggagattagttattggttgtcagtggttagttgctggtgaaatgtgtaaccataaaatcgtattaccttattcacatattatagttgtaaaatcgtttaatcgtgtaactgtgtaatcgtaaaccgtataagcaaatttacgacttaacgattgcacgaattcgcatattccaattagtttacataattgcataacattattaatgaatttgtaaattaatatttacatctgtttcctgtattttattctttttttcacttatttttgaattataataaattgcattaactagagatatggaattgaactataaagtaagtgaacaggattatttacaagtatatatgtatgctgctacaaaaaatccaattataaaaaaacaacgtaaaaatgggctgataagaatgattgtttttagcataattggtttatgcttaatgtataatactagtataatttctttacttgtttattttctattcgttgtctttacattttgtttttattttttatattatgaacgtaagtactatgagaagttttatctgaaaagcataaggacaaatctgaaaaacaagatagggcttaatagtaaggttgtttttggtcttcatgatattattcttacagaacctattactgaatcgaaatttaattattccaatatagagcttatagaagaagtaaaggattattattacttgaaaatgataacaggagaacgacttattattcctaaagttgttatactaaattctgaagagtttagtgagattattaatagattgaaaaataactataatattcagttggaacaagatctcaactggaagtggagataggattagttattggttgtcagttgtcagttgttaaactgtgtaatcgtaaaatcgtgtaatcgtattacctcattcacctattgactcattgacataattataattgtaaaaccgtgtaattgtgtaactgtttaatcgttttacagtgtaaacaaattcacccattcaccaattgactcattgatatagtatagttgtaaaaccgtgtaatcgtgcaactgtaaaactgtatatacgaattaacgattacacgaattcactcattgacatattcacccattcaccaattgacccattgatatagtatagttgtaaaactgtgtaaccataaaatcgtgtaatcgtttaactgtttaatcataaaagcaaattaacgattacacgaattaacaaattcacatattcacatatttacctgttcataaatcttatttttttcttttggcttataatttgtagttgttttattttaaaataagaaatatttactttattttaaatgatagaaataaaattatactgaaattaacttgtgagcatagtacgggttgacgtctaaaagcagattctgttaatatctacaacttgtaattgttctgattaataaaacactgatgaaatctcaagatgaaaaatttaactacaacaaagggcaaagcctggcaccggaggatatattaaaggctctgctggatgcattgaaaaattacgaaacctcgggagagaagttttacgatagtgccgatctgaagcgtctgttgaatattagtgacagtacgctttaccgattgcggaaaaccaagagtattccttttatacattttggaaaaaagtacttttaccctaaatcgttttttgataaaaaagccgaggggtaaattattgaattttaaacgcaaagaacgcaaagtttcattttcttttatgttgtttttaaggctcgccaagccgctaacacttagcaatgagcactaaaaacttaattgccttaacttctaaatgttgaaaataattttatcgtaagataaaatctttgtgctctgaaagcagcgctctatcaacatcacttttgtttctttgtagttaaccttttaattgtcctaagacttatcataacactaaggcacaagatatgtttatctgctttgctttttaaggcacgaattgcttcgcaatactctttgtttattatattttcagcgtcagttcgagtggaattattgaatattaaacgcaaagaacgcaaagtttcattttctttgatactgctttaaaggttcgccaagccgctagcgcttagcaatgggcactaaaaacttaatttccttaatacctaaatgttgaagataattttacctaccgttgatctttgagttattgaatattaaccgcaaagaacgcaaagtttcattttctttgatactgctttaaagatttgccaagcggctaacacttagcaatgagcactaaaaacttaattgccttaacttctaaatgttgaagataattttatcgcaagataaaatctttgtgctctgaaagcagtgctgtatcaacatcacttttgtgtctttgtggttaaccttttaattgtcctaagacttatcataacactaaggcacaagatatgtttatctgctttgctttttaaggcacggattgcttcgcaatattcagttttcaattgtggcagttcgagtgaaattattgaatattaaacgcaaagatcgcaaagcttcattttcttttatgctgttttaaggctcgcgaagccgctaacacttagcaatgggcgctaacttaactatcttaacttctaaatgttgaagataattttacctttaggtgaaatctttgtgctctgaaagcagtgctgtatcaacatcacttttgtgtctttgtggttaaccttctaatagtcctaagacttatcataacactaaggcacaagatatgtttatctgctttgctttttaaggcacggattgcttcgcaatattcagttttcaattgtggcagttcgagtgaaattattgaatattaaacgcaaagatcgcaaagcttcattttcttttatgctgttttaaggctcgcgaagccgctaacacttagcaatgggcgctaacttaactatcttaacttctaaatgttgaagataattttacctttaggtgaaatctttgtgctctgaaagcagtgctgtatcaacatcacttttgtgtctttgtggttaaccttctaatagtcctaagacttatcataacactaaggcacaagatatgtttatctgctttgctttttaaggcacggattgcttcgcaatattcagttttcaattgtggcagttcgagtgaaattattgaagtttaaccgcaaagagcgcaaagtttcattttctttgatactgctttaaaggttcgccaagccgctagagctcagcaatgacgactaaaaacttaatttccttaacttctaaatgttgaagataattttatcgcaagataaaatttttgtgctctgaaagcagcgctctatcaacatcacttttgtgtctttgtggttaaccttctaatagtcctaagacttatcataacactaaggcacaagatatgtttatctgctttgctttttaaggcacgaattgcttcgcaatactttttgtttattatattttcagcgtcagttcgagtggaattattgaggtttaaacgcaaagagcacaaagcttcattttcctttatactgctttaaaggttcgcgaggccgctagtgcttagtaatgaccgctacaaattactccgtagaatcttcgacttagagttaaataacttccttccaggttacatactagtgtactttagcagcacttttgtttcactcttgttcggggtttgttcgggaatacccccgtttttaggcaacattcccgaagcatcctcgaaggatccccgaacaaagccattaaaaagcattggatgtataggcagtaaaagcctttactcatggtgtttttcagtgttttcagacagaggattgtatcgtatttcagaggtttataccggtcaaaaccagtcaaatgcagtcataatcggtcaaaaccagtcacgaaaactgaaaaataacttttgaaaacaataagtctataccttggctctgcaaccaataaattttatttattatggcaacaattagtaaaggaatccttggtggattctcaggaaaagtaggcaccgtagtgggtgttaactggagagggatggatatcatccgaagtgtaccaaagcggtcgcgaaaacggccgacagataatcagatgttgcaacagtacaaatttaaactggtcgttagcttcctgcagcctctgcgcagtatccaggagttgtatttcggaagtccgcagggaagtctgtcacgggtaaacctggcaacatcggaaacgctgaatacggctttggaactggtgaacgatgtgccggaattggtattcgaaagaatactgattaccaaaggcgagcttaccggatttcagaatctgaaaatcagtccggaaacggggagtatcctgaatctggaatgggaggacaacagcacacaaggtaatgctaaagaaacggatttgataaaccttatctgttatctggaaacacagaatgcttttgtcatctttgaaggactggtagcccgtaagcttattaaggctactgcaaaactgccggatgtgtatcagggaaaggaggtgcatgcctgggctttcctgaacaacgagaagaaaacacaggccagcaccagcgtgtacctcggcaaaattaccttaacctaaacaaaagaccacccgaaagggtggttttctgttttatatgtaaagaagttttgagaaaagtaaaataaaaacataaaaaatcccccgtattggaagacgaggggggcttgaatgttttcacaacggaataatccttattgtgaattgctttcatttacaaatctatgtaaataaaattaatttcaaatacggaaaaccgtaaaaatgaataaaaaagtctttttatatttagtgggtatttgaaatgaagacaattatggttaaaaatatacttggattagacctaggaaccaattctattggatgggcactaatcaaacaggattttgaaaataaacagggagaaatcctcggaatgggtagccggattattccgatgagtcaggatattttaggggattttggaaagggaaattccgtttcccaaactgctgaacgtaccaaatacagaagtgtaaggagattgcgtgagcgttttttgttgcgaagggaaaggcttcatagagttctgaatgttttagattttctgcctgaacattatgcctcacaaattgattttaataaacgcttcggaaaattcaaagaagaaacggaaccaaaattagcttatagtaatgatggttttattttcaaaaaatcatttgaagaaatgattccggattttaaaactcatcagccacagctattagaaaataacaaaaaagttccttatgactggactatttattatctccgcaataaggcactttctcataaaattgaaaaagaagaactggcttggattcttttgaattttaatcaaaaacgtggatattatcaattgcgtggtgaagattttgaagaagagaaagataaagtgtttgtcagactgaaagtagacagagttgttgattctggagaaaatgtgaaaggaaggattctttatgatgtatattttgaaaatggatggaaatatgaaaaacagattgtaaaaactgaagattggataggacgtacaaaagagttcatcgttacagaatctattctgaaaaatggtgatacaaagagaacctttaaaactgtggattctgaaaaagattggattgcaataaaaacaaagactgaacaggaaatcgacaaatctcacaaaacagttggagcatacatttacgaaacccttcttcaaaatccaaaacaaaaaatcaaaggaaagctggttcgtaccattgagcggaaattttataaagcggagctgaaaaaaattctggaaaaacaaaaagagtttcatccggagctaagacaagatgatttatacaacgattgtgtccgcgaactctataaaaataatgaagcccatcaactgacattgagtaaaaaagattttgtacatctttttatggaggacattattttttatcagcgaccattaagaagccagaaatcatccatttccaactgtactctggagtttagaaaatataaagacgaaaatggaacagagcatatacaatacctgaaagctcttccaaaatccaatccatattatcaggaatttcgcatctggcaatggatgtataacctgaatatttacaaaaaagaggatgatacgaatgttacaaagcattttttgaacaccaaagccgattttgaaagtctgtttgaatttttaaacaatagaaaagaagttgaccaaaaagctttgctgaagcattttaagctcaatgataaaacgcatcgctggaagtatgtagaagataaaaagtatccttgcaacgaaaccaaaacgatgatttcagaaaggttaaaaaaagtagaaaatatttctgatgatttcctaacgagagaaattgagcagaaaatctggcatattatctattctgttaatgataaagttgagtatgaaaaggcactgaaatcttttgccggcaaaaataatctggaaaaaaattctttcttcgaggctttcaaaaagtttcctccttttaaaagtgaatacggtgctttttccgaaaaagctattaagaaattgttgcctttgatgcgattgggaaaacattgggattacagtaatattagtgaacaatcaaaatccagaattcaaaaaattattacaggagaatacgatgaaaatattaaagacagagtaagagaaaaggctgttcatctcaccaaagaaaccgattttcaggggttacagttgtggttagcacaatatattgtttatggaaggcattcagaagcagcaatgttgggcaaatggaactccgctgacgatctggaagagtttctaaaagaatttaaacaacattcacttcgcaacccaattgtagaacaggtaattacagaaacacttcgtgtgataaaagatatctgggtgaaatatggaaatggagctaaagatttctttaatgaaattcatattgaactgggtagagaaatgaaacttcctgctgaggatcggaagaaaatcaccagccagatttctgaaaacgagaatacaaatctccgcatcaaggcgttattagccgagatgatggctgatagttctgttgaaaacgttcgtcctttttcgcctatgcagcaagagattttgaaaatctatgaagatggtgttttaaattctgatatcgaaatcgaagatgatattctaaaaatcagtaaaactgcacaaccttctccatctgatttaaaacgatacaaactctggctggaacagaaatacaaatcgccctatacaggacagattataccattaaataagttatttacaccggaatatgagattgaacacattattccgcaaagccgttattttgatgatagctttagtaataaagtaatatgcgaatcggctgtgaataagttgaaagataatttcattgggcttgggtttataaagcaatttggaggaacaattgtagagtgtggaaacggaaaatcggtaacggttttaaaagaagatcaatatgaagattttgtaaagaaacattatgctaacaaccgaagtaaaagaaataaactgcttttggaagatattcctgaaaagatgattgagcggcagatgaatgatactcgctatatcagtaaatatatttctggtgttctttccaatatagtaagaacagaagacggaacagatgatggcgtaaactctaaaaatatagtgccggggagcggaaagataacaaataccttaaaacaagactggggactgaatgatatctggaacgatttgattttaccacgttttgaacgaatgaatcaactgaccaattctacagattttacagtctggaatgaaaaccatcagaaatttttaccaactgttccggtagaattttcaaaaggattttcaaagaaaaggatagatcacagacaccatgccttagatgctttggtgatcgcttgtgctacaaaagaccacgtcaatttattgaacaatcaatcggctaaatcagatacgaaacgatatgatttaaaaaagaaactgatgaagtttgaaaaagtagtctacaaaaatccgcataccggtgaaaaaatagagcgtgaagttccgaaacagtttctgaaaccttgggaaacttttacggttgatgctaagagtcgtttggaaacaataattgtgagttttaaacagaatttgcgtgttataaataaagcgaccaactactatgaaaaatatgtagaaaaagaaggtaaaaaagtaaaagaaagagtagagtagaccggaacaaactgggcgataagaaaaccgttacacgaagaaacggtttctggtaaaataaatttaccgtgggttgaaacaagtaaaggagaatttattactgccacaagaaaacctttagatataagctttaatcttgagaaaatcaaaaaaataacagatactgcaattcaaaagattcttgaaaactatcttgagacaaaagataacaatcctgagttagctttctcaccggaaggaattgaagacttaaataaaagcattgaaaagtataatggaggtaaattacatcaaccaattatcaaagttcgagtttacgaaaaaggaaaaggtagattttctttaggacaaacaggaaataaagttgataaatatgttcaaggttcgccaaatttattttttgcagtatataaggatgaaaatggaaagaatagctttgaaagtattcgtttggatattgtgattgaaaggatgaagcaaatgctaaatcctgttccagacctaaatagcaatggagaagaattgtttaaagttctttcaccgcttgatttagtttacatacccacagaagaagaattacataatatagaaactcttgattttaacaaaattgataaaataaaattagaaagattatataatgtaaatgatttttctggagtaacaatttattttagtcaaaattcatttgcaaagaatatttatccaaaagaaatggatatgagctggaatgaaaaaagacaaaaaacttcaggttcttttgattccaagacagcctcatttaataaaaaatctataaaggaattttttgtgaagcttaaaattgaccgtttaggaaatatttcaaaagtatagttttatgatcacccgttccatctacattggcaaccctgcttatcttaaactcaaagacgagcagttgtatattctatgtcctgaaactaaagaactaaaaggtaaagttccggtagaagatttagggttgctgatgctagatcattttcagattaccatatcgcatcaattgattcagaaaatgatggggaataatgtagtagtggtcagttgcgatggtcatcatttaccgcacggaatgatgttgcctttgtatggacatactgaacattcagatcgggtaaaagaccagctggaagccagtgaaccccttaaaaaacaactttggaaacaaaccgtggaatgtaaaattgaaaatcaaaaagaagtattgaggcgtttgggaaactattatgaaccaatgatagattatcaaaataatgtgaaaagcggtgatattaccaatatggaaggtattgcagctcaacattactggaaatatcttattggtaatggttttttacgggaaagatttggagattctcctaatcagttttttaattttggctattcggttttgcgcagtatggttgccagagctattgtggagactggtttattacctgtgatgggtatttttcataaaaataaatacaatccttattgtctggcagatgatttaatggagccgtataggccgtttgtggatgtattggtgatgcaatggctccaaaccaatccggaagcagaagaactgactaaagagtttaaagcatatcttttgcaaatcgctactaaagatgtaaagattgatggaaagaccagacctttgctggtggctgtaaaaacaacagcatcatcactatataaatgttatacaggagaaaaacgtttgattgcttatcctgaactgatatgaaagccgaaaggtttaatgcttaccggattatgtgggttctagtactttatgatttaccaaccgaaacaaaggaaaatatgcgggatgccaatctatttcgtaaacgtctgttagatgatggcttttcgctttttcagttttcaatgtatatccgccactgtcccagtagagaaaacgcagaggtccacatcaaaagggtaaaagtcatgttgcctaaagctggaaaagttgctattatgtgtattaccgacaaacagtttggtgatattgaaattttcttcgccagaaataaagaagaaccaccgccgacctttcaacagttggaattattctgatttttaaattctaaaaaataataaaatccgttgattttcaacggattaaattttgaggttgtgttatatcacaaagatatctaaaattgaaagcaattcacaaccattgcttcatcaattgcgttttccggattgttgtgttatatcacaaagatatctaaaattgaaagcaattcacaacaattgttagaagttggtagagactgataaagttgtgttatatcacaaagatatctaaaattgaaagcaattcacaacctcagcaatgttatatacgatttgagttgtgttgtgttatatcacaaagatatctaaaattgaaagcaattcacaacttaagagcataatcagcatctacagtgttggttgtgttatatcacaaagatatctaaaattgaaagcaattcacaactcatggaaagaatccaatacattactgattgttgtgttatatcacaaagatatctaaaattgaaagcaattcacaacaaagtctattgaaataatctccaaacttctgttgtgttatatcacaaagatatctaaaattgaaagcaattcacaacccaggtgaaacatgggacccgaatgcttcagttgtgttatatcacaaagatatctaaaattgaaagcaattcacaacccaggtgaaacatgggacccgaatgcttcagttgtgttatatcacaaagatatctaaaattgaaagcaattcacaacttattacgggctttttttcggttgtagtgtgttgtgttatatcacaaagatatctaaaattgaaagcaattcacaacttgacattcttattccttgcaaccttataagttgtgttatatcacaaagatatctaaaattgaaagcaattcacaacgaagtgtcgaacattggggcgtttgggattgttgtgttatatcacaaagatatctaaaattgaaagcaattcacaacgggctgaaaatttcttccataagtctgaacgttgtgttatatcacaaagatatctaaaattgaaagcaattcacaacaagaatgcaatggaatcgaaaaaatgtattgttgtgttatatcacaaagatatctaaaattgaaagcaattcacaacaaccctttccgcttcttctttgtcggcgatgttgtgttatatcacaaagatatctaaaattgaaagcaattcacaacatacagaggatgcgcaggaatacgattatagttgtgttatatcacaaagatatctaaaattgaaagcaattcacaacatctgcatcaatatcgtcaattgccttttggttgtgttatatcacaaagatatctaaaattgaaagcaattcacaacaaactgagaaagttttacagcttgatctgtgttgtgttatatcacaaagatatctaaaattgaaagcaattcacaactgtatggtatctgcgttccaaattctaatagttgtgttatatcacaaagatatctaaaattgaaagcaattcacaacgtaattgcgtttgtaatttcgattgagttcgttgtgttatatcacaaagatatctaaaattgaaagcaattcacaacaaaaggagttctgcagaatgaaagcgaagggttgtgttatatcacaaagatatctaaaattgaaagcaattcacaaccatatctataccacttaataatcgagcaaagttgtgttatatcacaaagatatctaaaattgaaagcaattcacaacgaggctcaatgagctgtatggaagctgtccgttgtgttatatcacaaagatatctaaaattgaaagcaattcacaactaccctgagactttggtgtttcggattttggttgtgttatatcacaaagatatctaaaattgaaagcaattcacaaccggtatctgataccagagtttcgatagcctgttgtgttatatcacaaagatatctaaaattgaaagcaattcacaactaagctcctcatgaagattaagagcgtttggttgtgttatatcacaaagatatctaaaattgaaagcaattcacaacagcccgttaatatcctgcattaaggttccagttgtgttatatcacaaagatatctaaaattgaaagcaattcacaacggtcgaacgcctccggttgtttaactctcagttgtgttatatcacaaagatatctaaaattgaaagcaattcacaacgaaaataatcacgttcaaaaagggaagttcgttgtgttatatcacaaagatatctaaaattgaaagcaattcacaacaataacccatctgttaaatagcttaagttggttgtgttatatcacaaagatatctaaaattgaaagcaattcacaacggaaaaagcaaagataagcctaaagaattcggttgtgttatatcacaaagatatctaaaattgaaagcaattcacaactagaatttgtatctgcaaaagatgaaagaggttgtgttatatcacaaagatatctaaaattgaaagcaattcacaactaagacttagaatatccttacaaaaaaaatgttgtgttatatcacaaagatatctaaaattgaaagcaattcacaacgtaaatagcgttattcccatgttatgaaacgttgtgttatatcacaaagatatctaaaattgaaagcaattcacaactaaatcctgcctgtcatgcaaacgtgcttcgttgtgttatatcacaaagatatctaaaattgaaagcaattcacaaccgagtctaaatagccatgtgggcgtgcatggttgtgttatatcacaaagatatctaaaattgaaagcaattcacaaccgagtctaaatagccatgtgggcgtgcatggttgtgttatatcacaaagatatctaaaattgaaagcaattcacaacgggttcccatatataaaaaataggatcatagttgtgttatatcacaaagatatctaaaattgaaagcaattcacaacgacaacattattaagctttcagaacttgaagttgtgttatatcacaaagatatctaaaattgaaagcaattcacaacagaaaaagagaaggtatgagactgctagcagttgtgttatatcacaaagatatctaaaattgaaagcaattcacaactatagttcactaccccagaattgcatagaagttgtgttatatcacaaagatatctaaaattgaaagcaattcacaactgaaaaaataacgtgtgaaattaagagtaggttgtgttatatcacaaagatatctaaaattgaaagcaattcacaactgaaaaaataacgtgtgaaattaagagtaggttgtgttatatcacaaagatatctaaaattgaaagcaattcacaacgcatatgaagtgaggtacttttatagatttgttgtgttatatcacaaagatatctaaaattgaaagcaattcacaacagcttttagggtagtttctggtacttcagagttgtgttatatcacaaagatatctaaaattgaaagcaattcacaacggcccattcttttaaggcactaataggcgggttgtgttatatcacaaagatatctaaaattgaaagcaattcacaaccgttaatacatgatctccaattgctggagcgttgtgttatatcacaaagatatctaaaattgaaagcaattcacaacgtctctctgttcatctgtgcaaccaatttagttgtgttatatcacaaagatatctaaaattgaaagcaattcacaaccaattccaagcatacccaacataccgaaacgttgtgttatatcacaaagatatctaaaattgaaagcttacaataaattaaggtgtttttattgtaaattagatttacataatgagccttttgtggttaaccctgtttagtcgataaagatcattataaaaaaacaaaaacctttcagtactcctgaaaggtttttttgtatggtttaggtttttaattttaatcgtgcatttcgctttcgacatagccttcatcttcgatctggaaggtcgtatggctaattttgaaattactggtcgcctgatcggtgagtatccgaagcatttggttatgcggaatgctttgatcggagacaacatgggcgctcatcgcattgataccagaggttagcgaccatacatggaggtcgtgcaggcttttaacacccggaactttttccatggtactgcgcagttcatcaatatctacatctttaggagtaccttccaataatacatgaatagcttccatcagaagtcgccatgttcttgggaagatcagtaaaccaatacctgcagagatcagtggatcggcgtagtaccagcctgtggtcagcataaccactccggcaatcattactccgacagaggtcagcatatctgataatacttcaaagtaggcacccttcatattcagactgtcaccagagctttttctaaggatcatcatcccggcaatattcactaaaagtccgattccggctacgataagcatagctttgctctgtacctccggtgggttcaggaagcgctggtaagcttcataaagcacataaacggaaattcctaaaaggactacagcgttgattactgcggctaatatctcggtacggtaatagccgaatgttttggaagatgtcgcttttcgttcaccaatccggatggcaatataagccagtaagaggcctacaacatcggtaagcatgtgtgctgcatcggctaacagagccaaactattggtgataattccaccaatgacttcagcgataaggtaaaggccgctgaaggaaagtacaatcagtaagttctttttgtgcttactggaggctgaggctgtttgtatatttgtttcactcatgatgtttggtattacatttcgtagtataaaggatttctcttcttctgcggtacattttgctcaccagtcatttccctcaggttgatttctatagtctgtgccagggaagtcatcggggtgtctactggggtgttttcaaacggatcctgcatgataatagctgttttttcaatcgcgataaagagggtagggatcaggatggtgattccaatttctatgattaacaaacaaagctgagaatcgtcgaatccaaatggtagaatggcagcaaatacatagatgagactatgtaccaaaatgctgtaagaacgtggaaatacggtatttttgattctttcacattttcccatgctgtcgcataaacgtgctaatgtttcattcagttgtatgagtctgaactcactgatcagccctttgtccgccaattgctttagctgcaaagaatgttcatccagtaatgcattgggaatattagtggcttctattctgtgatcgataagataatcctgaacacgatccgagaaagggagctttctgagggattccccaagagcatagttccagataatctgacgctgtgcaaattcctgaataatagtctcacttcctaaaggaagtgcctgggtaatctgacggataaatgtgcgggaatcgttgacaatagcgccccatatcatacgggcttcccaccatctttcataggattgtgaaatccggaaggccagcaggagagatacagctgtacctaccaatgcaggaatggtaagaggaagtgaaattttctgaaaagcaggaagcaaatctaaaataccaatagcgactgcaaacatagagatcagtaataactgggatttgattaaattaatgaaataccagatggatattttcttttttagcagcatagtgtgttgtgttatggtttgcgatgtataaataaaaaggtgttttttgttataaaaatgtcagcccgggtgtttaatggaaatgacgataaatgacaattaaagcgtaataattaataatactaaacaatataaattaaacttctgaaaccatattcaattataaaaatgattcaaagtattacactggtttacccggactgacgtgtttacattagtgtgtgtttttgggttaatgtaaatttattttaatgttcgtgctcaccaacattggtaagcttagcattgacaaagaaggctccttttacgacaattttagcatcaggtgcaagctgccctacaggcgttattgctgtatagcccatgtcagatgttccttttataacctctactttttcgaagttgacggttcttgcatgtgattgctcagcaggagcagtttcttttttatcttttgattctgcttcctcatgtgcttccggctttttgtctgtttgtataaagacatagaatttaccatcagcttctacaattgcttcggttggaatagcaggtgtagtactgtgatccaggctcactactccggtaatattcatcccgtcgataagcccggtcttgttaccgattacagtacagtgtaccgcaattgttttgctttcgttctcaaaggaagatccaatgctgtataccttagcatcatattctgtttcaggattattagtgagtttgaaatgtacaatctgaccaatacgcattcttggcaggtctttttcaaatacctgtaaatccaggtggagcgaagtgttgtctataatttcggctacgggagcggatacatctacatagctgccaatctgtgctctgatattgctaattgtcccgctgattggagcggtaatagccaaacctgttctcatgcttgcattggtaacagaagccggattaatacccatcatttgtagttgtcgggctaaagaagccttttgggtagacaatgttctgagttcggaagaagaactctgaaggttctttttggttcccgcgtcgttgttatacaactcgttctgtcttttaaattcctgttcggcaaaagcaattctactgatagtagtaagatactgttcctgtacgcggatgtattccgggttggcaatggtggcaataacctgacctttgcgaacatagtcaccttccagaatattaagtgtttttacgactccgctgaaaagagctgctacagtagctttattgttattgggaacacgaagcagaccattggcttttacagtagccgttagttccttcatttctattggacctgtagtaacgccgactgactgtatctggtcttcggtaagactggcaatagtaggagctgcctcttcatggtctttagctttagccgtctgttcggttttactctcgggagcggcttcttttttgccacagctggtgaagattaaagaagcggttatcaggtagattatggtttgtttcagtttcattttattgattaattatagaattaataataaccacagattggtttacttgctgtatggattccagatatttcagctggatattggttgatgtctgcagagcgaaaaggtattctacataagaaatatctccggtgcggtaaccgagttgtgctgctttagcgattttttcggcattaggaatggcctgttgtacataataattgtactggtccacgtcctgtcggtattggcgcatagcagtatcaaactgtgtagtcagctgttgctgttgcaatttggcgttgttttccgcagcctgtctttggtattccagtgattgtattctggctttggttgcgccaaaagtaagcggaatgcttacaccaacgtttaccgaattaaaacggttccagccattgtagtatttttcaccaccattattggttgggtgcatacccgtaagggactggctggtgacgcctaatgtgaattccggtaagccctgagctttttctatttttttgtttttatcagcaatttccatttcctgataaaaagctcttaccgatggattattggcaattacactactgtccagtacatagtctatttttaaagggagatactcctctttaggagctacttctatagattctgaagtgttcagtaaggttttcagattcttg
